United States Patent Application Publication US 2007/0054278 A1 - sequence listing, part 27

SEQ ID NO: 94054 - DNA, 603647 bp, Homo sapiens
  misc_feature (1)...(603647): n = A,T,C or G
ggaactctccctgtttcagcataccttacaggtcttggtttaaatttgtcttagaaccttcaatccacagttctttgggttgactgttgaccttctgctaattcactgttatttctggatataaggagtctctctctatatatatatcagagacagcttttttttttcatttgtgtgtttgaatgaatagatgaaatacaaacatatcttcctaaataaggacgcattgattagaagagttttccataagactgctgttcaacattcttccttattggttacttctcaatgagaaattatccgaagagctaggatgcctcccagatctcattggtacattgagttttgcaccaaagcatcaggcttaattttccaaggaatggcaatttaagttaaatcaggtttgcagagttgtcggggtgtttgtgtatttgaggttgggaggggaaggaaacgatcatcttcagggtaatgataataaactaataaaatgtggctccaggaatgttgcactaaaactttgtgcctcctgcatacatttcttttgagtaatgccaaattgtgttcagtaaaatctgatcaatcttatgtgcgtaaattgtcagttattgcagaagtaatcagtcaaaaagaaaagaaagtttaaatgtagagacccttgttaggagctgggctttagcctttaaaatcgtgggtggatagggccatctggtgtgcagttgtgtaactagacattgctgttttttttttaacctccttgctartaatcaatgtgattcatttgtctttacaaaaacaaaccattcttttgttttgtttttttttcttcaacttttactttaatttcaggagtatatgtgcaggatgtgcaggttttttacacaggtacatgcgtgccatggtggtttgctacacagatcttcccattacctaggtattaagcccagagtccattagctattcttcctgatgctcttcctcccctcctgcctccctctgacaggccccattgtaggttattctcctccatgtgtccgtgtgttttcatcagtcagctaccagatagagaacatgtctagtctgttttcatgctgctgataaagacctacccgagactgggaagaaaaagaggtttaattggacttacaatttaaaaagagatttaattagacttactccacatggctgaggaggcctcagaatcatggcgggaggtgaaaggcacttcttccatggtggtggcaagagaaaatgaggacgaagcaaaagtggaaacccctgataaacccatcatatctcatgagacttactcacttcacgagaatagcatgggaaagaccagctctcatgattcagttacctcctgctgggtccctctcacaacatgtgggaattttgggagataaaattcaagttgagatttgagtggagacacagccaaaccatatcaatgtggtgtttggttttctgttcatgtgttagtttgcagaggacagtggcttccacctccatacgtgtgcctgctaaggacataatcttgttccttttcatggctacatagtattccatggggtatatgtaccacattttctttatccagtctatcatcgatgggcatttgggttattctatgtctttgttattgtgaatagtgctgcaatgaacatatgcgtccatgtatctttataatagaatgatttctgttactttgggtatataccaagtaatggaattgctgggtcaaatggtatttctgcctctaggtctttgaggaattgccacactgtcttccacaacggttaaactaatttacactctcacaaagggtgtaaaagtgtttctttttctccacaacattgccagcatctgctgttttttgactttttaataattgcccttctgattggcatgagatggtatctcaatgtggttttgatttgcatatctctaatgatcactgatgttgagctttttttcatatgtttcttggctgcatgaatgtcttgagaagtgtctgttcatgtcctttgcccactttttaatgggattgtttaaaacaaactattcttaaggctttcttagggtaacatttggagaacattggctcattcccaaacataagccttctcaaaccgattaaaatctaatcctcaccaagttaagtagggcttgcctgctgatagatcctcatcagagcaaagtcaaagctaaagttcagggggacagaaactgagtaaacagaggaagccagtaaggagagagcagaaaatgtagcccatgggagggaggagacaaacctcaagaggaaaaagttcccaacacttgcatgtcttacttctttaacctcatagaacccaacaaataagttataagaaagggagaagaggccgggagtggtggctcatgcttgtaattccagcactttgggaggccagggcgggtggatcacaaggtcaggagttcaagaccagcctggccaagatgatggggaaaccccgtctctactaaaattacaaaaattagctgagtgtggtgacgctcacctatagtcccagctacttgggaggctgaggcaggagaatcacttgaacccgggaggtggagattgcagtgagccaagattgtgccactgctctccagcctggtgaccgagtgagactctgtctcaaaaaaaaaaaaaaaaaatggagaagaaaatgtgatcatgataaccattcccgccattactggagcctggaccagccggccagatttccacaggatgtctctgacctgcagaggggctggcaaggtgggaggcatccagaccatgttacagaactcagtaatcagagcctgtgctggagccaccagcatcccaggaccaccatgtgaacctcctgacaggagcaggctcctcaatgactgaaatgaatctcagcagaactcctgtgattcataagtgactcatttactaacttattgtcagtatagattctccactgggagaagacgggcaacttctggagacatttttggttgttacaactaggagaggggcatctactactcgcatctagtgggtagaggccagagatgctgctaaacatcctactgtacagccccaccacaaagaatgatctggctccaagtatcggtaatgtcgaggttgagaaaccctggtgtcagcagtgggagaagccttagagggaatttccaaagtggtaggatcagcacaggatagaccctgaagtttaaacttcttccagggggaccgttacccagtttggggaacaccatggtatatcactagctgtgggctgatgccaagttacaggtaacagatgccagcagaagctctgggcagaggaaaccaagataaacctaagcagacagtccttgtgaaactgaacagagtcaaagataatgaatggagaaactgaggctaatcagtttgacctcattccttcctctccccacaatcaggggatcttatgactgaatttcttacaaatagcaaaggaataagtaggcttaggtgagaggggaaaggggctaaattgaggggagcagtggagcaacagattagtggtagcagatttatttttatttatctttttttgttgttgttgttaagacagaatcttactctgtcacccaggctggagtgcagtggtacaatcatggctctctgtacccttgaactcctatgctagagcctaggagtaaatactaggattactagagtaatcctccgacctcagcctcccgaatagctgagactacagacatgcaccaccacactggctaacttttaaattttttgtagagatggggtggtgggggtcggcggggggggggggggggtctcactatattgcccaggctggtcttgaactcctgggctcaagcaattctcctgccttggcctcccatagtgctgggattacagttgtgagccactacgcccaatccaatggtagcagatttaaacacaggtggatttggaaaaaaaatcttacgataggtttaatatgagtcagcaggcctgttgaaacaaaacagtgctttgttaagcttgtttttggttggtcaaatgtagaaaggcaggtgtctccgctaatgagtacgtagagcaggaatcctaagcaatcatccatttcagaacatgaagacaaaaagcagctgcccctcccatacactgcccattaaaatacatacttttaaaattccttattttcaattttatttttttgctctctcagaagaatcaaatatatgtaattattctgatggaggcttgcattctttgggacctaggcctgagaaatcacggtcagtagatttccctataacatggggctggggagcaagtgccaaacagggaatgttctgaaaactccttaggcacaagctgaagatatgtttgaggttttggatacagaacatttataggatatcttttggtggtccaagaggacttgagtgtaccttgtaaatacaggattttgtttttaattagattgattcacagagaaccaaacctaaggaatcacatcattcattcatttgttcatttaataaatttgtaggttgaagcatttaccaagtgctggcaatagaaagaagtcccgggtgtgctttgtcagtttagtcgggactacacaaatgagtcaataactgtagtggagtgatgcgatctcaactgccaggaatcccccggctctcctctcttcctgtgcctcctcaggtaattagctatcctttctttcttttattttccttccttccttccttccttccttccttccttccttccttccttccttccttccttcctccctccctccctccctccctccctttctttccagattctggacctattccagacttactaaaggaaattctctaaaggtgaggcagttttttaaagacagcagctctctctgtcgtccatgctggagtgcagtggcccgatcatagctcactgcagcctcgacttcttgggctcaagtgatcctcccccttcagcctcaatgagtagctgggactaccgatgtgcactaccacgcccggcaaactaaaaaaataattatttttggtaaagacaggggtcttgcgatgttgcccaggctgttctcaaactcctggcctcaagtgatcctcctgcctcagcctcctaatgtgtttggattacaggcatgagccactgagcccggcctagctaccctgtctgagttgtgcccactacacaaaggtgtcagctacatgtgatgtctgtgcatttctggcctggaccgcacattaagtgctccgtaaacatcagtctctattatcaacagtctctattatcaatcagtctctattatcatcagtctctattatcatgagtctctattaaacaacagtctctattatcacagtctctattatgtgttttggctgaaagaaagttctctaaaaccaggaaatcaggaatcagcagttttaagttctccaggttatattttaacattgtgttcatatgcaaaacaaaggttgtgaatcagcacgaatgctggcaagccctggaaggtttgtgatcacggactttcacgagaccccaaggcaaggagagacagaagcccaggacaacagcatgggcgccgctttttagtcgggcgccgctttttggtcaggcgccacctggactacatttcccatatccaattgccgggctcctgcaggattggccagaacaacgcggaagtgattacgggtcgcccagcaacgggcggagtcctggcccgaaactggatgcgcacgccccttccctgcggcggggaggctgacaaggctccgctctatctctagcgcctcggagcgctctccggctttgctgtctagcccggcggcagcgcgatctcttaggcactttcaccgccttcctctccaggccctgcccctttgacgccggccgtcgcgatattgcggagactggatttcagcttcgtggtcggcggagcggcccctggagggcgcagtgcgcaggcgtgagcggtcgggccccgacgcgcgcgggtctcgtttggagcgggagtgagttcctgagcgagtggacccggcagcgggcgataggggggccaggtgcctccacagtyagccatggcagcgctgcgctacgcggggctggacgacacggacagtgaggacgagctgcctccgggctgggaggagagaaccaccaaggacggctgggtttactacgccaagtaagggggccgcagtggggccgcggacgcacctgggaccctgcacagcccacggacgccacctgcgcggggaggacgcgcactccagcgcagcgcgtgcggtgcaaagtgaaagtaactgttaaggagcttcagggaaaagggtccagggttcccagtaggggccgscccccttggtgggcctcgggtccagcgggggtcacctggtggcttcccggcgcgccctctgctgttcaggatgcagcactgcgyggcgcggcgagggcaaagcggcctcatccccgccaaaaaataaagatgttttaaaaagcgcacatgctcagctccctcctgcaggctctgggttgcagggataggagttttgttgtgttttgttttgttttgtccagaccggtattgctcagtcatccaggctggagtgcaggggtgccatcatagcccactgtagcctctacctactgggttcagacaatcctctcatctcagcctcttgagtggctgggactacaagcgtgcactactatgcccgactaattttttaagtatttgtagagactagggtcgcaccatgttgcccaggctggtctcgaactactgggctcaagcaggccacctgcctcagcctccagaattgagattacaggcgtgagccactgcgcctagccaggagtaytttttagtagcagtcctagatagcttcactatcatttcctgggaaagttttggaaaccccagcagagccttcatctttaactgtgtgaccttgggccattgaaataacgtttaatcttggttttttcacctgtaaaatgggttgataygagggtcagttcaggcactgtgcgtaaagcacatagcaccgtgtctagtaggtactctctgttccttaactgtckttccttgattrctcttaagatacgacartgcctcttatatcggcaccttagaatcacctaggaaatgtcctaaatacacgttttgggtctccatagagaacctactgtagccgactctcaactttgggagtctctttttttaagctttccaggtgaggtggaatatcacctggttttgagaaacatggatgtaaatctgattttcagcatctgggaaactttttttgtaagagcctttttctgggccccacttccagagggtttttctttttttkttttcttttgagacggagtcttgctctgtcgcccaggctggagtgcagcggcgcgatctcggctcactgcaacctccgcctcccgggttcacgccattctcctgcctcagcctcccgagtagctgggactacaggcgcccgccaccacgcccggctaagtttttgtgtttttagtagagacggggtttcaccgtgttagccaggatggtctcgatctcctgacctcgtgatcctcccgcctcggcctctcaaagtgctgggatyacaggcgtgagctaccgctcccggcctttttttttttttttttttttttttttttttaaagacagggtctcgctccgtcgcccaaactggagtgccgtggtgcgatctcggctcactgcaacctctgcatgccgagttcaagcgattctcgtgtctcagcctcccgaatagctgggattacaggcgcccgccaccaggcctggctaatttcgcgctgttggcccggctggtctccaactcctggcctcaagtgatccgcccacctcggccccccaaagtgttggcattacagacaggagccactgcgtcagcccagaatttctgatttaattggtttggcccctcccctctcccttggtaggttgtaaaatcttccctcccaggtgattctaatctatgcaaggatgtgaaccactgctgcctttggtggcaaggtagaggaaaaacaaccaagttctgatgagttcattcaagacacacacaggtattatgtgacaggcctttggctggcactggttataccgaggcaaataagagccagttgtcatccttaggacccaatcttattagggcacagtgacatgtgtaggagcgtccccacgcagtgtgtataccaggaagtagtgtgtctggcatgaggtgtgtgtaggtagttgggggggtcgtgagggaatatggtggcaccctcacagtaaccttcacttcctgggctcaagcgatcctcccgcatcagcctgttgagtacccgggaccacaggtgtgtgcctccacacccagctaattattacatgttttgtagaaatggggtctcaccatgttgcccaggctggtttgaactcctgaactcaagccagcctccctcccgaagcactggaatcacaggcctgaggcactgtgccaagcccagagcggtgttttgagctcaagtagaggtgggtggggcaggagggcagtctaggtagagggaacagtgagaggagagaccccctgcatggcctgtccaggggcctgtgatctttgtgagggtccaggaatgtgaaggttaaggcagsgaagggaggacccatttcaaggatttctgtgccttgccgagaagcttgggctctgttggcagagccagagagtggcattcattcagcttgtgaattctggaagaatttctggctctggagaattaaagggacatttccagcagcagagctccagtagcttttgcagggacggaggcaagctcctgagcgggcacttgctgttcctctcacctgtacatctgttggggaaaggctccttctcatccttcagagctgagcttacatgtcactgcccaagagaccttcttaactgtgggtgtcccctcgaccttgtactagtcaccttgyttctctgcttcttcgtgcttagccttggctgtgtactcctccttgttggccctgtctcccttgcccaggttgcagatgtcatggggcagcttgttcatctgagtgtccccagtgcttggcacccagaagccataagatgagcccctgtgggatgagtaaatgaatcaccttgggagggtcagccgcaggcttctgtgggtgggtgggtggtgcactgggccccagagtacaaagatgcacatgacccgcttccggcttcctaagcccacctctgcctctggctctgtggggcgtctcctcctttgccactcagccccagaggtgcttctgcttccctgcaggcttgccctggagcctggcgctagggccctggggctcccttgctcctgcktgccccctgygcctgccttcctgctgcctggcctttctcccatctgctttcttcctgagtggcccctggccaggggactcgggtgcatacatggtttccaaacrcctttcctccagccctcccgactagtgtcttaaatctcaagctggcctctctggctccgctgtttttttttttttttttttttaatttaatttaactttaaattccgggatacatgtgcaggatgtgcaggtttgttacataagtaaacctgtgccatggtgacttgctgcacttgtcaacccatcacctagttgttcagccccccgtgcattagctatttattgtatacaccagctgagatgccagggcttggctggctctcagctggagggctcactctctggaccttgtgtccgtccccgctggccctcagttctctggatcagggttgaaaggctgaaattctttgggtgttagcttaggatgcctctgatccatcctaasccgacattcccttgatctctcctgatctgtgagcatcctggcccttcttttcttttcagttttaatttttgcgctggctccaaccccttttcattcctgactctggaagtgacacttgtttttctcttggggtttgggaaactttgtggttgttctttctaggaggctgctctttgagtcatttcttttccatattgtttctcctactgtagcagggccatggccagggatagaggctgtagctcccactgagacctcggggtctggtggaacccggtcttgtgtgggtgctgtcggcctctcctgctttcccacctgcctcacggttcacttgtgtgcctcaaaggcacacatgtcctagcactccaaagcccaccagggtgggctcccaggggtgaggtcgaggtagaccgggaacccaagagagctggtgggcctttcttctacccctctcccctcacagtctcagagcagccccttcatgggagatgggaagtgagggacaaggtctcagtgtcagagccgtccttgtttgcccttccccgtgcctcttatgaagctcaggccttttggcagtcagaggcctcaatggtgcctgtgtccacagggctggctgtcctcaccgtsaagtctagatctccctgctaacttacactgtgctcaaaacacacacacacacacacacacacacacacacacacacacacactggctgtcctcacygtcaactctagatctccctgctaacttacactgtgctcaaaaaacacacgcacgcacgcacgcatgcacgcacatacacacacacacacacacccataggctggccatggtgggaggccaaggtgggaggatcgcctgagcccaggagctcgaggctgcagtgggctatgattgcatcactgtactctagcctgggccacagaatgagaccttgtctaaaaaaaaattaacagaaaacaccccatacgtggaagtgtggtattcacataatatgatgttcacttaaatttgaatcctttggtttaagtttagattactcttaattatctttttaaatgacaagctcgttgaaagaataaaaaatcaaagacggcttctatttaaaggagaataggagaatgcttaggggacatgtgttctaattttctcttcattaaaaagtcatttaaggttataattaaaaagaacatcttttaattaatttttatatttattaaaaaaaagtcttctattgaaaggtacagttcttagttcttcccgtgttaactcactcggttctctataaccccaagaagtaagtgctgttattgtccccatctaaactgttgaggaaactgaggcatgggattaaatgacttcttcaagggcagagtggctggcaaatgggagacccagaaaaccttggcagttgggcttcagaatcttcacgaccaaattactctctctgcttcagctggttccggattcttccccagggatggttgtgtcctgcaggggacggctggcaatgtctggagatgctttctgttgccacagctatgggactggggtattggcatctgatgggcagaggccagtggtgcccaaggcagccccgcaacaaagaatgatgcaggccgggtgcagtggttcacgcctgtaatcccagcactttgggaggccgaggcaggtggatcagttgaggtcaggagttcgagacctgcctggccaacatggtgaaaccccatctctactaaaaatacaaaaattatcccggcatggtggcaggtgcctgtaatcctagctactcaggctgaggcgggagaattgcttgaacctgggaggcagaggttgcagtgagctgagattgcaccactgtactgcagcctgggtgacagagtgagactctgtctcaaaaaaaaaaaaaagaatgatccagccccaagtgccaccagcagtgagaataagaaaccctgattcaggcatgttctgtgaaagtcaagaacgtaggttgacagagtttgttttgttttttaaatgtctttctgaataaataaaaactgttctgagtgagttttgtagttcctttggaaagtattcattctgtttgtttacatttgtgcgcctgctgtgggccaggcatgaggctacatgtctgagggcccagcttcaccttctaagggctgggaggctctttctatgccagcctgcctgccaacaaggctcagcttccactgttaagggtcattttgtggatttttttattttttatttttaggttgagtcttgctttttcgcccaggctggactgcagtggcgtgattttggctcactgcaacctccacctcccaggttcaggaaattctcatgcctcagccactcaagtagctgggattacaggcatgtgccaccatgtctgtctaatttttgtatttttagtagagatggggttttgccatgttgcctaggctggtctcgatctcctgggctctagcgatcctcccgcctcggcctcccaaagtgctgggattacaggcgtgagccaccgtaccccgccactccatggattcttgagggcagagttttttggagccaggcttcaagcacatttgatgtgtgcctatgagataaagactgcttttaatggcaggcaaggaaaatgcaagtccatctcttaactttcttgaagaagcttgagacacagctctgcaaggggctggaaggtttcatgttattgccaatgcttggtttatctgattgctgttgccattcattttgaaggagaagcaggagttggtataccaatattcccactgtgccagcagagagcgggttatccttactagagagccagagagtcagaacggtttttttttkttttttttttttttttttgagatggagtttcacaattgttgcccaggctggagtgcacgatctcagctcaccgcagcctctgcctgccgggttgaagcaattctcctgcctcagcttcccgagtagctgggattacaggcatgtgccaccacgccaggctaattttgtatttttagtagagacagggtttctccatgttgktcaggctggtcgcgaactcctgacctcaggtaatccgcctgccttgccctcctgaagtactgggattacagacatgagccaccgcgcccggccacagagctgcttttttttgcaagtgatattggatggtggttgatgtacaaagtaggagtttgtccttgctactgataccgtagctggtacaaggttttaatcgttctccaagcactgtcacaggtgtcatgtgtctcgccttttcagcagctctgtgaggtggcagtagccctgaggagactggctggactcagctagcatgggctgctcaggtcttcagcgtgctgagtgaggcattcctgcactatgacagagacccagctgccaagactttgtcaaacagaccagaagccagcagttcatgaaaagaccttgcttgcaagttgtagaattttttagaaaattcgtgctctctgtatttattttctgtaaaataattgatagggaaagaatgttcacatcttatcatctagatgttgctgattaaataatataactttctgggttggcatgagtaggtgaacttttaggaaacgcagcctacccttcgaatacctcttgtagcacctggctgtttcccttttgaaataattgtatgttttcctggataccttattacctggtgacacgtgtttctagttattgacctatgtttttaattataactttgggtggtggtctgaaatgaaatgttaagtttgacgcaaaaatmggactagtttgtgtaactgatttgttcaraataacagcttacatttctcagagctttttgtatgccaagtgctatgcgaaaccctggatgtacaatattcttatagtagcccctgagaccagtgctaggattatttccattttgcagatgaggggatggagattaaggagtggggtcacttgaccaaaggtgcacagcgcacagctagrtgccctatgggaaggtcttactgcatctcttaactacctcttgggaccagttaggaaccagtgcttaatgaaacactttgaagttacatctgtggaaagaataaacattttagctgggcaaggtggcacgggcttctagtcccagccactcaagaggctgaaataggagggttacttgagtccaggagttccagtccagcctgggcaacatagtgagaccctgattctttaaaaagaaacacaaataaataaacattttaagagattatataaattagatattatgaattttgtccctacatcgtggaataaaaccaaaacaaatacacagcaaaatgcctctagatttatttatttatttatttatttttgagacagagtcttgctctgtcgccaggctggagtgcagcggcgtgatctcggctcactgcaacttctgcttccctggctcaagcgattctcctgcctcagcctcccgagtagctgggactacaggcacgtgccactgtccccagctaattttgtatttttggtagagacagggtttcaccatgttggccaggatggtctccatctcctgaccttgtgatctgctcccctagggctcccaaagtgctgggattacaggtgtgagccaccgctcccgacggcctctagatattttgagtgattcagcaaacctcctaaagttgaccccgtagctggggtcacagtcctctttctccttcttcccccyacttccttcttatatctggctatctgggagagaaaaaatttaatacaattgattactttttagaagagttaatttttacttattactgkggattttttkttttttaacagtcacaccgaggagaagactcagtgggaacatccaaaaactggaaaaagaaaacgagtggcaggaggtttgtatgttgttgtctaaggatcttggatggaagcattaagtagatgaggaaatgtcactggcagagaggtgacaggttattgtgtgtttagggagggctctctggtagagaaccagactcccactctgaggagcttatgggatttggcagaagaagatgatgagatcatagggtggagtgaggatgatttcttactggtcttaaagtaccaaaatggccagatgtggtggctcatgcctgtaatcccagcacttcgggaggccgaggcggatggatcacctgaggtcaggagtttgagactagcctggccaacatgttgaaagcgcatctcttctaaaaatacaaaaattagctgggcatggttgcatgcgcctgtaattccagctactttggaggctgaggcacgagaagtgctcaaacccaggagctggaggttgcagtgagccaagatcacaccactgcgctccagcctcggtgacagagtgagatgctgtctgaaaaatagcgacaacaacaacaacaaaaaccagaaaataattgaggcctttgattcacagtttatgatgttttcctatcgttgcagtgtttataaaattgttcttggctatactatggaattaaatatataagtatttggaaatttcgtaaagattaccatgacttctaggtgattctgagataatgtatgatccacggaatagaagtataagaaagggacaggcacggtggcttgtgcttgtgatcccagccctttgggaggcagaggtgggaggatcacttgtgcctgggaattcgaggtgagcctaggcaacatagtgagaccccatctcaaaaaaaaatatgagaaggttcctgcccttaagaggtttaggatccagctgaagaatcaacatgtgcacatgaaaaaaaatggccgtgccctctaatgtcatakgaggtcagcgtatgaatgacgttgggtgcctgccctgcatatacatatgttctttgagctcattcaagggagaattcccatggattggcacaaccagtatggtttatagagcgatcaggaataaaataggttttcttcaaaacaagaggcaaaaatgtggagcccagggtgggatcaggggccttctgcagctgtcgcagttggaacatgtgacgaaagccagttgatgtgacaactgctgggtgggagggacaggcttgggggcggggctgggagggctccttcycttcctgacccagggatggtctttacttctccctggcacctgtagacctgtctttcttgtgtttcagatttgccatacggatgggaacaagaaactgatgagaacggacaagtgttttttgttgagtaagtgtctgcaaagaaaccactctcagctgttttgctttttaataggaatttttaattataaaagtaatacatagtaactgtagaaaaatacaaagtataacagtgtgtatctgtaatcttagcagaagtgactacttttaacatcgctggaacttttaacatcgctagatttattcttctattttccccgcacacgcatccttaaaaaaaaaaagtagggaggccaggcatggtggctcatgcctgtaatcccagcactttgggaggtcgaagtgggtggatcctgaggtcaagagatcgagaccattctggccaayatggtgaaactccgtctctactaaaaatataaaaatgagctgggtgtggtggcacgtgcctgtggtccctgctactcgggagggtaaggcgggagaatcacttgaacccaggaggcggaagttgcagtgagctgagatcgcgccactgcactccagcctgggtgacagaatgagactccttctcaaaaaaaaaaaaaaaaaaaaaagagggaatgcactgtgtggactgtttagtaacctgctttttccatgtaatatattatgagcattttcttgtatccatatctatttttcaaaaagatgctatttagcagctctagagttattattttgtacagatatactataatttatcaaattgcctattggacattaatgctaaattcctgttatagagaacctataattataaataatgtattgagcatccttatctgtaagactttttcacctctctgattctgtctttaggataaattccggtatcacgcagcaatagtaaccacctgtccaacatatagcatgagccaggcctgattctaatcatcttgtatctgtagcattaggtcattggatccccacagtgccctgagaggtagtattgttattatccctagcttactgccagtgacacagacttgagggggtaagtgacttgttaaggatcccacagcaaagaagtagcacagccaggctttgagcccagcacctgctccagggactgtactcttgaccaccgtagttaagaggagaattaatgtttcacaactgtcaacatttaaattagaagcttgaatagtctttgacaggattaggattggttggttaatagaagttgatttgagcaggaattttttttttttttaaagttatgaatgtaacataaacgtttcagtatttgattcaagtacaccaacatttaggggtcgggccagccctcctctgagtgtgagtccacttgcatggatccagtgtggtcttccttcccctaagcatgcctgtaacataacatctacaatttctactttcattttatgtgggcgaaagagtacctaggtgccgaggcaagagactgaaggcacaaactgtttcagtataataaagaaagtagttagaataagaatagtcataatacaggttagatatggagatgatcatggacaattatcaatcattactataaacactattaatcattagcttttaatattactctttgtggcattactaacataacctaggaataactggcatgtataggctcaggtgctaaagggacattgtgagaagtgacctagaaggcaagaggtgagccttctgtcacacccgcataagggctgcttgagggctccttggtcaagcggtaacgccagtgtctgggaagacacccgttacttagcagaccgcgaaagggagtctcctttccttggaggagtcagggaacactctgctccaccagcttcttgtggaaggctgggtattatccaggcctgcccacagtcatccggaggcctaaacccctccctgtggtgctgtgtttcaatggtcatgtacgttgtccgctttcatgctcctcccgtactcctggttcctctttgaagtacgtagtagatagtggtagaagaaatggtgaaagttttaaagtctttgatctttcttttaagggcagaaaagaaaatgctgacgtatgctgccttctctctctgcttcggctacctaaaagggaagggccctctatcctgtaatcacgtgacttgcttcaccttgtcaatcacttagaagattcaccctccttaccctgcccccttgtcttgtatgcgataaatatcagcgtgcccagccgttcggggccactaccggtctccacatcttggtggtagtggcccccaccctgggcccagctgttttctccttatctctttgtcttgtgtctttatttattacaatccctcgtctctgcacacggggagaacacccgctaagcccagtagggctggaccctacaactttaaggttgagcaaacacagtattttcaaagaatctgattgctacatcatttgggagttttatggtatttttctagcattttcactgtagttgattgaaccaaaactttttttttagctgcttgtctttgaggctctccaaagcattcgaccacattttcatagataccactgacactatttttcacctcccatgttatcagtttgtgtaatagtagcttgctggtaatgtagttacagtaacaagttcaaatgacatgtgtgttttttgagcaaacctggtgaacttttggtgcaaaactgatattgagagcaaataggccaaagcttgcttgagagaagtctcccaggccaccataggcagccccaggaagacggggctgtctagcagttggataggtgggagtgcctattatttgttaaaaggctttttgcctaacttgtgaaagttttttttcctcaactaattaagggtatcaacgcattggttgtatgttgaaaatgttgaaaatgttttttttttttttccaagttttctttctttttttttttttatactgggtcttgctcttcttatccagggctgaggtgcagtgacacagtcacagctcgctgcagcctcaacctcctggactcaagtgatcctcctgcctcagccttctgaggagctgggactacaggctcatgctgccatgcccagctaatttttaaagactttttttttgtagagactgaggctcagtatgttgcccaggctggtcttgaacttctggccttcagcgatcctcctgccttgacttcccaaagcattcatattacaggcatgagcgaccacacctgactgaatttcttaaattttttatgtagtcaaatcaattttctcctgtgcagtctttgcctttgcattcacgcttggaaagttactccctgaaatgggtattaatcaaccaagagcagcagttctcaggcatggttcctggaccagcagcattaatatcacctgggaattcaataaaaatgtacattcccaggcccccaccccagacctactgaatcagcactggggtggggcttgcaatctgcgctckaatagtcatccaggggatcctgatgttccctagcttgagagcctcccgtctagagcaggggctgtctcctttgcctgtaaagggctagataatatgttttaggatttgcagggcatatggtttctgttgcaatgattcaactctgcctttgtagtgctaaagcagctatacacaatatacaagtgatgggcgttgttgtgttccaataaaactttatttacagaaacaggcagtgggccagatttggccagctcctggtctaatctagaggagtaagcaagggctttggggggaacctggaaattggctcccctggctagttctcacttttctgagcctgttgcagtggggtgctggtaaatgtttagcaccaggtcttcagggggaaaaaagccactgtttgtttccacagtataaatactttggccatagctgatttcatgctgccaaggtgaagtgaggaattgggaagagatagtcacgtttggctcttgtaagccagtttgagccagtctagcatagaactgctctgttgtgtgtgtataatattggggtcacaaattaaggttgttataaatagaatgaggatgaggatggtaataattagaataaaggttggattattactcttgagtcttggtacttatagggagatgagtatatattttaaactaattttacacacacatacttttaaaatatgaaatttcatctatatttagaggcttcttaatagtttttaagatattctgaggtctttatctcatatcccaagaatacatttaagatataaaaagtaaattctattataaggagtactcttttcatccatatgtgccttttttttttttttttttttaatggttacccagggtcttggtctgtcacccaggctagagtgcagtggcacaatcatggctcactgcagctttgatctcttaggctcacgtgatcatcctcctacctcagcctcccaagtagctgcgactacaggcatgtgctatcacacttgaaattttgtttagtgtttgtagagatgaggtctaactatgttgcccaggctggtcttgaactcctgggctcaagtggtcctcttgccttggcctcccaaattgccgagattacaggcgtgagccactgtgcccagcctccagtatattttaataccatttctacaagatttagatcaattccaaatcaaaatgagtgctcgtaggaggtatgagtgcagagtcttaaaatgaaaatcgttagaattttggtagttggcaggtttcttatttacaactaagactttatcattttgagttttctacttctctacgtctttaggcccttgcacagggctaagagatttaattgaaatctactgaaaagagtggctgacagatcttatagctacatttacatgaattacataaaagcccaaaaccttctcaagaagccttttttgagatctaaggatacatggcaatagttattgtatgttacagcgtatgttataggcagttctgaaggaaaggattcgatgactatctttttttggcacaaatgtgatccttctggaggccagaagatagattcagtgggccccagwtctttcaggtttaakgaataagcattttggtctatgaaaaatggggtttncctaaagtataagattgtcttatatttataaatgcytgtgttcattgctgtgggttcactgctttctcttttgggcagccatataaataaaagaaccacctacttggacccaagactggcgtttactgtggatgataatcygaccaagccaaccacccggcaaagatacgacggcagcaccactgccatggaaattctscagggccgggatttcactggcaaagtggttgtggtcactggagctaattcaggaataggtaggctcttcacttmgttatttatctttgggactgctataatgagatccacttagatctagctataatggaattttgtttagtggttctctgatttaaacatgacttttatcyttttcagmtatcgtttcattaacatcactacctctttttaaatcctaatgttgtcatggaagcctgtgtaggggctgaccttgaagtctctgaaagctgaacactcagcaaaagactgtggctattttggtattcagggatgagagacaacaggctccgtctaagagtttttgacctggtctgcatggtgtatgggcatattccaattacctgggttattcaaaccaaaattgattggtaatagaatacggggaacaacaaggtattatgtctttggaacaaaggatactacaggtttcgactggtcactgagcatatcattttcttttgggcacaggatcttatttctctataaaattggagaatgagttcctgtcttcacctcttaattgccaatgtttacccacagggactatcatgggtagatggctcaagagggtatccttgcttcaatatgatgggccattaaggagacaggagcaaggcgggagcaaaccataactcttcataggattttattctgattttgctttgatctatttacataagtatctgaatcagtgagaaccacctgctttgagtttagatatgcatcttcagatttgtcgacatatgaaacgttgcatttggctgtcttctgtcaagttctctctgtccttttggtcccccgcagccctcacacggcccccttgatgccctcctctactcatttgtttctctttcctaattttgtttttatttttattttttgtgggtatataaaggtgtctatatttatggggttcatgagatgttttgatacagggatgcaatgtgaaatagtcacatcatggagaatggggtatccatcccctcaagaatttatcctttgagtgataaacaattcagttatacccttttagatattttacaatgtrcaattaagttattattaactataatcaacttgttgtgctatcaaatagtaggtcttattctttctttctatcttttttgtacccattaaccatctgcacttctttcttaattttgaacaattccttgaagctgcagaaatattttctagcatgattagggaggcacaggaggtaaaaatacattgttcaagggtcaattattgtgttgtacaaggtgtgaaatctaccaggttgccatccgagtggagaatttttttastgtacttgcctatgaaggtaaagaagcaaatggaaatttttttttaagaattgaaaggattttatttcaaatcaactctcatacctcatcctgggctccaaatatgttcaatccacttgtctgaacttctgcattggagtaaattttatataattgtcattgaagtcaaaactgatggcgtaatatttaaaacaatggctggatccccaatctaagaagaatacattttgttgatcatattaagyactgttacagtgaatgcatggacccatacaattgtggaataattaagaaaaaaggacttaagggcttaaaaatgtctttttaacaatttaacaagttagccagaaactttaaagatcttattctcttaatcttctagctagactctttttctgtaatgagtaagatatgtgactactgattgttttttgtgttaagtgttcgaactgctccatgtgacattagatagcagactcttgaatagagctaatgctctttcaaagatttgcaacagcagacctgcgacattgtaatccaggactgatagagttggttcagaatattaaaagggtgatatctagttagatacataagtcttgatggagaggaggagattctgaagcattgagaataaatttgtggttgctgagaatggccctcacatgttggagtaaagccagaaactctttgtgcctcttcacagctcccacttccccctaagactcttccttcctgatacctataattcattttgtggacactgcaggaggtgtctgcggtccagttggaggttgtggcaaattgtaacgctcaggatggcacagatgtcgcacaaggtcttagggagaccagcctttcctattcaagtgcccacagctctttccccagctgtcaccttccgcaggaatggcctttaacactgtcacctcaccccattcccctccactcttgggaagcatacgtctaggtgagtggtgaagatttttattctgmatttttgaaataatatcgtactgcaagttccaggcaatcaaaaactcacaaatcacttgcactctgcagcagtggtatcaggtctgaagaaaggaagaggctgcagataggcacatggctttgctaagttagcttttatatcctgcgtggctgccttagaaagtgtccttgcccaagtaggctgtggcttctagataaagtccttctactaagctatgaaacatgccaatttataaattgctatcactactttagttccgctcatttaaaatgaaatagctgaatgccgagtgagtgaattgggcatctttacttccaagacttctggggcattcaggagtcatattctatctaagctttaatggtgttggtgttccctttcctttggccactcaagggagcctgttttctttggataaaccgtgaaatctttaaccctgtgaatgtccgttttctctaaggcggggtgggctgaaacataacataacaggatttattttgaaagtggtgactccacaataaaaacatagatatctaatttgccttacaaaggccgatttgcaaatctagtatttccagtggttctttctttctttctttctttcttttttttttttaatgccccatatgacgctgctttgttggaattgccattggtgaggatctcactgataaagaaggggacatccctcccttgatagactttagggttgcactagagccatgccccctttgaagtggcctctaagcaaactctgtcttgtcatcattttcctctctgcagctgtaagtgatacggagctgtattttgagtttttgatactgatattactaaggcaattggagggattcttaattcatctaaaaaaaatcagggattctgacagataaaaggatttggaggaaatgtcagaataaagcattgtgggttcatgaagtcctaggttttataattaaggtttataggcaggtattaccgctgctgactggattcaactgtctggattggagatgaacaaactgccatctctgggctaactctgacccactgcctgattttgtaagtagaattttttttggaacacagccatgcccatttattcccattcctataatgttgaactactgtttgtgtatattcagttatcccaaaataatatggccctttgcttgttaccagaagagtcgcccagttgtggcagagatcatctagctcgcaaaactgtaaatatttactctttggcctttcccagaaaaaagtgcsgactgctatgttagatactccagttcattsaaagtgatatcaccctaacattctctaaattagccacagcttagatgaaatttaggcaaatggaaygccccaggccccaggaagactgtggcagcacattgtatgtaactgttggggatgttgcctgaaacccccsccytttttttaggcagctgcaaggattagaatgttgcctcctcagaaactaacactcttctctccttgacctttgtttaaccagctttctgaacctgaagaactttgtagattgaaagctgtagcttgtggacctctctctgtggagatcagcatctcagtatccagggggaagccatctcttcacccaaagcttccgctaggagatcaagaggcccggaaccccgcagtcctgaatgctaaccagtagagacaagggaggaattcatttctgtttgtgttcaacatagactgagcaggaaggrccaggtgttttacgactctttggagttagcagcttgttggctctgatttggtaaaagcaacggaaatgccttcagcacggtgaacrttacatgcaaatgttgggaagtgttaggaaagggaatttttttaggcgagggaatttcgcattgaggaaggtccctgcttcgtttttagacacagcctatcagtcagctaatttggctatgcatataaatactttagtataaaatgctgccccctgctacctgcaggctgacatgttgctcatcaaaggcaggatccttctaatgagggattagttggatgcctaaatgtgggaccacctactctgttcattgtcttaattagctagatgtttgttggagcgcatgcaaattattttctgtaagcagacagatttattatcatatttacggagtgacatccagggtttgtgagacatccattaaatttttttttttttttaatgtttgagatggggtctcactgtgttgctcaggtgttggtctcaaactcctgggttcaagtgatcctcccaccttagcctcccaaagtactgagattactggtgtgagccactgtgcccagatgctattagcaagtatgaacaaattagatattttcagtctactcttctgtggtaatgatgataaaacttcttaactttcagtcctaaaccagcagtggctaaaacttgatttttaaaatttttttcagagtttggtccagatgaagtttctttcaccttgcgaacctttagaacgctgggctgcatcatgtgtgttgtaactttaaagttagaatagcctagcttcgttacagtttttgagccaaaggacccattaacagaaacaaaactttttttcctgcaaacaaatacaagctggccacactggtaaataccagtgaaatatattttgggactgacacttgcattttctattggtacttatgtcacaaaatcacctctctaacgtgtattacatggacctatatatatgcatacttacatatcaaaatgtatatattttgaggtataaaaagtacgtgctcaaggtattggtcactcctcaatttgttttccttgaaacaaaatgaaggtataaatatttcagccgggcrcggtggctcacgcctgtaatcccagcactttgagaggccgaggcgggtggatcatgaggtcaggagatcgagaccatcctggctaacaaggtgaaaccccgtctctactaaaaatacaaaaaattagccaggcgcagtggcgggcgcctgtagtcccagctactcgggargctgaggcaggagaatggcgtgaacccgggaagtggagcttgcagtgagctgagattgcgccactgcagtccgcagtccggcctgggcgacagagcgagactccgtctcaaaaaaaaaaaaaaaaaatttcatgcagggaatcccaaaatgtaattatagtgtgatgttgaaattgattgtcttagcttagagagcctactttttaaaacttagggtcttgtttctaaatcatgtgttgaaattacagtgtgaactgtagttgccatactctttgatcctacaaattgtcaccacgatgaattcatatcttgtgcaaattttaccagttctacgtgaatagaagaaaattactttttcttcatgtagagaagggtattcattcctaagattttaaatccacacttcccaattatggactacgccagcttcctttacacctttgcttctttgttttcttttccatacctaaatgttactaaattttgcctttgagcctaaagcatgtcattgatggtttttttttttctagttattccaaaaggtcccataaatctggggccatagctaacttacatttagtcattttcatgggtaaaacacactcatatgagatcattgcacttgggatcttgaaatgcctgattagtttcctttctgattgttgaccagacttaaactagtgggatcttggcatttatctttttaaaaacctggtgctcattaaggaaaggaaaatattctgaaataatcgaaataaccttttgggcattggaactccattttaaattaaaaacatttgtgcctactattatcttatgctaaattatacccaggtattgtaagtaaaattattttgaagttactttgttctaagaaactatggagattcttgacagtgttagacaaagtccttaaatgacattatataaaaattgagaattagtaccttatgacttaaccattttacactgagatattattggacattgagtgtacatggaaatcacgtgatcaaagtatttgagaagtaaatatctaaaggaagagaccaatttaaaacattctaatgagcatcatctcataatttggtaatctcatgtaaaatgcttataataggggtgtgtgtatgttatatatattttwaaaataaatttgtaatcatgtatacagtagtccccccttatccgtggtgtttcagtttttttttttttgagtcagagtattactctgttgcccaggctggagtacagtggcgtgatctcagctcactgcaacctttgtctcccagggcctggtgattctcatgtctcagcctcctgagtagctgggattacaggtgcacaccaccactccctactaattttatgtttttagtagagacaaggttttgccatgttgtccatacaggtcttgaactcctgacattaggcaatctgcttgcctcaacctccccaaatgctgggattacaggtgtgaaccgctgtgcctggcccgtgtttcactttttgaggtttcagttacctgaggtcaacaggcatctgaaaatactaattttgagagagagagagtgtgagagaccacatttacataacttttatacagtacattgttatagttctattttattattattgttgatctcttactgtgcctaatttataaattaaaatttatcctaggtatgtatgtataggtgaaagcatagaatacatagggtttggtmctatccagttttcaggcatcactgtgggtcttggaacgcatctcccgaggataagggggggctactgtcagtgtgaacctgattagatctcaactgaaacttttttgtcacatgaggccatcagttgaatttcatgcctgcatgtaggtttagattttaattacttttttatggtgtcagcataacaaatgagagtcatacaaactattgtttaatgacaaagtgggtcaaacccataattaaaaaaattaataatagatttttgttctacttgaggttttgtagcattacgtaaagcttgaaaacttggaaattgttttacttaaaacccaattaaaataatttgatcttttgcttttacatcatagagtggcacaataaaaattgtaatggaagatgttattttacattttttttctttttttttttttgagacggtgccttgctctgtcacccaggctgtagtgcagtggcgtgatctcagctcactgcaacctccgcctcccgggttgaagtgattctcctgcctcagcctcctgaatagctgggattacaggcgtgagccactatgtccggctaatttttgtatttttcgtagagacagggattcaccatgttggccaagctggtcttgaactcctgaactcaagtgatccgcccaccttggcctcccaaagtgctaggattacagacactagccaccatgcccgggggtgttgtacatatttcctttaatctaaaagcagaaccatctttatatatttttatttttttccactagagggctctgttgccctttgatataattaaacaaaagaggcagcattgcaatatagttctgttcctctcagtccatcttgctttcattttggttaaataatgtcttttacttttctaacatatcttttaggtcttctaattctctgtgatgaagttcaaactgaagactgttactagtgtcgtgtttgtttctttttctctctcttttgttttgtttgtataaaatgccrgggatgaagggatccacttaataaaaaggcccattgtgttcagggagcagcctgttctgccaaatcacacaagggcatgtgttttcatgacattattgcttttgagtgtgctggcctagcaataatatgatttttttttcctaagtggaaattgtaatatttaagtattaatacctctgtttaaggttcattttgaacgccttggtgaccctatgtttttttctttgttttttgttttgttttttttttttttkttttttttttttktttttttgagatgaagtcttcctctgttgcccaggctggagtgcagtggcgcattcttggctcactgcaaccttcgcctcccaggttgaagcaattcttctgcctcagcctctcgagtagctgggagtccaggcacctgccaacacgtctggctaatttttgtatttttagtagagatggggtttcaccatcttggccaggctggtcttgaactcctgacctcatgatccacccgtttcggcctcccaaaatgctgcgattacaggcgtgagctactgcacccgcaaccctatgtttttttctaagaatatagtgtcccttgccccctgctacaagccttacccagtgttacataatttattgtaattaaattgtttattaatgatacattcttgctgtagaagaaaacgtgtccttttgggctcagtacagtatatgtttcttaagtaagagggatcatattaaaccagctacttaatgtgaagcagatagccagtgttctccatgtacaatcttagggagggtaatttttgttttggctgtgtaattatggtttgaggcagcccattaatcgcatatttcagctgtcaaatagaaatttggcccagaaaggaatacactttggctttacaaaactgcttattttcaaatttttaaatggggacaaaaacgaatatgctatattatatacttttatttatataatttttttttcagcaactttttctcttttgaaaatgcaagagcctgaaaaacattgtgaatatacttgtaacattgcaaagctatttcaccagagtaaagatattttggttgttcatatacgagtgtgttcgttgtttatctaataaattgttaaaactagatggcgattctgggaattattatagacttcataataaataagatgctgacagttgaaacccccttgaccgttgcctgtttggtatgacacagaccttcttggacttttgtagcctatacatgagyagatatgaatcctcagccttctccaaaataaggttggggtcactaggaggccttcttggaaagatgtcttaaattaaggcaccagtagatggatcaaaaagcaggttccaatagctcgcttttagtttcttgcctaaatttgtgatctccctttggcttcataaataacggtacatttcatgaagagctggtctcagtctacacaagcctaactgaatggggtrcataggaagggttgcattgtgtgacaaggtttaaatctaattgttttaagtctttgagttatttgctcaccaggctgtgcttgatggttttactttttgtgatttttggagccttcatgttagaagccatagtcatatggtgctctctgaaagcaagacaaggtttcttcactasactctaagaggagatctgagacagagagatgggggcggggaggaaacctatttcagtgtctctactatttctacctaggtggaggataactagccagatgaacggagctaagccttttgtatgaagtttatttcwtataaagaggaacaaaatcagaatcaaatttcttctgtagttgcacagaaactgaagttaaagctaatacaatgtttttcatttttacccttacctctacaatgtacttaattgttacagattcgtatttattgattatcatrttgtattacattgatagccgtttaaaatttatgaagattccgtacttgtcatatttaattctcagcaccgtgcttacagctgtcttgtgataatgtcgaaaggaaagagaagggaggtgaggtaacgtgcttgagatcatacaggtcttgggcggcgggtgcctgcaggatagatcaaagggtaattgagtctgtgcctggggccccttccactgtacatgccaccatcctgttgggaggaataacagcacactcctgaatgagctctttctaagcagctcattcattttgttaatcctgagtttggaatcaaccaatttatttaaacccgtgaagcctcgctctgtgcccggtcaagtgctgggagtggcatctgyggggagggccaaggcagatgtcatttccagactgcattggatcctggattcagaagctgaagcttaggagtgggcatggtggttcacgcctgtaaacccagccctttgggaggctgaggcaggaggattgcttgagctcaggggttcgagagcagcctgggcaacatagcaagaccccatctctaccaaatcaaattttttttaaaagctgaagctttctttaccaaaaccactttggtattatgattgtaaaacaaacattaaggaataagtctgggggaatgggaagtagcattcatcaagcgcctgtatatgccaggtgttaggctagattagcttgatgtgccttctcatttaatataagtaattattttaaaggttattgtgattaacatgtattccttatggaaaatttagaaagcgaagaaaaataaaaayaagaataaaagatttaaaaaaaccccaattcttaccagttagaagtatactattaatatttagcatgtatgattgtaagcatgttttcccttctttcgtgatttttctatttaaattgtgattatctttctgtgttgttaaatactccacatcttaaatggctgcatagtattccattatgtggttccagctcttctcccagtgtggtacattcgggtggtttccagctttttaatagctgtggaatggagaagcacattttgtaattaaatgtttgtacccatccgtgactcttctatagttttattttgtggaagtggaattgctgaatgaagtgatttgctccccaaccttaatatcttgatttgttttgtcaaactgccctggaagattgtaccaatttgaatgctcctttgcccagcatccttgccaaacttgagaattagaatttttaaaaaatatcacttaaatttgcctatctctgatgattagcaagattgataggcttttcttatgtcgggccatttgttttttaacgaattgccctttcatcttatatgcatgactrttggatatgtatcgattactaattgattgcttgcctcatgtgctatmatttaattttcaaaatgtcccttagaagttaatttataaagtgtctattactttaagtacctgttcaatcctgtgatcaagaggaaattcacagagaaagaaattggcctaactcctcagtttgcttcactaaaatcttttaagcacacatcttgtctattatgccagctgcaactcaaatcaaaggcactgttgctttggtacccgcatttaaggagggaataccccaaaaaacttaaacttgtctggctttgcaatggtggtggagtcccaagatgacacagtaggcaagatttgattactttggttatgcaaatttcccctagatcttctattaatgacagtaacagcgcttcagagcttttctatgcattctctcatttgatgagcctgctttcaggtggagaaattgtaccattgctgaaaatagcttcgctgacagttagggcaagcttcattggtagcaagtttctatctggaaagatgtaggasaggaacactgactctggaagcagacgtgacctagttttgaaacctgggataaccacttcctatctgtatgacccgagcaagttactttccttctcagaactcctgttccacctctgtgcaatatggacagtactcctactttgcaaagttgttaaagatgggaactccagagtgcccagggaattgtctactcatcattgcaggcgtttaataacgtgtagccatttctggaatgggaggcaagaggatcgagttaccagtgaaattagtttggtattttcctagcttcctggttcccagatcctcaagaggctgccataatctctgtgaatttgtcctaaaatgacctgtataaataactgctttagacactggcttgtctttggtatgaaggaaaacattttagaatttttttggctggaggtcagtagctttcatccagaaaagaataatcaacggaaaaaaaaaaaaaccaccgagacgaggttatttttgttacagtcaaggaacaaaaagggatatattaaacttgggggaaaaagagaaggaaaactattattctttaaaaccgttataccatgcatcatggtaacatcttttttactgagagttctgcattagcacacttgttcacccaagtttgtgatagtttataggactgcctggtgtattaagtagaaatgctcaactttgctgtcctatttttttgatcatatccaaaaagtgtcagtgtttgaatatagttttattgccacttaaaaaggtaggacagttttattggcgtctactggacatggtaggaagagagctgtaatttgacacagattgtccttaacttgggtgacttaaggcaagtcacttaaccatctgagccttaatttcctcgtttgtaaattcaagagaataataacttctctgtcacatactgttttgtacagatcaagtaaaacaatgtgtgaaatgctgtaatgaagaagtccaatagtgtatgaatataaggttgctggcgtttggggaaaaatcatagttatagaagaaagactcctaaagggaagattagggttggaagaagatggaggaagagagtaatttaattccttaatggaaagaataaaataagagctcttgacttttttttkttgttgttgttaggatatggggagaggtttctgcaaatatcttcttcagggtttacgaagtgaaccggatgtccggtaacagggttgcatgtcatgcaattgactgggtggtgatgactaaaattttaatgatgcgatctcatttaaagttgacaggctctgactctagccagatattcaggagcagaaacttgattcaataagaagggaacctgcagaggcagaaacttctgtgggttgcagttgtgttgagattacacaggtggaaatgttgcgagttcttgggtgatgcgatttcttcctgcttgccttaagtttcacctgcccaggtccttacttctgctcacagtgcagcacgaatttagatactgattggggattcagacacaaacgggatgctccttgcttatataacatcaacagaattgctggccacatcttgattatagaaactctttttcctggtgatcacacaaagcaaaagaatgaaaataatcaatctctttcaaatggagagactccgctgtgtcagccaccattggctataaggatgaactctcaaaactttttgtatcttgcaatataatgtcttccaactgcctttgattttactgtgtggctgtgtgatacagcaaggcagctgtggcttctaaattcagcagctaggtttgagaagcttctatcagctgagagatcatcagtacattccaaatggcattaaaaatgctgttacagctttatctattagcaaaggaagtttcaattctaagttcacgtacagttactagattgagtgtttgacaaggtagagagctctgtagtagatccatatggggaacatctcagtcagggtgtggagtcagatttttggcaagggataccatcctttcagcctgaaaagctgacttgggagctgtcagcctgtgtgcacgaggacctttttcctcccagggttagcgtcgccacttgcccagtgtttcttttttatttcctgctggcctgatccgggagggatttgggaaagctagtcttgttggtgtgtcatcatcgcgacgctgttagtgattgacttacccgagtgtacacatgtttgcatctcacttgtatgttccttacatgtttacttaattattgggaaggtgtattaatgtcctgttgctrctataatggaccaccacaaactcggtgcttctatgctgcaaacctaagattataggcagtcataacacagtgttaagtatttgtgtatctaaacatagaaatggttcagtaaaaatacagtgttgtaatcttatgggactgccgttgtgtgtgcagtccattgtcatgtgatagtgattaagggaggtggacatttttgtgtttgcttatttccataagctcaagggtaaagcttcccaatcagcctttaggacagaggtaagaactggttggtggcctggagcctggatctggcctccagatgttttttgtatggaccacacaaaaatggtctatagtgggattttttttctttttttttttgtcagactacttgccagcatactaaaatcaggatattttacttaaatgtagatttatgacagttttgaaaaatcagaatgagtattgkagactaaatgtttatgtcttccccaaaaattcctatgttgaaaccctaatcttaaggtcatggtatttggacatggttgtgtccccactgaaatctcatcttgaactatagttcccatgatccccatgtcttgtgggagggacccggtgggagataattgaatcatgcygttctcacgataatgagtgagttctcatgagatctgatggttttataaggggctttcttcccttttgcttggcacttctcttactgctgtcatgtgaagaaggacgtgtttgcttcctctcctgccatgattgtaagtttcctgaggtctccccagccacgtggaactgtgagtcaattaaacctctttcctttatamatttcccagtcttcgatatgtccttatagcagcatgaaaacagactaatacaggggcctctgggaggtgattagatcatgagggtggagccctcataagtaagatttgtgccctgatgagaagaggatagaaaggtagctaactttccttaagctatgtgaakgtgagaacacagtgggaaggcagccatctgtaactagtaggagggccctccccaagaacgtgaccatgctgccaccttgaccttggactttaagcctccagaactgtgttaaagaaatgtctgctatttaagccactcggtccatgatattttgttgctgcagcttcagctgactatggcttatgtctatcaaggaacatagttgcactgaggttgaacagagctgttcctataggctgaccccctgtaggcaggcacaggctattttccatggtcagtttacctgcctgcttcctgtagaggcttgagcttggtttagagtctgcaatgaaaactgtgtgatgatattggactcactggctcatagccactgccacgcccttattcagtcttttgtgcaattaacaaacatttattgactactgagtaccaggtgctaagacttcagtgtagaaacaggcagggtccctgcccttgtggaggatacaaaacacaccaaaatgcagtcagcttcactgaatgacagagatatgatctgagaagtgtgtcaggcagtgtcatcgttgtgcgaccctcataggatgtacttacaaatcctacgtggtataacccattatacacagaggctgtatgggatagcctgttgcttccaggctgcaaacttgtatagcatggtacygaactgaatactataggcagtcataacacaatggtaagtatttgtgtatctaaacacagaagtggtacagtaaaaatacagtgttgtaatcttatgggaccgccgttgtatctgcactccattgttgaccaatgtgttgttatgcagtgtgtgactgtaccagcagcttgatctttgtgcttctagagaacatttaaattgattcgcttttgtgagacagggtcttgctctgtyacccaggcttcagtgcatcagcgtgatcatagctcactgtagcctctccctcctgggccaagtgatcctctcacctcagcctcctgagtagcttggactacaggcatgcaccaccattcctggctaatttcttttgtatttttaatagagatgaggtcttgctatgttgcccatgctggtcttgaactcgtgggctcaagcagtccacttgcctcagcctmccaaagtactgggattacaggtgtgagccaccacatctggcgaaactctgggtagtttctaattatttctgtatttctatttgtatttaaaagtacaggatactaaaatgttttttttttcttttttgagatggagtctcactctgtcgcccaggatggagtgcaatggcccgatcttggctcactgcaacctccacgtcccaggttcaagcgattctcctgcctcagcctcctgagtagctgggattacaggtgtgtgtgccaccacgcccagctattttttttgtatttttagtagagatggggtttcaccatgttggccaggacggtgttgaactcctgacctcgtgatcctcctacgtcggcctcccaaagtgctgggattacaggcgtgagccaccgcgcctggcaaggattttttttttttcatacttgaggaaacatctaacagcaaatatgttcttataagttaaaaagaacttttgctattttgaatgacactctcattaagtcttactactagtctctgatttttcttttttctttttctttttctttttttttttttttgagacagagtctcactctgtcgcccaggctggagtgcagtggtgctatcttggctcactgcaagctccacctcccgggttcacgccattctcctgcctcagcctcccgagtagctgggactacaggtgcccgccaccacgcccggctaatttttttgtattttttagtagagacggggtttcaccgtgttagcaaggatggtcttgatctcctgacctcgtgatctgcccacctcagcctcccaaagtgctgggattacaggcgtgagccaccacgcccggccttgatttttcttaacctttatttccaattatgcatcttctgagtaactataaagaaaagcaaaatctacrgtaggtatggagtgagtgcagagtcaccatcagcttgaacaaatgtgtgtatctgtggtcaagtttaattgcttcttctgtaatttatattaatcacgcttccattgcttgccttttgttaatacgtatgcggccatgtgatgattttttaaaaggtcatccagtatcttgatgtccagtccatgcttataacctgagcagtttatgtactcttgagatggtatgtgctaaaaatgagtagctagtctgagtggcagccttacccattttattttgtgggcagatttcttttacagttctggctgggtttcttttagttggcttctttgctttgctcctrttacgacttagccctgtagctctgrgctcttcgattctcacgtgctgatggtgtagctgagctctgctaatgctggttattaatctgacaatctataccagggaggttttataattgccataattcttatttgctccattccatttcccagcttctcaaatggggtggcagctgcaaagcacagtatttgaacatgaagtagagaatcgtcacttcagcttatgattttacattctgtcaaggctgcagggaaagcggtcatgtttctggatggtatttggatctacaaattccaagcaaactttttacttcttattatgtaaaatggaagggttagccaaattaagatctcaccatcaaccttgagggagtgacttctacatgccrtgtattactggttataaagctagtcttgtttggattgaagaatttaatcatatttaacttttcaaaggatgctttttaaaaaaccttatccgcgtgttatgtttaaactgagaagtacctgaaagtgaaaattttatttatttttactttttttgaaagatggagtcttgcactgtcacccaggcttgagtgcagtggctcaatctcggctcagtgcaaggtccacctcctgggtaaaggagattctcctgcttcagcttcccaactagctgggacaacaggtgtgtgccaccacgtccagctaatttttgtatttttawtagagacggggtttcaccatgttggccaggctggtcttgaactcctaacctcaagtgatctgcccgccttggcctcccaaagtgctgggattacaggctcacgccaccatgcctagctgatttttgtatttttagtagagatggggtttcaccatgttggccaggctggtctggaactcctgacctcaggtgatccacccgcctcggcctcccaaagtagtggaatcacagacatgagccaccatgcctggcctgaaataatttcaaattaacccctgaggaacaaatgctcatgactttcaatgaatagaaaaatcaractgctagaacctccagactgcatgtcatgcrtagaagtagaatcctggggaagctagctcacaaaagcaagggagatacctgcaaggctgagctgagcttgcaagggaagaaaaatattagagagttgtcacatttagaaataagtgattccaaatttacagtcaatggactgtagatgccttccatcttcttaagagattttgtgcctcttgcacaggtattatccctaagatgtgttttcttcaatgtacctagactgtttccttaaagaattgcttttgtatggtacggctctatgtgtctgtgtttctcatgttggttaggagaactaacccttgtgacgaataagaaatggcaaacattgttaatgttgactttactagttgctcaaatattagcattggattttagagtcaacatgctagcaggatggctttattttaaaaccatgtgatagaaagctatctgctattattgatagcatttctggatggctgtcagaagtctttctttagaaatttaaccatatttttaatggtgggcattgcagtcaacaatagtacagactttgcaaagactattttttttttggggtgcagtgaatacttcgcaatgcctgctgaattttacctattctgtaagtctttttgggaaccgttgagcccctcttctcttagttgcctttagcctttgtttttattatgacaattggtatgaaatttttccttttcattacttcttttattcagagcacacctctgkcttatctcttcattctctgtttagtttcatattttactttaatttctgtacatcaatatctgccattatagtatttaagctcttggaaacatcaggcatttgttaacttgttgagaaaataaagcactccactgttgttatgagctgcttatggcaagtgaaaaactcacaatatttggccaaacttgggatcatttaggtgttgtttgcaattaatggcaggagatattttccttgttgttaagagtataacgttggttttagaaagcttgatctatgtttttctccatgttagatgtgaaaagaaccaggagagtgtgaggatattggtaatattgtcatatggtgatcccactgtggatagatacgcaagagagaaaatccagaagaaagcatttcactgaagcctggggacatttctggtgacaaatggtgctgatggcacagtgagaacgggagagggcagaagcaatgcacagatagaaagggtgtcacctgcgcattgaaaaatcccagtgccataacaatgcagtccctgcaatacagacaaacctgactcccaccattcctgtaaatgaagatggggccttgctgagaaatagaggatgcagattccaccctcaggcttcccgtcttgggatgcagagaaaactcacccacgtgcaacaactcaagagtcgttatttacctagcaaagtgttcacatgacagtgtttgaaatgtaccacgtgccttttcatgtttagtttagagcttgacactagagctctactgtggtttaccaagtgtgagggactatttctttctgagaaggaggggaagctttagtttccttgaatgtctaatagagtctgagtttccttttagaagcataaaagacgtacagtaggcagaatctggatttttaactatacagttgctgaagttatcttcaattcaaatcttctaaattcaattttgttaatgttgtttagatattattatagaagccagctttactgacttctgcacatttaatcataggagattcttccattctgtgaacttagatttcttttttctatccatgacatttatctaaatcaggctttcttttctttctactaaatttttcaattaccaataggctatgagaataattagactgacagtattactgaaaaaaaaacaaaacaacaacaacaaacaacaaaaaaaacaccttccactaaaactgactcaaaaagataatagcagggaaaatgacatgtcgrtctgtgattccttttttacttgtcagtccttttgggagttgaacatataagcacatgtacctctatgtgacttttgagacgtctagaatagagaattcacctttgtagctggaatttattcagcatgcaaatgtgggtgggtgattgttttatagatgcctggtgttgaatgatgggcagttgtgataactatatataaaattatattaaagtccaagaggtgcttttatgaggcaggctggaaatggcatccgattttcttatggctttttcatgtccattttgatgaatctatttattacttctataatgagtagtacacatggttggttagccaagttattgaactttatcaaccttggctgaaattcacaatgcgtgccaaacttgttgtaacatgtaagaaattacatctgggctaaaaggttcaataatgattactcttataatggaatcttctacaaagcaagggatttcatgatatscctatgcttttaaaaaattattgtgatacagtgaaacaaggaagaacgtgtagctggaaaaatagtatttgcttgtaatatacattcagattcataayaggcttatttgattcccaggacagggtgagcaaaggatgctgtttcctgggtgtctgctttggtgttcattgagtcatgtctctctctttagaccttactggatctagtcttcatcatggggcctgtgagctctttcaaatctagaggacaaaacctaataaagtgctgtcatatcacatctgtttatgagtttcaaactgaaatgaaatgtgtagccgtgttattcttaaattacagagacttgaggaacgtagagctttttactctcactagagaaatctaagcacaggttggttcgttaacctgtaaagagatgtttgggttttaagaggtctatcaaataacacagtttccctttcccaagttactacctaactgagcagtaagaccacccattaggcaaatggaagaccaaaacatcacctgagtcattcatgaagctgatactggagaatatgtatagctgtgtgagctggtgggctttctaatcctgaccaccacaattagacagggtaatgggtcagtgctaggtcaggccagaccttcgcagagggcagaccccattcatgcagcatgttcaagacagtgcaggagagcagggtgtgtgctctctgtaagaggagaggagaggcagagctgcgtgtgcccggttctcaatcctggaattaccattcacataccattcacaacataagttggatcagctcccttgagcaggaataagtgagtggcagagggggtcagggatgttaacgcaaatggagatcccttcacccagaaagacacatctgaaatggagaagatgcytttttcctcctgcaaccaataagagagtgatgaaaattatgacgccttgggaaataagactgcaacgtaaatgtgtgtccaccccctagttttcttttggattgtgaatcctcaccctccgataactagacgtgctgttttgacgtctatgctttccagcttgccaattctggggcctggcacagtatctttcaccccggagtctcagtttcctcatctgtaaaatgggaaccatgacgtcrgcatcacagagttgtgagaattcgacaaggtggaatgaaagcaactagtgtggtgtctgaccgcttgygttagtccatgaggaatttccttacgtattgttttgtgtctaggaccaagttcttattttcttcttatggatgacttcatatatatgccgccacagagggaattaccgtttttctttgtaggtaaaaaggagctgggttaagatgcaccgtcatatgaaacagggaaaaagggtttgcttgggttttagattcctgaaacagtctgctgagggattctaaagttgttgtggtctctgttccactttgggagtttgataaaaattggcctgttttatttgacagctcttaggtagtgtgcaaaattgtcaacagataataaaagttttttgcaaagctatggctctatgtgctgtacttgagcagtatccatactcttaatagaattgatatatgaaagcaggtctttttccttatccgtttagacctaaatcttatccatagtgtgtggatatcacaaacagcacaagaggaagtgaaaggaacagagtgggtgagcaaaccattgttcaaaggaaacagaacctcgctcaaggaaaatgagaattcttctgatcagcttctataatggatgcaatgaggaaagttgtctagcagactgttcttggccaactgtctaaatggctcgctgcatcctcttcacgagagctgatggtaggactgtagaagagtcacaaaacatcacatgacaacgccagtccctctgataatcctgcaagagccagcccagttttgctgacagcacagtctgctgtttaattattgtgtgttcaatgacttacctctttttagtttaattraaattatttctcagattaagagccatgctatgatgcttgccaacggatatttaaaacatgtaactgatttgttttttrtaatgcttcaggagaactcagttgagcagtaaagatgtgctcgtgatgtggttagctcagaataaggatgtgaaaaccaaaagggaaaggaggacaggagtgaatctggcacttatctttcagtggggcctgagtgcaaattcttcctaccttccatatgagagaatagggaaaattaaagaataaatgtctctgggtttaatgcaactttactaaggaatgaaagtccgataagaatccrtatcttttgaaagaagattttttaaattccttatttttccttyctgcatggtcataaaacacactggggacagcccaccctgagaagtcaccaggcatctgcctgccttcagtagcaatcacccaactgctgtagaccgtaatcaagctttcaagaaccacgtgcagcacgctgcgggagagtcccagcgaagtgcttaatgcgccactccacggatgtgagtggggagcaagtgctcaaaatggggcttctgaattgcaatcatcatttggcatctctattacctacagctgctcaaagatgttccccccatgcaactgtttcttgcaactcctaacatttgcaacgaggcctctgatgcagacaacccgtttatacctctgggtggttgaaaccttcatggtttgttgtaaagaaaggtacacagtcccaccaatcagaccgtatctagaatattacgttcatttaggggtggcgcatagacaggctaaaggatggcaaagtcattgggtcatgtcctaggagcaacccttaaaggaagagtgaatggctggttagttggtagaagaaaagatttatgtaaattagttctctcagtagctatctaggagagagataatcctagctttcttcaagggacagaaccaggaccaatggacaraatctgcaaggaggcagcatttaactgattagaattgtcgggggtggggttggcgagagggtgttgcttttctaatgattcacattgtataaaaagcagacagtaggtctggcactgttggctcatgcctgtaatcccagyacttygggaggccaaggcaggtgaatcatgaggtcaagggttcaagaccagcctggccaacatggtgaaaccccttctctactaaaaatacaaaaaattagttgggcgtactggcaggcgcctataatcccagctactcgggaggctgaggcaggagaattgcttgaacccaggaggcggaggttgcagcgagctgagattgcgccactgcactccagcccaggcgatagagtgagactctgtctctaaatacataaataaataaaagtagagagtaagttttctgtattgaaaatgttttaagagttctttgtcttaccttaggttcctccaaaaacagaaccagagaaaaagacatatttatgcataatttgggatgtgattacaaagagagggatggggaattcaggaaggaaggagaggcaatataaaaatgtgttttttagttagtcattactagaggcaactagtgctcaactccaggcactttaggaaatgcatctcatagctgtctgcctgcggaataaagggcatttatccaccggcttctgaccccgttggacaagggcgtcccataagttttgatgtcccagaattttgggtttgcacatgtgcaagtgccaagcaggttcttgtaggcatcccatgctgcagagtcagagaatctctaggatggaaatggggggatccatattgtagccccaggtgaggccatctggttgcatttgtgtcaagttggttgaaaactgcatggtgrgcgtaaaaatggtttgagtaaaatggagctgtgagaatttgaaggggtgcatgagaggtgcccgatacagtccaccccctgcaccatgctcaggtctcttaagagtaagcagaatctaccacagtgtatccttaaagttaaaaggctctctgatgggactataaatgagtcccagtttgatgaattctggggctttagccttttctgctgtggtattagttttctggggctgctgtagcaaagtaccataaactgggtggcttgggacaacagaaatttattgtttccaagttctagaggctagaagtctgaaatcaaggtgttggtagggccatactccctttaaaatgtgtagggaaggacccttccttgcctctttcagcttctggtrgccctagatgttcattggcctgtggcagggtaattccagtctctgcctccatctgcacaagccattctccctgtatcttttcacatcatcttccctctattactgtttgtctctgttttctgatctcctcttcttctaagggtgacagttttactgggtgagagcccaccttaatgccctcagtttaactcgatgacctctgcaaaggccctgtttccaagtaaggtgacattctgaggtactgggcttaggacttcaacatatctttttggggggacacaattagaccaatagcaactgtgctataaaagagatgttgctttttatcattgatgctatccagatgcatagcaatcattcaacaagtcattcgaaagaaataggtatttcctgagggtctagtatgtaactcagctctgctctaggacctggtgattacagcagtgaacaaagtgctcctgcctacgtgcagcttactttcttatggagcatgattttcagaagtaattgttcttttgcctcgttatcatcagacattaggaaccaaggggggattgcctgcttttggatcacagagcaagctgccttgagcaagtgagttcgaattgcaaaggtgtttaagcatagcttggtggctgcttagtgaggatgttgcagaggcaatttaaatgccgagcagggctttgggtttgtgatggttaaagtccatttccactgcggagatggtatgattgtacaaatggacaggttctgggcctctgtctgttttgtcaagtatacaacacttctgtttatctttaaagggaacaaatagtgttttcacaggtctctgcttaaataaaaagattctagaccactggatgtcaaccccaccatcccccttcttttttttttttttttttttgcatcctgtactcctttgagaatatagtggaacctctggcccattctacaagggaaaaataaatgtattcctagccaggcatttgtgtacaattttgtaggggaggaaaggattgttcatagacactgaattaagaaatccctacactttatgggaattgtaatcattagtagcagttacgtagacatacttccattaaatacacatacttgctttagagagtgtgtttattcataaaaattcattgaataggattaggaataaaaatatgcatagaaatatttgttactttttcattgtaatggttttttttggatagaaatttatcagtgtgtaattaataaagtagtattgatttcagaattatacggtgctaaacaatggaaatttcctaaataactggcaggtaatggaaaaaaaattcagttactgacagcctgtcatagttgaatctaagagctaggggcaaaatacatatattctatgtagtttccatttctagaccctggatttctaaattcttccttataaaattttaaatttctttttttttttttttaaagatggtgctccctaactgatttccttcattttattatctcataacagatttgattttcacaatgaaggtaattattaaaatgcttcctttggtagtcaataaatataattagtttaagaaaactagaaatatttgttattagaattaggtgaacatctaagagtcttatttatggaagcaacatggtcaatatttatggaattgagttgaggctttgcaacactttcaacagctttttaaaaagcaaaatagttactgcctctgtggaaatagaaattacccacctattatgtaatgaaaaactaatgttggtttacttaaaacaaaactgtgtagcagtgtgttatagccacaggaactcctcagccaaatgttaagttaatgcaatgaaaacatttgtaaaaacattatcaagctgcaaaagaactagaaatgctagatactccctagtagctgggtgttcaaaaacacttgtcattctcacagttatatttgtggtatcttagtggtcattcaccttggatgtgattcctcaagtatgccagaaaagcatcgtcttgtgcaagtgttgtatttaggaagaactttgtgtgaaatcatgattgtgggtgaataactttaaataaataaatcgttttccttgatatacaatattgtgctactttccacagaaagatggaatcaatgctcttgactgtaatggaggtttacagtttttctaatttcttatttaggctgatctgagcaaagatgttcaaatttccacttatttaaacaagatagagtttttgctatgttgaaggaatatttttagcttagtaatttacttagaaactgccttattcaatattcgatgttaaatttgaactaaaacacatagcatcatatgacatggagtcttacattcacattttgttggactggaaacagaatcaacatattagtcatcttaattcatttaagttggctttctccagaattctagaatccaaaaacaacacatttgtcagttttacacacaaaaggagaggcaggatgtagtttatagttaaacatccagctttgcaatgaaaagccaatgtagctatagcacactgaatgaaattctgggtgaaacaaactgtgtaataagattttgatgcatattgaatacttagaaaatttgttttatatttgttttaatgagattctctttatatctgctttcatagaaacttgtaaattgtctaaaattaaattttctgtggttgtcatccacatgggttctgaacttgctgttataattattcacattttcttgcagtgaaaatctacagrtcaaggtcatcttcacgtctttagttcttgttttgcttcaggtcastttagaaccgaatgttaaaaggatattgtctattcgaagggtcagattgtggcacgtggaccaaatccagccccccgaggcccacttttgtaaatcaggttttattggaacacgggtgctcatcgtttacatatcgcccatggctgctttcacatcataacagcagaattgagtagctgtgagaccctatggccagcaaagcccaagatatttactgcatttatttactgtatttatgtttattctcttgccctttacagaaaaagtttggcaacccctggtttattctgttaacatgtttcctatataaggattcctctaataagttttcagaattattaagaaaacaaagctcattcctctaaaagaattggtatgtttttttttttttttttttggtggtggttgtttaatgaggaggacattataaagtattatatttcgtttccttaccttggttgccaggaagctcagaactttaaacattaaaatgtttaagtaaccagctcacttcacgtttcggatcagctttctttttcttaacacggggatacattttcactttaaaaaaaaatcaactttttgaagcataatttacatgttgtaaaacccatacatttaaatcatacacatgaaggtcttgacaagtgtgtacacacacataaaccaccaccccagtcaagataatagaatattcacatctgtaagaaattttccacctgccccttggctcaggcaatttgtcagtcttactactgattattgcgttattttaaaaccctgggttgtatgcaattgtctattacaagctgttttaaatagttttcggtagtggctggggcactaatgattaatagttgaatagcacagctggagaagttaagattcatttattctatttagtcttcagtacaaatttttaggtttccatgggagaatctgagatacagctcacatggagagccttttagctaatgtagcaataattaataagctggatagcctgatagcctgatgttttattagggtggtgcaaacgtggtttttgccattactatatatatatatatatacacatatatatatatacacacatatatatatatatatatacacacacacacacatatatatatatatatatatatatttttttttttttttggagatggagttttactctgtcgcccaggctggagtacagtggcgcgatctgagctcactgcaacctctgcctcccaggttcaagcaattctcctgcctcagcctcccaatagctgggattacaggtgcaygctaccatgcccggctgatttttgtatttttagtagaggtggggttttgctgtattggccaggccagtctcaaactcctgacctcaagaaatccgcccaccttggcctaccaaagtgctgggattacaggcgtgagccaccgtgcctggcctgccgttacttttaatggcaaagataattcttttaataattaaaatttgaaataattcttttaataagaatttgctgcttgccaagagctctgcagttattttattcaattttcctaacagctcttaagagtacatcttattattcccctttcacagatgaggaaattgaggttcacagaagttaagtctattagtttgctagagctgctgtaacaaagcaccacaaattgggtagcttaaacaacaaaatttattgtctcatagttctgtaggccagaaggttgaagtcaaggtgttggcagggttggttccttctgaggactgggaggagatacctgttacaggcctctctccttggcttgtagatgagtgtattagggttctctagaggggcagaataggataggtgcattaatatttatgaaggggagtttattaaggagtattgactcccacaatcacaagctgagggacaaggaagccagtttgagtcctcaaacctcaaaaatagagaagccgatagtgtagccttcaggctgtggtcaaaggccccaagagcccctggcaaaccactggtgtaagtccaagagtccaaaagctgaagaacttggagtccgatgttccagggcaggaaggatccagcatgggagaaagataaaggccggaagactcagcaagtgtgttgttccatcttctcctgcctgcttttctcttggctcgctggcagctgattagatggtaccaacccaaattgagggtgggtctgtctctcttcatccgctgacttaaatgttaacctcctttggaaacacccgcacagacacacccaggaacagcaccttgcatccttcaatccaatcacattgacactcaatatyaaccatctcagyaggcttcttcgtgttcacatagtctcctcaccgtgtgctgtgtccagatttccccttttcataaggacaccagtcctattggattagggctcccccattatgacctcatttatccttaattatgaccataaaggccccatctccaratgcagtcatgttgggggttagggcttcagtgtatgagtttgggatggcaggggagcagttcagctcgtragaatcgtaagattcctgatctgtttctcttccaagaaattgtttggtttcatgttgattttatctccttttccctatctgtctcaaagcactgaagaaaatcaagtcccccttgccctgataaggactttaaaatggtgtttgctaaaatggtgtgtgcttaggggcagctttgagccagataacaattctagttgcgcatgcttccataagctgtttactctaggaaggagaatctctgttgggatcttttggggagtacttgcctcccaagtgcttaggctcccgctgctgacaagaccctctgcctggsaagccstgcaggttggaatcctctgttagggttccaaagccttcaccaactcagagctctttctctctctgtttctcttttttgaatttaaattgatcctagtcacaatgttcacattacctatgttggggatcctaccaagaccctctttttggcccagaagcagcagcggggtgaggggaatgaaacaaaaatttatagctgtcgagtctccagaagtcatgtaaaatcagcctcagctggaagctcctccgtgcatccctcacattcacacaagcaggtgcctgatcacagctgatggttagattacacgtttcctgagaggtatagatttcaaaattggtgtatttcacccgtccctcatcatggtatccccaaacaaaatgttatcaaatgaaraactccttcccagctctcccttctgagtgtctgattttattcaagctcagatggcttctcagatagcktaaaaagtgatggagaatttcttttaccaattgtatgccctgtgggaacctgggtgctgtaatcactgaatatgttataaccaaaaaggtcaaactcgcaatgattcggtgtgttttgttccgtgcatcctggcatgtgaaagaagtgaggtaaagagtayaatttacttccttgttttaaagctagcattgcccrtgccttccacgcgggactgttgtggatatttgaccactgcaagaaaactcacagaagcagaaacttagggcttgctttaaatgttatcagtgtgaattgagatggtgtcagcattatttttttaaagaccaaaacaacaakagtaacaaacacacacaagccactgttagattttacaaaactttaaaaagtaattatcttaaagatatctaagatagtgatctggttacatagattatcagagatacttttttttttgattatcagagatacttttaaaaaagcaactacaaggtaaggattatcckttaatttagtgtttttctattaaactcaatttgctttaaagttttttacattttgcctcttttttgtatgtttgagtaccacttcctaaccaatcacaataaatgtccggtttggagttggaggagtcattgattttaggcaaggtgatggtgagcccacagagcacagagttaatggaactctggccgttgatgtagcttygaagcctgaatttaagtcatatttttgaaaagttgcgtcttaaaaagttactagcgatggagaatgaaaagtcaatttggacactttaaaagtgagcctcaaaaaactgctgaattttcccaacattgtgttttgagcacttccacgtgactttggtagcataaagactttagtcttttcaagaggcaaagtaatataccacttttcgcttttttaatggtgagagccaaggtcaatctgaatttttctttttctttcttcctttttttttttttttttttttttwwwaaaaaaaaggtgcttgaattagaaaggtagcacaytgtccacatggacagtgcaggatggggctggctttttcatttctgagagctggcaatggaatgaaggtctttttttttttcttaatttttcttttttaaacaattccctcctaagcatttcttaattgacaggggtggaaactatgttgccaagagggatcacagcccttttggtcattaagaaagtcaaggaacggggtctctttggatgagtgtgtgcgtgtagaatcctggtggctggcctgcttgctctaaatcataaagaaccctgtctcgagcagacgagaaagagtaacggaggcctcaatggtgaaaggaaatcctgtaccagctgtgaaaacaatgagacacrttcagtaatagaatatagtgtgcttacaaattcagagttgggttcccttcttctcttgaagtggctataaattaattcatcaaaataaaaaaggccaaacttcaggataaatctttctacttctaaacaaccagaaacactttggttgtcttagtagataggagtgtgagtacagaattatacgaagtgagaccatgggtgtgtgtgtgcacgtgtgtgcgcatgcctgtgtgtgtcattgsttagttaacaaaaggattgccctctgaagaacatgaacttgggccagacagcacgtgtagggggtggaattatggagcaattgttactttcttgtattaagaagaaagggagcaaaagagctgtgtcttcttgagaacctttaaaagacacagaggtctctgcctctaaaaagctccattacatttttttttttaacaggaggcctaaattttttatgttttattttgtgctgttttatttttcttcctaaggttctcagacaagtttataaaagtgccatgttggctgggcagagtggctcacgcctgtaatcccagcactttgggagaccagggtgggtagatcacgaggtcaggagatcgagaccatcctggctaacacggtgaaaccccgtctctactaaaaataacacaaaattagctgggcatggtggcgggcgcctgtagtcccagctactcgggaggctgaggcaggagaatggcgtgaacctgggaggcggagcttgcagtgagccgagattgcgccactgcactccagcctgggcgacagagcaagactccgtctcaaaaaaaaaaaaaaaaaaaaaaaaaaaagtgccatgtatattttgattacaaaaaatttcatgcggtgttactttctttttattggtrgagggtctttatgttttatttttttgagacagaatctgctccatcactcaggctggagggcagtggcaggatcgtagctcactgtaacctcgaattcctaagctcaagtgatcctcctgccttggcctcctaaagtgctgggattatactttgagccactgtgcctggctggcctttgtgttggacgttaatacagttggttctttaaagtttgacagtgaagacttttggaaattaaagaaaaaaaattgagtataacttgtaacggtcatggtgtaaagatcattttttactggttggaagtatagaagtggggttaaattaagtctataattgtaaactattgatgttggaagaacatagagagaaacttattcctgtggactggtgatcccatctcacagcccttacagataaatgtttgtaaaagcaaaggacagtgttaattctgagccccaagatgaaatatcaagtaaaagagaagaacatttgccaatgcatcactgtctgggaatggattccatacagcaggtaggtttatgtaatacagtagctgaagagacctcaattctgtgccttgatgggattacaccgaagggagcactggtaggctgttgatgaaacaggtggtatttggaccacttctccctctttcmggacagctgcttagtaggtttagcttaaattatacacatgccaagcatgtacacatatgagaagcctatatctcrtaatatccacagagaatagatggcaaatcccatgatttgtatttgactgacagtcaagaccctgtggggtgtgagcctggtgggggcattccaggctggtttctcctgcctcmaggagctgcttctagtgtgtgctcttaaccctaaaggaaggaaacactgtgtcttcctcttctctcatacagagcccttcccatgacmaatgtgtggagtgttccctccttttacgtaattctccaattttctggaccccagcttggtgtcctacaattcagttttgacactaacgacccagagtcagcacagaccccatggttgagggctcagtcctacaggatcatcccctacttcaaatgccagtagcaagttcaagattgtcaagtgcacttctgactcactggctacaaattggggttcccacgaccatctcctcaggcttgataatttgctataatggctcataaaactcagggaaatatttacttatgtttacctgtttatgataaaggatattacaaagagtacagatgaagcggtacatagggccaggcatgcggaggggatgtggagcttccataccccctccyggcatgcccctctccaggcaccacatgctcagcaatctggaagctctccaaaccctatcgtttaggtttttgttgttgttgttttgagatagggtctcgctctgttgcccaggctgcagtgcagtggtgcaattatgcaatcatggctcattacagccaggacctcccaggctaaagccatcctcctgcctcagcttcctgagtagctgggactacagttgcacaccaccatgcctggctaagtttttttgttttgtttattagagacgaggtctcaatatgtcacccaggctggtcttgaactcctcagctcaagcaatcctcctgcctcggcctcccaaagtgctgagattacaggtgtgagccactgtgcctctccatttaggattcttagagaggttttgttaccctaggcatgattacttaaatcattggccattggtgattaagtcaatctccagcccctcctcttcccccaaggcggggaatgtgggggttatcaattattcacaactctctaattgtgaataataaaagactctcccctcacccacattgctcagaaaatttcaaaggtttttgtttttttagacagggtctcgctctgtcacccacccaggctggagtgtagtggtgcagtcatagctcactgcagcctccaacttctgggctcaagtgatcctcccacctcagcctcttgagtaactgggactgcaggtgcatggcactgtgctccacaattttttttttttttttagagatgggatctcactgtgttgtccaggctgrtctcaaacccttgggtttaagtgatcctcttgcctcagcttcccaatgtgctaggattacaggcatgagaccccatgcctggccaatttcaaggattttaggagctctgtgccaggaacctggatgaagacccartatgtatttcttattatatcacaatatcacaaatscacagtcacatggtgattgtggtagtktggggggcctgatggtggggtacacctgcttgaagtcaggctaccatgcccattggggtcctcccccttttttgccctctgatcttgtgagttccttaacattggggatcagtggtttttctcttacatgaaatgacaatgacactttatagggtttctgtagagaacaccttagaattagttaatgtgtttcataaagcacatggcgtggtacccagccaagagtaacactctgaagtgctcctccttacctggacattacagcatcctttgtataaatcaggatgctcaggaaataccttgtttggaataggaataggctcctccctttttttctcacttgccttgattgctctgtattaaaattcataaaggcycatgaattatcaattagatagcatttggtttgttatttttagtttcttcctatagcaggcatgtatgcatgtgttaaaaatggaagtagcgtcgacattatgaaatgcacaagaagttttcctgcccccaaccggtaactctctcctgcagtaatcaatgttggcacctgtttaaccacttttgtgtcttacgtgcacgctgttcggtactttgactttttttcttaatattataacatggaggccaggcgcggtggctcacgcctgtaatcccagcactttgggaggccgaggcgggcagatcacgaggtcaggagatggagaccgtcctggctaacacggtgaaaccccgtctctactaaaaatacaaaaaattagccgggtgtggtggcgggcgcctgtagtcccagctactcgggaggctgaggcaggagagtggcgtgaacccgggaggcrgagcttgaagtgagccgagatcgcgccactgcactccagcctgggcgacagagcgagactccgtctcaagagaaaaaaaaaaaaaattataacatggaaatgtttccttgcatctccgtatcatttctcctcattctttttaggtgtaacacagtattttgtcctattcatgcaatataatttatataacctaattgataaaacattttggttgattgcagtctgtcgtagataatgccgtactgaatattmctcccacatatttgcaagtctatttgtaggataaatttctggttgtggctgggtcaaagagcatgtccacttcaaatttgatagctatgtcccaactgcccccaaatatgttaagccatttcctatcccccatccctcattaatctatgaagttgcctggttgccccacatctttaccgacaggactgccgctcaatgtagttacccttgtagaatctgtctgcatgtgcctgtctaggaccatgttaattgtaatctttgggcatttttctcactcattcctaaccaggactgtcactggcaggttaaatgagaacttattcacccagcacagtggcagcactagtagccagcctggggtcagtcttgcctctcgagagatctcatgcagtcaactgggatttattgtacagctttacaaaacattacggcctcagccttgtactgcccaaagcatgcagatgccgcctggtgtattttaaagatattccacatgaactgacccgtttcccacttcttgagttggtatgttttttttgattaatatatttgagatgtatttatgttattagggctatttaggaagctctgtagggatttgttgcttgctgtatataacacatacttttaaaaagcagggctggctatgacttatttttctctagagagacctgtgtagttttgtaagttcttaagatttggcagctgtggatcgtgtttagtaagcacgatctctaactctttggaactcagaactatgtaattgaaatggcctgggaggcaartgtgatcattcaggtaatcaaagtaactacagaaacagaggtatggattagctagtcattgcagatgtggcattgagcatatargcgtggtgtacwtcttagaacttcatctggaaatgcctgtgggggagttggatttcaagatcatcgtcaatgtcatgtcactgtaatttcatttacattaatcagattagtttggaaagtatggtcttcctacttttaggaggatataggagaaactcatccttaaagatagtagtctgttaatacaaaaacagtccccacatttgcattgtccccaaatctaacccaagctgaaagacattaggcctatcttcttgctttatgcataatggcagatctccagggagggagaggatgtgtgctggaagattctacaacttgttgattggttcctaaagatsgttttagtgctatgtttgtggggcggggctggagggggctggaaatcaccatctctgtggccttttaattgtgcccagttacaagtaacatttgtccccagtgtttcacaattataaattaataataaccacccattagaaattacgggtattgtaagccccaactcctttgggcgtcttaataaaaatgataattaaaaccataatttacagtaaatggggacactgcccaagtacatccacaatatggagaaaattaaaaaacttaaaccagaaggaaccttcctggcatcggggaaagaagctgcctttttcttagctcctacctctgtgggagctttgtcagtatttgaggggacagrgttcccaccttcatgttttttgtgcctgaggattctgtgggcgactgtccccacctgtccagcctaccagtgagtctcatggtgtgcggctgcctgctccgatgctctccaccaccatgcccaagccatttctccctttgtgttccctgtctgggtaaacaacttgccaagctcaccagtggcccacagggcaccttggacacctagacttaggcagtccctggctttgtagattttttttgcttcctacatgattttctaatttataccttgagctgctcgggataagagggcacctcgtccatttctggctggtcacaaggccacagtatcttgagcgagtccattgtgaccactggaggtactgtaaatggataaaataataatatgaataataactcatagtgtttactccctgcctaaatccacaggctcccgctgcctacagaggagtcccacagttttcgcttgcttcatggagcttcatctctgttgtattcatgtgatttatttacacggagttgctccccaatccttgatctttttttttttttttttttttgccaagcaccctgcctttttgcttgtctgtttcgtctttatctctccttccagtaaagttcttggcccagaggttctgctgccactcartgacatttgtgaaatgcaagggagcttgcaccatgggttcaagctcctgcagatccctgagcctgctacccttgtgcttctctgtccacgcaaagccaagtgctactgcggggttttccaaggcatagctagcatcctaatagtctcacacttgacakagtagggtttgacatggtttaaataaaatctcaaccagatcagtgggagatgttctttgagattcggtgattgagttgtgaacrtatggactgagggtgttttgtggtaaggcttgagtcatgtctgtagcaaggatgtttcctgrataatgtgcactgagcatcaagtgcctgcagtggcctggcgggtaatgccagcagcacgggtgatgatcatggtcaacatgaccaactagaaagcccaaaccccacctctagctgacagtggcttctcagctaacctgtcacyacgtgggattgggcccccagtggtgtaagctttttcagagaagctacacatctagcttttggacctgtgatctccccaatgttttaatgctggcaactaattcaaattaggaaggaaggaaggaagagaggttggaagggagagagagaaagaaggagcaaaggagaaaagaaaggagagaaggaggaagggagggaggaaggaaggaaagaaaaggaaggaagggaaagggaaggaaggaagggaagggaagaaagtatgggccacacaaaacaggtctgtgggcttgacttgtcctctgatcatcagtttgtgacctctgttctaaagagtgaaaactatgtaagatagtatmagataagtaggtatttaaattactttgcaccttttccatttcatagaacttgaatgtttgtgttcaaagcttaaaacccaagacagtgagctattaagcctccatggccacgtcatttttctgattgcatctgatgtaacaagtgctagaaaaactgatgctgttcattgctttaaaacgtctttctttattttcttggtattattaggtttacatattcttccgaacacactcttgccatctccatgcagttaagctagttcaatttaaacattgtcataaagttaattttttataagatgaatcaggttattaaatttagtaaaccattgccttcattattttgcacaaactttggcactgtgcagaataggcttagcactactacatttagctaattaaactggccgtcagctgcagtattacaagagtgagggatgttattctcttgggttttatccaggactttaacagtaggtagcattattaagctttttttatataaaactccacactctagagatatggtttactataaaagtgttattgtccttcctgttaaactatcatcttttgaaatagccacgctttgtttctgttccaaaggcaattgtaaagggtaagaaaatggagttgtctattgcagcttttaaaagtagactagcaacgggtaatgcattgcttagataaaggaagatgtaagaaccagagtgtaatttcacaagacacagagacagatggcttacccgtaactacagtcaggaattctctaaaggagagagggtggaagcttgagcctgtagcctgttgctgctgtcttgtcagatgtgccctttctggtaataaaaagtcctttgccgtgggttattttgtcaagtgagatagcaggacttaacaggtttgtttgggaaaataaaatytgatagaaaaacggcrtgcttttcccccacagatttcttggtagcatcattcaaaactacagtgagcagtatctttgcaggattttaatatttattcattattataaaggaaggaagagggccatcgtgttgcagtttgaaacagcctggattgttttaaaatagtccagagctgcagcctattagcagtctgcaagaaccatttgtttcttcagcagatatttattgaatcctactgggtgctagtctggcgaaatacggagattggagggtgtaaggctcaaggagcttacctgagaaactggataaataaagctctgtactgggtgtggtggctcacgcctgtaatcccagcactttgggaggtcgaggtgggtgggtcatttgaggttaggagttcgagagcagcctggccaacatggtgaaatcccgtctctactaaaaatacaaaaattagctgggtgtggtggcacgcgcctgtaatcccagttgctggggagactgagacacgagaatcgcttgaatccctgcggtggaggttctagtgagcagaggttgcagattgcaccgctgcactccagcccgggtgacagagtgagactctgtctcagtcagtcaatcagtcaatcaatcaagttctggaacctgcctggccttgtgttatatcgatgctttctcaatctgttaaaaacgtagctgctattgaatgactaagaattgtttactctcatttccactctctkacatcttttttttttcttttaataccctgtgatgaaactgtgaagaaagatattcctgatcattgctttgacctggaaatttcaaagggacccacagtccaccattccgtccaagatcttctgggtgtgtgaagtcccgggctcacaaatgcagttgtgtttggtcactgtgttgcttgcatatggctgttggcatctcattagcctgattgatggggcagatcagtcagcaagactttgttcggtgcctgcccccagccagctgggctacaaaacctggcattttacttctctcattttccccaaatgatctaggtgtcttttgctcactggtgataaggggtgacattggtatcacaggtaaaartgagtaaatttgagattattgtcgtcttgctttaaaggttggagatacagcttcaaaaaccttttactacccacacacccaaggggagtcaaatggatttaggtgttaaatacttcaggtttgaaatcctttgtgcattatttcagcatctgatttaagtatcagaggtcatctttaggtaataagtaagtattttggaatatgggatttggcaaaatctcaagaaataatttcaggttgtctcagcaatgaggttaaattgtgctccagagtccatattcagacaaacggaatggtggagcccgaggttgatttctttgaattctggttggtattaaagtcattcagccctcgggttaccattggtagcacatctaggagcaagttttaattttttagtcatagtgactgtgctggatttggtaggtcgtacgaattgggkaagaggcataggacaccaaggattttgcaaaaagcaggcaactaacatttgttttccacctactatgattatgttaggctctcaatatatgtttaccacttattccccattttacagaaacgataactgagtttcacatgggttcaaggcgtgaccttagatcccacagcttgtacgtgcttagaactggcagcaacacaagtgtgtccaacttgagttttcctctgtgctatgctgattttccttgagaagtattctgtataaatagactgttttctatgaagattaggcctgtgggagtgatatgaatgaatgaactttactaggctctttcacatggtgatgtcaggaagataacggtatgctgattttgcgtgcatattaacattatcttgtaaacaataatttatggccatttgacatgggtttggctgaattgcatagctgccttctctagtagaattgactactttgttattgtactgtactctatagggtcttccaccacagattacaaaatatggtattttttagtttagagcaatgggttggtgttcaagctctggattagactgcctcttctttttcctccctccctcccctcccctcctctcctttccccttttttgagatgactttaaaatatagattcatattttttaaatatacagaactttttcagttttccatttcttcttgtggcaactttttttgtagtgtttttctaggaatttgtcttttttacctgtattgtaaattcattggtataaagttgttcaccatatcttaagatcttcttagggttcataggatctgtagtccttttctttatttttcatttttaaaaacaactttattgaggtatgattgaygtacaaaaagcctyacgtatttgaygtatagaacttgataagtttggagataagtatatacctgtgaaaccattatattttataagtacatgatacaatatgagcacagtactatatggtagatctctagggcttttccatctggcgtacctgaaacttcataccctttggctaatacctccttgtttctctctcccctcagccctttgcctacaccattctattttttgcctctatgagtttgagtgtcttagattcctcatataaattgtatcatgtagtatttgtccttctgtgtctggcttatttcacttagcataatgtccttcaggttcatccatgttgttgcaaatagcagaatttccttcattcctaaggctgaataatattccattgtgtgtgtttgtgtgtgtgtgtgtttgtgtgtgtgtcttccacatttcctttatccattcattcatcagtagaaatttaggctgcttccatgtcttggctagtatgaataatgctgcagtgaacatgagagggcagacatattgttgtgatcctgatttgagttcctttggatatgtatccagaagtaggattgctggatcataatccagcaatttttaattcttgtttcgttttttgaggaacctccatactgtttttcataatggttgcaccaatttacattccactaaggaatgtaagtttctcacgcataagggggctcttgtttccacaccctgaaccacacttgttatctttcattttatgatgagaaccaccttaagaggtgtgaggtgacatctcactgtggtttcaatttgcattttcctgagaattwgtgacagtgagccccttttcatacacttggctatttgtatgttttctttggagaattgtctatttggttcctttgcttgtttttaaaatctgtggttttttttttttttttttttttgctattgggttttaggagttccttatatattttggatatgaacactatcagttatgaggtttgcaagtattttttactattttgtagcttgccctttcagtgtcttgattgttttctttaacgtgcagaagctttttagttttacgtaacctcacttgtctagttttgcttttgttgcttatgcttttatgtggcataatgttgtccttttattcatccctgatattggttgttcaagccctctctttctgtctctgtctctctctctgtcattcttgctagccctttatcaattttattagttttttcaattgacagacttttagcttctttttttctctgtattttatgtttgttttagatttataagtttctcctttctccttttatttccatcgttctgctttctttaggcttaatttgctgggttattttcctaatgtaatggatgcttagatcatcttggatgcttagatcatcattttttctttctttctttttttttggagcaagatctcactctgtcacccaggctggagtgaagtggcatgatcatcctcctgagtagctgggaccacaggtgtgcaccaccacgcccaactaattttttgtagagatggaattttgccatgttgcccaggctggtctcraactcttgggctcaagcgatccacccgcctcggccaccccgattcctgggattacagccatgagccactgtgcctggtcttctttttaatatatgtagttaaggctatagattttcttttaaccatggctttagctatactccttaagtttgtatatgtgtttgtaattaccgagtttaaaatatttctaactttcattgtaattttttgagccataatgtcttatttatttatacatatatttccagaaatgagaattttctgggatcttgttattgatttgtaatttaattccattgcggtcaaagagcatactttctaattttaatcttttgaaattcattgagacttgcttttgcccctgcaaatcatcagttttggtaagtattcttgaagtacttgagtatattttgctgttgctttcagtgtttatcatattcaattattttcagtttatcaattaagttgttcaagtcttctatatactttgtgtttgtctgcttattttatctgttactaagagggatatgttaaaatcttccrttataattgtgaatttgtctatttattgtcctaattctgtcaatttttgacatatatgagaggctctattattaagtacatataaatttagaattgtcatgtattcttggtggattgaaatttaccattgtgaaatattcagcactttctcttgtaatgcttcttgctttagagtcttttttttctgaaattagtacagctatatcagatttcttttggcccgtgttatacagtataccttttctattcttttactttttttatgcttatgtttaaataaggtataaaacataatgtacattcttttttaaggacagtatatgtatatttatgttttcttcagtctgacaaactttttcttttaattgccatctttaggccatttatatttaatgtaatgacagatatatttgagtttgggtttaaatataccaccttattattggcttcctgttaagttattctatattcctctttcccttatttctatcctttctttctcttttttcttttcctttttcctttctctctctctctctctttctttctctttcctttctttcttccatttaaattgagacagggccttgctctgtcactctggctggagtgcagtggcataatcatagctsactgtgcccttgaactcttggactcaggcaatccctcgacatcagccttctgagtagctgggactaccggtacctgccaccacacctggctatttcttttttaattttaatttttgtagagacagagttttgctatgttgcccaagctggtcacaagtgatcctcatgctttggccgcccacggtgctagaattacaggccactgtacctagtcatcttctctcctttcttgcctttttatcattctgcttttcttctccattagctttttaaatttgtagagatttacatcttgcatctttgacttattaaaatctaatataaatcagtattatatcacttcctggagaagacaagaaccttaggatactttgcttccattactcacctcctaggttaagcattgttattattattgatatagtaatttttgctatatattttaaaactcacagatttcactcttaccatttggrtcttaacatgtcgttaccctttatgttgctctttgttactttctgcatctctgggtttatagctaaggtcattttcctcctgcctgaagagcatcctttagtgtttcctctagtgtgggtctatacgtgacactaggtgtagtgtaggtgacaaacaaaaagcagctttcgtttgcttaaaatttttgttctctgcctttatttttcaaraatattttcactaggtatagaattctaagatgaaagttttatttkttttcagctgtggcttccatcattttcctgagaggtataactatcagtcttgtagctactggtctctaactacttctaaaactatctgcagtttttagcagttttactctgatgtgccttgctttgacatgtatgtgtatatatgtgtatctacacacacatacacacatacagatacacactcacatatatatttctgtttgcggctcacacagacataaatatatatatatatatacaaacgtacatttctgcttgtagcttgcacmyatatatatayacacacacacatacatgtagacacacacatttatacatatacatgtcaacacatacacatacatatttctgcttatggctcaggatacttctttttttggccgtgtatgcgtcattgattttgtaacattatcagccattctgtctttaaatattgcttttcttagtctatttcacttgttttggaactcagattacatgtatgtgtaagagcctgggagaatgtgtttcatatgtctcttttgtgctttgttttattgtgttatttttttctttttatgcttcactttggatttttttgttaacttattttgtagtttcctcaatcttgtcgtcagctgtgtcttgtattctgttaaactatatgctgaattcttctttactcttattactcttattttgtttaagtttcagaatatctatttgaatttttttattgtttctaattccctggcaaaattctccatcttgcctttttgttccttgaatttgtcagtcagacttattttaatcactgtttctgaataacttgattagacagatctcctgtgcatttatttccatttgttcccctctggcttttggtgaagttttttctttttgtatgcttagctattttgtttgaatgtctgagagtttatatgagtatttgaaataatcatagtggtaatttgagactctagataatggtatcttcctccagagaacattttctcttgcttctggaaattggatagatagggactgatcactttaatcaaactaggaattgaaatggcctgaagctgagtttccactcttgtgaaggctggactgtctcttgttattacagcgagggtataactctttaggatcccgaccmaaggtttggtgtgtttaccgtggccctttcctggtgggtcctgagctcaaatttatgtctttttccttgttataaaattgccaaaagctcagcccatcttctcaggcttccaaccactatgtttggaaatgaaatatgccttgaaggaaaaaagctgccaaatgctggccttgcagtttttgcagatcttggccccmaaaattcttagtcatagtgcccttctgatgccttcaaacagatatgggtgtgtatgcacgtgtgttattttgtccatcttttctaattgttctcagtaggaaatggggctaagaaacctaggtaacactggtagaagcagaggtgctggcgacacttaccatagagtagagcataaagtccttatcgtgggcacaggatctggtcattattgatggttaaatggctggacatgccgtgaactcttctatgtcccagtcttcatctttgaaatcactgcatccctaggacaagttttctcaccatcacagtgttgacagtccgggccagatggttctatgttgtcaggggctgccctgttcatggtaagatgttttgtaatgcctggtgtttacccactagatgccagtaggactctaccccacaacygtggccactgaaaatgtctccagacatttgcttctgtcccctggggatcaaaatcacccctggttgagaacttggggtaatttaagtggtgctccggtaaaggccattcaacwtgactcactgtgttgatgttatgttttctaacattgactttcctttaaaccatagggttcgaaaccgccaagtcttttgccctccatggtgcacatgtgaycttggcctgcaggaacatggcaagggcgagtgaagcagtgtcacgcattttagaagaatgggtaagngcttgactgttgttgttttttttaattgtcaaatacacatgccnggctaaccatatggagatttyagtggagtgtgtaaagtttattgctcttggaatcatgtctttatttttaaagtcatcttcactttgtttgtcttatgaatgaaagcatgagcaagtcmattattattcacgcatttgtttgtagttcattgtcagtgtcatctgctttattagtcaggggtttgagaatgtttcttcctttaactcatttattaagaaaaataaaacgtggtgaacgcccatgattgcaactaggagactgttatgcttatggttgttaagattagaaagaaggargctttaaccctatctctratttcttacttttctctgtctatgtagaagttgatgttgatacgtgtctacataaatatttactaagggcttgcmttagtcttgggaccaaggatatagtattaaacgaaacagaatccctgccctcataggcttaccttctaggtaggaaaaatagaccataatcaagtttaatatttgccataatgtcagtaaataaaggactgtaaagcagaggaaggtggggggaatgatagcgtgagtgtgatggagtcatcagcagggagccttccaaagttgtgacatttgatctgagacctgaatgaagtaggggtaagccatgcagatgtcaagagaagtattctcttagcagtgagaagagcatatgctaaggctcagaggtaggcacaagcctggagatttcaaggatcatcagggaagctagtgtggctggagatgaatggagtgggtaggagaggtgctgttgggggatgggtatctggtagactctgagrtagcggtgaggaagacattagagggtttgagctagagagtgatgcgagctgtttgatttttgaaacatcgctggatttcagaatgaagtccagactgcattcattcacttttcattcattcacatattcatgaagtgcacctctgtgatgggtgctggggtctactgttaaggacaacagacgttgccactgtctttgtagagctttcagcctattgtggaagacaaatttagtcaaaaaacacagatcttaatgtaaacttgaaaaagcagtgagtggtcctaggaatcagtaatgatgccagggagttgggagacctttggggtccccaaggaagaagtgattgaactaagatctgaagaaagacctgaagagggtggagaagggtcagatggggtaggggaatggcaggtgcagaggccctgggaggagggggaggaggagatagagcagcgtgtttgggagcagagcctgaagggggctgggtacaccctgtggaggccgtcttcatttttgaatgctgtgaaagatttcttgccatttgaagaaatagactacagtgtacttaagaaaatttttggtactctggactgaaaagtagtgaaaataaagaaaaggaagatttatttctgctttttcagtgtatttatgatgaaatatttgaaattcagtatatttgaaatgagcccttatcttgagctcactgagcttattattttgggttaaataaaaaagaaaacagagtcttactttttctgatcattttattgtctttctgactaatgttaaaaagtagtaacctctagtaggtgggatttttagggatgtattgagaagagtacaaatgggaatacgtgcatcttatttgaatctacacgcagaatgggaaggtgaaaaatgaaatgtgaaagtcgttcttggtccttctcttggaagataaacattatgtattcttccagaaaaaggttatctatataccagcaaacacactcacattctgttctgtactttttttttttttaaacttagtactgcaggagatctgttattagtgcatatagatctacttcattgttttaactgctgtataatattccatcatgtgcttatgctataaccagtcttccctttggtggccatttaggttgtttgcattgttttgctatttgttattccaagcaatggtgtttcacagttctctctttcttgcatcagtctttcttrcgatatcatctgatattgggcctaaactatgctgctgtgagcattctttatttacgtatttgtgagtaaatgcctggggcagaatcttagcactggactccttgattcaaagggcatatgcatttaaaattttggtaacagttcccgagtcattttcttttttcttttttttctttttcttttttattttttttttgagactgagtttcactctgtcaccaggctggagtgcagtggcacaatctcgactcactgcaactttcacctcctgcgttcaagcaattcttctgcctcagcctcccgagtagccgggactacaggcacgcgtcaccatgyccagctaatttttgtatttttaatacagacggagtttcaccatgttggcygggatagtctcgacctcctgatctcatgatctacacacctaggmctcccaaagtgctgggattacaggcatgagccaccgtgcccgacctcccgagtcatttcttatcttgttgctccaatttccattcccactgacagtgtagacagacaactgctgagggcttgcagtgttcttgggactagcaggagggcgtgtcaaaattgtaaaactctgcctatttgatgtaatatttgaaactagaaaggtaaaattccagggaygctagtgacactatggtaacctgattgtacagtgacattcatgtttaaaccagtcttggaagataatgctgtagcacaactgtttttgcatcattaaatttatcctcttcttttctgagaacacaatatatatgagaacacattcatctgcatttatcctattttaattattgtttgatgcttagagcagaaattcctggacctgccccaattagcgatgagaccttgggtaagcctctggatctatttggagcctgtttcctcatctttaaggaaaaaggttggatggatgatgtcaaagacccactgttcagtctttctttcttatattttgagccttaattgggtccctgtgagtcaatttcmgatgatagaatttgctgttttatagttttactctaacatgtagtaccttgagatagaccagtgatcccagactaagaattattcagaatcattcaccgtcggggacacagaaaaaggaaaatggaacagaaacaaaactaatacacgtggctccagatgtttaaaattagatttgataggttgtaggctgaagaaactcaacctgttcatcatctctcatcttttcacttgttctctgtgtatgccattatattgtgttcctcattttcccaagatgatgattatggaaactcaaattttgcaccagaagctgtagttaccatttcattccattgcaccattcataccctgcagagaggatgtgaagtygtaaggccttcttgctctggtgacatctgttaggcttcgtctctatatcatcccccaactccttgacccttgatatttgctggtctacttcacttcaggtccttcctcacctcacatctctgcgcaaggatttcatctggtatgtcactaaatattaccttcctgtgtttctcaaggtcaatttgatagactccaatttttcaagctgctggccagcttgagcgtattcatatgttacctacgatgaatcacatcagtgtcggggccgggaaggtactgcaacatattggcrcctcacgggaggctctcaaaatgatccaaagttttttgttgcagcaaaagctcattcagaagtctttgggccatttggctcagcggaggctgtcatgtgccaaggctccgtgggcattcttagctctgcttctggagataagagttcattcctccatcccaacttgttcttccctgcccattcttcctcttcctgccttcactgcacattccgggatcgccatgttctagaacattcatgtctgccttttagccagcagaatgctattctcacatccacaatgggacagctaayagcccccatttatcaaatccctgtcatatgctgtgtcaggcactttatatccctcatccaggaggatgcaaaaacctggtgtttttcttttttttttttttgcattttccagacgagccaagrgatggctcagaarggtgaaggaactcacccgaattgcacagctggtgagctcagagtcagkctccttgcttggtccatctggcttccaaactscaagtctgtctgctccaccccatggcccatctttttaccatgtttagtatcaatgttcatactttgcagattttgctttcaaactctctagctgcggtttgagtgattaatttcaggatccatcctatttcttagaggaagccactctgatctaccctgtcgtctctttatattcaagatatcctttatagagctctcaaattacttttgggaagaaggagctatttaataaaatacaacttaagtgaaaacacattccatatagaagtatattaagaacctatatgtaattactatgactactaattatttcatgggaaaatgccctcctgctgagatgttttagatgctccaaagttagaagagaaaaaatgaaaacaattaaaacaggataacatggacagtacagaagtaaaccactgtcttaaaaggccaatccatttggcataattaaaaaaagagggaggagatggaggcacatcagcccccattcatatttaaataaagaaaacggggcagtggggcttgttcctatgttgtggaacagcacacagatgtgatctacctcattcacatccttatgtgaattatacactggtgccctcacctcttaagacaagcacctatcgttttcctgtgtattccaagaggccagtgtggctggtggaataagatgttttcctgttttcaagatgsagtggactctcttttatttarcagcagtgtctatgtgttaggaatccatgtgagttctctaagtctgggacaacgataggtgtgtctgagtcctgcattaccatggtttattctttcctttacccagtatctattggagttgggcttctgttgctttatttctcggggtctggcatatcccactccctgtcttgagatctcaggacctctgaggggcattgcatktaaagaacaagagcttattaggtatcaaaacatacttcatgaacagctacagcaagacctcgacattccagtgtagagctcttgaaagaccccagtggggctctgagttcctccttcttctgtttctattagatttctaaattttagtttctaaattttagatccccggaacttgggatctaaaactctggtcctgtggaagaaggaggtagggtagagtgggagcagatggacctgatgtcatccatctccctacgttgtttgcaggaggaaaagggatgaggctgaggctgggaggcaggggcggtggattgagagagaggagagggattgttatgagtaaccaatgttcctcatgcctgccaggccctcactagatctgtttaacagagagtgcagaagagcttctgttggggactggccattagtatagcgaggggcccaataagtgttgtgaaacatcagcatctgctggacattgagatggccacaggttggtcagagagggctggtatgggaagaggggcaggtggctctcccttagagttactatttgactcacccctgacttcccagaatgtgtcttgagtctattmccctctcatatgggaggggtgacccaagtatgtttgtggcaaccaaaatgtctccaggcattgccagatgtctcttgggggtgcaaatcgtccccagttcataaccacggctataaaacatgctgtattatagtggcaaagattagaatcagatacatcttatgaccttgggcaagtttcttaacttctttaaacctcagtttcttcatctgtaamatgcacatcataatatctctattcagagatacaggtggttctattaaacacatcaactctgtgkwtataaagtcttaacccattgtggaataaattaagtgctcaattaaatgttagctgctgctattaataacaacaataataatattttcttcacgcatgaaagtgcaaagtgatgcttacttttcttaacctctccaactggctgaaagaggagctctagggcagatgtttatcagcctgatttcagtggagttgcaatgaattctttttctgtcttcatatgtctggactcctacattttaatggatgtgtatttagtttgttgattagtattttccagtgtagctcatattagcactcaactgtcatttgaaaagccatcttaactatttatgtgattgctttttcttttgtatttacaaagaaatacactctgcatatattttggaaagatgattaagggattagtcatcaggaacagcaagcaatggtttatatcaaaatgattattgagaaagcagagagatgaggggtaaaaataaaagatttattagccagaggtaatggaatgtgcatgttttagggagagagcgcatgctcagttgattgcaaccacacggtttgctgctgaagtgctgtaatgattcaggttttcaatagagttgatatcgggtctatttattttgtgggagtgaagggatagggatagtactgacagcattatgtgattgcagcctcattgataagcatcrgaaataatgactttaacattattttcagatagggagcactcagtaccaaccattatattaggctcatgggctcaacattttgctgtrcttttcatagatactgacacytgtgttttcattttgttgttgttgttgttttccctgccgggaaactgccgcatcctgtgttttcatggcatgatattaaggaacgatgggtaggatgctgaggagtaarttgctcgcacttttaaagacttctgcaaaactccacctacttttaggctccttaaaattcagtgactttatgagctggtatagcttcactgtttgtgggaattccatgcaatctcctttgacactaaaagcttaagtcccatgatttgcctttgtggatggaaggccttggccttcttttatgatatatgtgttggggggaggcatgtggtatgtggrgcgggtaaaatacgagcctcatgcctgtctaagctggtgacttggcttggaaaagatgatcattcgtcaacgcatcacaagtcacagggcttatctccattgttctgaacgatctgtagctaaacaaaaagataaaagctattaatattattaatagttgtagattaccgggaagarcgcatcctaaatcagccattagatttgttcctcatttctttgctttacaaattgtttttctgtatagtattggattttcaataaataaagkatgatatkaacaagtctgcaaaccagcaagaactatataagccacttgctcaagtcaataagcgcaygctcacaaaggaacgtaaagttctgaagttcttctttggggcgtttgcaaaatgtcctattattgtcacctgcaggtggggggttggatattcctatttgtctttgtactaggtactgtgcttagcatttaacagtaaagtatttatattatgtgtgaaacccattgtgcagatgaggcagtttagaggctggaagaggcatagactttcccaggctcacacagctgggagataacggggtggatccaagatttgcagctggtgtgtgggtgatgccggaagattggcctttttcaaggacttagacaagtattgtactsatacattatttgcatttatttgtatgaatacttctgggttcctaatatgagggtacctaaaaagtacatccgctgcgcttcttgtaatctgagggagttgatgaacatgggccaaggaagctctttccttcgccttccgttccagacttccttttcgagtagtatatcgtgtatttactgttctacttcagttgcctatttgacctttcttgtcacaggctcagggaagattctttatcagataataaattattcatccccctcatagacataatcggttgctaaaatattctgagtttcctgtctccagaatacctaaaacttgtgcttggtacttatcctctaagttttccgtttcatttctcattctgaaaattttgcaccgacttagtcttgaatgttattcattgttctttgatcattgtctttgtgtcttctccttttttttttttttcctggccaccgctcgcagtcttgaaccgaatctttcaaactttatatccatgtracctttgtataatgagggctgtgattaactgcagagttttaaagagtgaaagtcaagcataggtggctggctctgaaccatcactcccaataatgtgaaacccaaagcagatgcatcctttcattaatgtggggtcccctgagttcttattaagcaattttgacatagtttgaagagacggatttcatgttcagacagtgttcagccgccaatggctgaaaggcctgcttttggccacttggcatttagactccattatttaagaggggaaaaatatgcctgagactgtttttcatatttattgtgggacatttagagaatctcagactagcaggtgttagattaaacagaggagaaacggtccttgtggtgataaaacttccctacgcaaggacaartagagaaacaactgtagatgaagcagccagtctcaggctggggcagcacgccctgcgataggttaaggtttattttagacaaatatttaaaatgcagctaatttttacatatgcagacgcaacccagtggaatagaggtagccccagctttggagtcatacagatctggggttaaatcccagtgtgaatactaactcactcggtgtccctgggcaaatctggtcatctctctctctcttttctttttttgagatagggtattgctctgtcacccaggctggtgttcagtggcacaatgatggttcactgcaaccttgacctcctgggctcaagtgatcctcccatctctgcctcctgagtagctgggactacaggcttatgccaccacacctggctaattttttttttttttttttttaatgtagaggaagggcttcaccacgttgcccaggctagtctcgaattcctctgctcaggcgatcctcctgcctgggtctcccaaagtgctgggattacaggcatgggccatcgtgcctggccttagtcatctctttgaaccttggctgatttacctgcagatgctaatatgactctcagattctggcacatagtaaagattcagtaaatggtcgttgcagggaaagctaacttgtccaatgcagatctgtaaaatatactcataaatcttgttggagcaatatttcttctttgtcttacttcgggctaataacaaaaatatcatacaatgagtggcttaaatatttattcttacagttctagaggctggaagtccgagacgagggtgccaaccttgttgagttcttagtgaggtccctcyttctggtttttaagtagcctgtttcttgctgtgtcctcatatggtggagagctgagaggaattgagagagagagagagagaggtcgcactgtctcatgtgtcttgtaagggcactaatcccttcatgaggattccactctcatctaatcacctctgaaaggccctgtctccaactaccatcacatgggcaattagggtttcaccataataattttggagggacactgtattagtccattttcatgcttctaataaagacacacccacgactgggaagaaaaagaggtttaactggacttacagttccacatggctggggaggcttcagaatcatggtaggaggcgaaaggcacttcttatatggtgtmagcaagagaaaaatgaggaagaagcaaaagcagaaactgcctgataaacccatcagatctcttgagacttattcactatcatgagaatagsatgggaaagaccggcccccatgattcaattacctccccccgggtccctcccacaacatgtgggaatcctgggagatataattcaagttgagatttcggtggggcgcagccaaaccatatcagacacaaacattcaattcacagcattctaccccagccctccaaaattcatgttyttctgacatgctaaatacatttattacatccaaatatccccaaaatcttaactcattccggcatcagctgtaaagtctatgtctttttaatttttttaaatgatcaaagcactgggaagtagccacttctttcctcagcttcccaccaatgtgtcaattaataatctgactaaggtggccgggtgtggtggctcacacctgtaatcccagcactttgggaggccaaggcgggcggattgcctgagctcagaagctggcgaccagcctgggcaatacggtgaaaccccgtctctactgaaaatacaaaaattagctgggtgtggcggcatgcgcctttagtcccagctactggggaggctgaggcaggagaattgctttaacctgggaggtggaggttgcagtgagccgagatcaggccactgcactccaatctgggtgacagagcaagactctgtctcaaaaataatagtaataataataataataatartaataataataataataakaagaatctgactaaggttattaaccattaaggtatgctgtgctaaggagcagggggccccttccatccgtagagggcagaaaggtgcctatcatgtcttcagtgtcagtgccctggtatggagctagctggccttccacaggttctggagttaatgctggagagaagtaggggtgkcagagcctaccctgtgttcctaggggggttcatctggagctagtccctgacccttaggtggaagatgcagctatgcccaaggttctgaagaccctgtaaaaggaagccttagaagtggctgcgattgttttaaagtctgtccacaaattctttgataattctcctttcaagaagtagaggccagttctcctctcttggaatatgggctgtacttagtgactcactctccatgaatagaatttggcagaaatggccgggtatgactcctgaggtaggtcctaaaggcttcgtggcttcttcttgctcactctcttggatcactcaccagccaccatgttgtgaggaaactcaagcagacctgaggtgaggcccatgcaacaaggaattgaggccaccagccatgtatatgatcccccttggaatcctccagcccagtcaagccttcagatgactgaggccctggctgattcatgtcatgagagatcctgagtcagaaccacccagcagctaagccacttctgaatccttgacccacaaaatatggtaagataccaaatggtkactgttttaagccactatgctctgggggaatttgtgatgtagcggtagataactatcacaggatccatggcctcaaggggagaaggatccttaagagagactggacagtgagttctaaggataagacatgtatacttacccaggaagctccactgtgtgcaaggaatcctaagttcccggggttgcatccatctcccaggtcaccttgtttgacctctctccaacacttttaaaacatacctgatcaggaatcaccccgctttggcataagttcctctctccccatgctgcccatcccatttctgcacacctcttaattagtaagttctccctcatattgaaggcagaatcttcctctgagcgtcttctatgcaccggccctggtcctgccctccgagttccactggctgcattctcatcagaacccagctaaaactcacgtctctcaaattccctaaataataaatccaaagttattgaagatattgggwtactaaaagttggcagtgagactggccccactcatttctttgtaacccctgtccctctttttattattgaagcttgggatgcacttggtaaggctaggcagctggagagcgtgcagactcaggagccaagacctgccttgccttccctggagttaatgaatcagtgtgaatgaagagcacagtcttcttttaaatgrcaggggaaccrtgcacttatttaccggcaattctcagattctaattgttccgactacaatgcgtcctgtaaaccgggtagctgggagaaacttcaatgcatctttgtaatggctttgttgttgtttattgagagggactaattaactttgattattgcactaatattatggcactttgacagcccttcagatttatgactctgggaaaataaacaaatgaaatgcaggtgctggagcagaaagaataagttattactgaactttaattacttggaatgcgtagccaggagagaattagttgatgaattacaggatgcttaaaatctacatcaaattgcaagcaataagaagataaaaataaaaaggaaggggcaggaagggtgctatttttaaggcagggaaggataggatgcatttgcagtggtctccgtggtgtttcattgattaaactttgtggtctctaatgctgcagatatgtacatggtgctactcaaagcatggtccctgacctgcagcatcagtgtcacttgagagcttgttggaaatgcaaattcttgggccccaccccagacctactaggtaagaatctctggaggtagggcccagccatctgtggtttgcagttactccaggagattttgatatctgcagaagttgagaagcatggctcaacagttctcatgcagcttgctttttcttttataaaagggcgggtacacatttttatctttgcttatgaaaatcaaatgttttcccaacccagtttaccaagtagctcccaaattttcaagctattttaaaaattggctgaaatttaaaaattttgggcaattttaatttatccaacatctattacgtgctaggtggtagagtgggtgacacaagatagtctagaaggattttgctaatgaggtgatacccctaaactgtcatcgatgccagcgcctgggtagtgtggtaagagtgatactcccatgactcatgaaagatggtctccccacgtgctttaaagcaggatggttgcaggagaaagtattggtggactgtgaacagcccccatggcaagggtgcatctggagctggaggaagagcatccacagagtgtaagtagtttgtcctgggaatggagatgtcaggcttgggtgtggtgtcggggagagggcaggcagctcctctatgaggccagatcattcggggccttggattccagtcttaggagaatagactttattctctaggtcctggcagccatcactggctgagtctgagtggtggtgatacagtccatactcagtgactgagatagacagacatttgggctgaattagcgaggggagtgcggggtctggagactctgttggcctgttggccatggtcctgggcgcaaagagcagaaaaggacgagacggggactgaacagacttgcttagttcctgacattcaaggaagaactttaacgtccatccacggagcctcaaaggctaaaaataatcatccctttcaatagttcctgttgtgaggaccattaacaaattataagagaaagcattcctcacttgtagaaactccatgaaaacagacatgtgtttacttatctgcaaccctgtgttaggaggagggtgatgagacactttactgtttgaatcaggaagtgctgacagtgaagggaggagctcttcataattatacccggagagcaggcaagacagccacatgcaagtggcctggcctggctgggtttggtacagaggggattagggcagattcaaacctcactggtcccccgtcccagcacttctgtgctgtctgcagttactaagcacttttcctgtttaagttgttgctgttttcattcccgcaaaagctcagccagcctctagcccaaaattgtctctgtttattggacagttggaaatgtcactgtggccccacagaccttgttgtcaagcaggctgctacgcttttattctagagcgtctttcatctgatttcctccaccatctggaaccttctggattcttcctcttatgggtagtgatgggcactttaggagtaggaatacatgtcagtgctagaccacatcctttcatacccggaattcgcatagtgacatttaaaaatagatagcaggccaggtgcggtggctcacgcctgtaatcccagcactttgggaggccgaggcgggtggatcacttgaggttaggagttcgagaccagcctggcaaacatggtgaaactgtgtctactaaaaatacaaaaattagccagttgtcttggcgcatggctataatcccagctgctcaggaagctgaggcaggagaatcccttgaacctgggaggcagaggttgcagtgagccaaggtggtgccactgcattccagcctgggcgacagagcgagattccgtctcaaaaaaaaaaaaaaaagtaatcattttagaattgctttctcttcgggatggtttacctcgtgtttagtctgtaaacgcggataaccgagagctggtcaaatgtttacatggggctgtggaccattttgtatcattggaggagaagccagggcacttggcaggggtgttcatgatgataatcaggtggctgrgtggastcrccatttgtggcatcctcaaagacttgccaacatagacatttttggggagacagaaacacagaaataattctgcagtgctttaaagaatctgttaaaaatcaagtttctttcagtcatgtatgatccattgggctttatataacttttagcctttgcyttgcagggacagcaaagatgtgagcaaatttgtgcaaacctaatagggtgaaaaattgaggtatgaattagtaaagtcatttgtccttctggaaagagttatggattaacagattacatttgggtatattgtggttgtgaaaaggtaacattctcagattggaaaggactttctgagatcatccaacttaactttccccacttgacagacaagaaaactgaggcccacagaaggtaacttaggcaattaattaattatagttaataattaattctgcctgcagaacaggaatatggcccccaacgcttcatgcttaattggatggcttattaaattcttatttttatggtagtgatgatgatgataataataataataacagtagtagctagcattgttttccagtgctaagcactttaaatgcattaattcagttcatctttatgacaacactatgagatagctaatattatgaatcctattttcagatgaaagactgagtcttagggaasaaacagccgagagatgaaatgccacagggatgtctaggttcaaacagcaacagaggtgcgtaccatagggatgtggaagccttgcttgtcttgttcctcttggtataaccccagtgagtagcatagygcctggtcaattggagggatttggtaaatatttactgagtgagtgagagggtaaaacagctgagccatgggagttataacttgggcagcagtaatcctgccattgtaggaggggacagatcggctggttagtttttggaaagcagaccagcagaagttgcaaataacttgttgtgttttcctaagtactgagctgtgtgaattggtttcatgttgatgttactgaagtctccccaattcatcatctaccttgtagcttgttgaagaaagagtccttatttacagtctattatgttaaacgtattttattccagttctttgaaaatgacccatcctgatttggaaaatctctaacttgcctggtcattctggagcagtgggagccgactgtgatgcagagtggactcataatccagcttgattttgagggacagaaacctgggcctttaggtagaatgaacagsttaaaaggctgcacctgagagtagggggcatatgggtaaatccagctgtacccaagagttgggggcatatgttagycctactgggtaaatccagctgcacccaagagtagggggtatatgttagggctagtgcgtaaacccagctgcacccgagatatggggtatacatgagtgctattgggcaaatccagctgcacaggagagtaaggggcatatgttagggctagtgggtaaacccagctgcacctgagagtaggggtrtatsttagggcttgtgggtaaatccagttgcacctggcagttggggcatatgttagggctagtgggtaaacccagccrcaccsgagagttgtgggtatatgttagggccagtgggtaaatccagctccatctgagatatggggtatacatgaatactagtgggtaaatccagctgtacacgagagtagggggcatatgttagggctagcaggtaaacccagctgcaccccagagcaggkgtatacatgagtgctagtgggtaaatccagcagacgtccggactgtgcttgagggtrtcatcgagagagagaaggttgatccgaagttagtaaaggctttaaaaattaaaaggcctgagatgatggtagggttttggaggtaagtataaaaaccttcttgttttctactacttaaagctgaaaacccagcttgggttggctttgcttctaatatccttcttcctttttgtttcrtaagtaattgtcctgaagcctgtcgagataaatgtatactgaaagagaaagacacagaggagagacaggcatacagagaaagagagacacgcagacacacgaaggggaggtggagacacggaggagggacagaaagacagagagagacagaaggagagagagagagagaacctgtctagcggtgtttttatgaggtttttagtgctgggctttgcatcgtggtgacggtgtgtgtgtgggggtgttgatcactgttttcagtgttctctgatcatttcttgcttagaaaggaggaaattagaattgttgagctatgatttgttttaatcagaaagaaattgtctaacataaatctcttcgtgagctctggaaaagcccctaaagcggccaggaaaaaaatatcaatactttgcaaaggaggaatgattgttccaattcgtggcttaattgactttaagccttaatgaaactaaggccggagcgggtggcacactccgtggctgggatccacagtgaaatctacgctgggagaggaggaatttagggtgrtaatttggttctttgctattgacgaaattttctaattgactggggttacttaataccagataatatttttttcttgctataaagagagtaaatttgtttttttctgaggaacacaggaatttattttaaattacagctttttctattggaagcattcatttatgttggattattgttccctgagtgaaatttcactgatgctgtataattaaatayagatttttttagagatagtatatattttagatgtataagtggataaactggaggtatggaaggtctttatttaaggagaataaatagcccaccccatcaacatgatggcccttggaaaggactcttttagcctccgcgagttccttttccgcaccaggctccacttacgaaggactgcaaaaacttgctaaygtcatcagtctgaaaggattgagctgtaaaatgtgttatgggggcctaagcaacgcatctggaatttagccttcccaagttcaaatccggtttatgccacttgcgaaaaccatgtgaccttcacttgttcttattgcctcagtttcctcatctgtaacttggggatgatgacagtatttggatcacaagattgttgtgaagatgaactgaagtgctaatgtgaaatgttcatgatggtacccgagtacttgcggtggtacctagcgtgtgctttccaagtgctggcaaagaaaagaaaagaawtgcttggggctctgcctacctgtctaggctcctgtctggccattctctttcttgttccaaccatatcaaactcactgctgttgctaaaccttcctgtctctctgcatcttggcacagactatgtcctctgcttggaagggtctcagctaagcttttcctccccacatctgcctctgtatcctgtgagtctctgttcaagggtatctttcccacaaagctttcctgggcttctctttcctgtctcctgccctcccttccttcttttgttcagcacatcgctgtcaaccttcttctctgggtcaggtagagcactgagcaccagtgatatggcagtgataaagaaagcaaaggttctcactgggtgtggtggctcacgcctgtaatcccagcactttgggaggccgaggtgggtggatcacgaggtcaggagatcgagaccatcctggctaacaaagtgaaagcccgtctctactaaaaatacaaaaattagcagggcatggtggcgggtacctgtagtgccagctgcttgggaggctgaggcaggagaatggcatgaacctgggaggcagagcttgcagtgagccgagattgcgccactgcacttcagcctgggtgacagagcgagaatctgtctcaaaaaaaaaaaaaaaaaraaagaaagaaagcaaaggttttttcctcccaagaactcatggtccaagttttggtttttaaatatgcatctatgacagcacggatcacatagtgcattgattgtttgcctgtaggtctccttatttagtcaacaagcatgttttgatcctttattctataccagccgtcccactggactctcagcacatataggtatgcgagacgttgtccttgccctaagtgtggagacagacacgtaaattaatagtaataataatatctaccacccactaggggtctatgtgtgtatgtgttgggggcggtgtggctggggagggaagcaaggcctgtattatggcccragctcaagaatattcgggcaagagcagatacaatgcctgtatttctcatcacttttgggtggcataggaccagttggttatgagcgtgaaaggttttctttgactttggtggtctagttagtggttgagaacatggattttggaatcagcccggtggaggttggaatcctggctgcgccgttctgtagcagtgttgtggatctcagacaaggtgttcctgcatatgcctctctatcttcctacaagaaatggaggtattgcatccccgaaccgtaggatgcttgtcaggattaaatgagataacagtgcctggttagtggcacatgctcagtaacacctgccaagtaccactcactgagccgaaatctcctgaataccaccccttcatgccttgcacatcctgggttctaactcattgaggtgcccccacctttccttcttcccatcaacaactcttgtgcccacgagggactggcctcctcagtgccacacagagcctcccctgagtagatttgtgtcattttcaaacaaagcatcctsgctgcagtgttggattttgtaggatggtgaccgtttacagaaacctctggtccgtgagccaatttggagaaaattgaatcattctctgtgcctttcggcttgcatcctaaaagcctgcacaaacactttgggcaggcttcagcaacttcacatcaagggctcaattgcagctccaatataaaaacctcccccgttgctctctgtgtgtgaagctggattccatgcttggcacagacctcggtgctcacggtaatgcttccttccaccatatcagaaggtcctcagcagccgcagccacttaacatgctcggtgcttctctgtaggaggattttkaaaaagcaggaactgtcagggtcccaaatgttcagtggcacttcagccagaggtaggatagggattttgaagtgtttggagaagtgttttcatatttgaatttacggggatggggtgggctggggtaggcaagggacagactgtagcgattcgcttggtgttttctcatgatgccagagaaaatgacctcattatcatcatgctcacattcacctttgccaggacccctgtgtagaaataatcatgaacttagtgactgacaatcataagcgttttatgatttgtggaggatttatatgtgaaggaaaatggatgaattaaaaatattaaacagcttagccggcacccacatggatgaatcaccgagatctattttttccccgtttatactataaacatatggcatgaattttctgctctcattacagatgctgagagaaggcaaagacaaatatttatattacattcatgttttacagtaaaaacactgttcggtttgtttacacagttccactgttacagtttttatggtcggtaatgcaaccaccgtaaaagcaagtctgggttatatagcagatgtgataagccctcatactcagagagatgtctgggaaagaatcgttgatgtcacatgtacaggatcaacaatggaattatgtgttgggacagtctaagttatgctgtaataacaaccaacctcaaaatctctggggcttgaaacaacaaaggtttatttcttgctcaaactgtattttcatcatgagttgcttggagggatctgtgagatggggatctcactcagccaccggggcccacagagcagcctgcactgctggatgttgtgacagaggaagagagggatgtgctgaccctcgctctggctcaaaagtgactcctgccatctctgctcacattccattggccaaagcaagtctcagggccaaggagtgggcagtagtagggtgctgtgtgtgtgtacaaacccaccatatgtgcatagagggaggccgagaactggactatcagagaatagccaaagatttctttccacggtcatgtcaagcctttttgctgttatttaattgatgttctatttttaatgcaacatggaatcagaagaatatagaacaggcgtcaaagaccctcccgcctctgtaaccgcactgtttaaaattgatgagactctgtcttcattcgaagatgatctgataggaaggattcacagctttccccaagaatacaccacagtgcatacaaatcctcgaagccgcagaactttttcaagttgaactgtgaactgtgatttttttttttttttaagtaagtttacatgtagaagctcattggtagagagctttagatatattacttcccagggtggtgcatcctgtcaccatgaagtaggcatgaaatgctggagatatgcgttcattcaaagaaaataaaaaggcgcaattatgaaaagctctcaaagtgactttttattttattttttatttttacatggagtctcgctctgttacccaggctagagtacagtggcgtgatctcagctcactgcartctccatctcccaggttcaagtgattctcccgtctcagcctccagagtagctgggattacaggcacccaccatcacgcccagctaatttttgtatttttagtagagatgggtttcaccatgttggccaggctggtcttgaactcttgacctcaagtgatccacccgcctcggcctccgaaagcgttgggattacaggtgtgagtcagagcacccggcctcaaagtgactttaacagcaacttaaaggcggtggctagctctgccccattcagtatggtagccactggccatgtgtggcagttgagtgcttgaaaggtagttagtccagattgaaatgagctgttgatataaaataacatgactcccaggtttcagacagtataaaaaaatcttaattaacatttttatattagttccatgctgaaataatatttgagacatactaggttaaataaaatatcattgaagttcatttaatctgtttctttttacctttttttttttttgacacggctcctggaaaggttaacaatatgtaggtgaccctttattttcatcagacattgccgacctagagggtaaccactggagaggaaaaaagtacaatttggtatttttgtcacaaatccttaattgctagaactcacagtttaacctgacagttgatcaattgatatcctttgacttgttggaattttattctttacattcgtcttttaaaaagctttattttatgccagatgcagtgmctcatgcctgtaatgtcagcactttgggaggctgaggcaggtggatcacttgtggtcaggagtttgagaccagcctggccaatatggcgaaaccctgtctctactcaaaatacaaaaagttagccgggygtggtggcacgtgcctgtaatcccagctactgaggaggctgaggcaggagaattgcttgaacttgggaggcagaggttgcagtgagccaagatcgtgccactgcactccagcctgggtgacaaagtgagaccctgtctcaaaagaaaaataaataaaaagctttgttttaaaataagtttagattctcatagaagttgcgaagaatagtctatagtattcttcacaagggttctgggtacccttaacccagcttccccagtgatagtcacagcataacaatcaagtctgggaaattgacactggcatgataatattaactaactacagattttatccgagttctgctagtgtttgcatgtactcatttgtgtgcggctctctctgtgtgtgtgtagttctatgaaaagttataacatatatacatttggtttaccaacatcatagtcaggatacagaactgtcccatctccccaaagaaacaccctttaccttagtttttattctttgagttatatcttaaccaggttaactgagggtaattgtcttaggcaagttagtaccaaatgatgctcttggttccttgtctgtctttttgcccatccaacccacccttcacacatggccgagttatgccaaactttgcaagaggtgccaggtgggcacaaagaaaagaggactgcactcaaggaacttagtctttgaggccaagcacggtggctcatgtctgtaatcctagcactttgggaggctgacacaggcagatcacttgaggtcgggagttctagaccaacatggtgaaaaccagtctctactaaaaatacaaaaaattagctggccgtggtggtgygcacccgtagtcccacctacttgggaggctaaggcaggagaattgcttgaaccgcggaggcagagattgcaatgagccgagatcgcgccactgcactccagcctggtccacacacagagtgagactctgagacttcgagactctgtccccaaaaaaagacgcaaaggagctcagtctttgaagggttacagaaacagtttcactagaaggtgtgacattgtgtaacagaaatcggttccttaacctgccaaagggaagaaaatagtgcrgaatcttttctccaggtttcaggacccatgtctgttgtccttcctttaccttaacttcagcagggcaagaatggttcaagccacattagaaagcagttactttctcacccaattttaaaggagaaaggtaratgcggtgggttctagggatttcagtgacgtaacaggtgtttcccaggcattaagacctagtaaggtttccatttccrttaggtattatggatgcattccaagaatttaattactataacatcacttcattcattgtaattccttactagagttatgagaacttgggattgtgtggtttcttattcaatcgattaaaagstacttgctatagttttctaactagctatttatatgaaatttagtacttgtcaatatgtattaaatcaatacagttatatttatcaaagtggtgagaagagtttacatctgaacatagaatagattgcttgccttggccgggcgygggagctcacacctgtaatcccagcactttgggaggccgaggcgggcagatcacgaggtcaggagatcgagaccatcctggctaacacggtgaaaccccgtctttactaaaaatacaaaaaattagccaatgtggtggtgggtgcctgtagtcccagctactcgggaggctgaggcaggacaatggcgtgaacccaggaggcggagattgcagtgagctgggattgtgccactgcactccagcctgggtgacagagcgagactctgtctcaaaaaaaaaaaaaaaaatagtagattgtttgcctcagttgggaaaaaataaagttttaaggctctagaattggagtgactcagctttacttgaaaaatcccagaatagtaggaccatcatttagaagtttcgagacgataatattagggaaaaataacagcaaatgttacttgatagacactaaactctggggcatatgagatgacccaggctggaaaaccactggcttacataaaggtattgacagacccatgggtgttaagatccttcatggctactggggagaaatgacaggccttttgaaatcgtatcagtggttttccctgggatcactggaaakaatacccctgtttgacaagatatgacacatgctctgttttaattctgcatttgactaacagaaaagattggtgaagatcagactctgctttaaagttattgaagcagggtacaaggaaaaggggaagggaatagaggctgcagaggagaatgggggaagggggcaggaaggtaaaatttggaggtgcaggcagagtcaaggtcatgcctgaggcccaaccttcctgttgaagctggtgtttgattcaagctgtggctgagaacrtgcagctcatctggagggtagagttgcaagacatgggttcaggtctgagccaagccagaaactggagaaagcgtggcttctcaagactaggaatacctagattccagaggtggcgtgggcatggggcacattgtgacaagttaacagcaagatcttcagagctgcagctcacctgtgccacgatggtctcctaggagccctttcctgctgtagtcccgccccgaggggtttcacttcccaytgcctcttggtagccgtgggcactttggtgctctgatgatgtaacatggagattgtccttgtctccatcgctgtctttactggtgtatgcccatgaggtatgtcaaagtctgtatgtctttgtaataatgctggatcatttgtccaccttcagagacaactgaagacagttttaagtgaaaccacacagagggcatataccattgggacaagaggtctgaagtctatttttgagaaagagaagagatcaagtagttaacagccagtggctatcataataatggcacctaaacaaatccttcttttttattttatttaattaattaacttatttatttttgagttggagtcttgctgtgtctcccaggctggagtgcaatggcgtgatcttggctcactgcaacctccgcctcccaagttcaagcgattctcctggctcaacctcctaagtagctgggattacaggcacctgccaccacgctcagctaatttttgtatgtttagtagagacgaggtttcaccatgtttgtcaggttagaccggaactcctgacctcaagtgatccacccacctcggcctcccaaagtgctgggattacaggaatgagccaccacgcccggctcaaatccttcttacttttcctcaagaactcacttcccacccaaacctttcctattgtggcagctgttatcttgtccagcacatgtgtccrcacttggtattaatagctccatcttaggaactatgaaagtgaggggggtggtggtaatttgcatgaactggtttgggccagttatggtctgttacatccttgctgaaatggttggtgctaagatgagcacttggcttaggccagaccagtccctagcctgtggagaaggggcaatctcttatctgaaggcctaggagstgcagggatgtttatatgggctgctagcgcttagtttcctgccacarggagacagtaagaaaggtgacgtcaatctgagatgagagrgagagcaaaacagttcttttgaccaccttgaccccgaccttgaaataaggtggaactaataamtcccsctttgtgctggagcaagttttggctgagtttctgtcacttgcaaccaaatcagtcctatccagtatacctagtgactctctggtctccaaaggctrtgcctgctgggtactgagtgtctccccgaccgaccccatgatggctacagtgcacatcccttccagccaactctattgtgcacacatattcgtagggtgagttgggccccaggtagagtgattggctcagatcctgcatcctttcagggtctgactgtaatcacactggcatggcagggggaaagtgtattggatttcagagtcaaaaaccacttggtatgaaacccagctcattttctatgtggatgtccaacctgagccagataattaatcttggagatgacgctgcatacttcatcaagttgtaaagttgactgctgtgataatggagaatgctggacaggctgcttttcatgtcatgggttcgctatactttagttcccattatatcatcctgccaatccccatttgttgtttttttgggacccagggtatcagtcatctgatcattgtgtgactttctcaaggacctttacttgagtcttgcacctctggtccacaatgtccacataccagcttgatggtgacttgtgtcattctccatccccttgttaagagaaaatctactttatgagccctctttccaaccgcagtgwtgaggactagaccaggcaagatgatgccgctggaccactggatccagctggaccgctagaccacagagcccctggagcctcccaaggccaagcccgccagccacacacacctttgtgagaattaagaaaagatgccccctcctcttggggcccacagctcctccacctgggcacccagcctggtgaacagggtgcaggctgggatttagccctaccttgcttttggaccattgagctactaagttggagcaacaaggcttgggaatttttctttgatcataggtaggaaaggtaaaaaaacataaatctgccaatagaaaatagcatcgtaatgagtttctactatatttgtttgggctttgaaaaatatgccgccaaaatatatcaatgtatggtcccaacgttttaggaagttgcatttaaaaaatcttggatacctgttttgtacatattatatatagcatcccgtgtgaatatgttaattcctttttatgagtttcggycttttttccctctcctatacatgattgctgttttatagctccagtttggtggaattaacatagatttcccacatggggaaggttttgggtgaggatttagaacaaggcaggttcttgatcctcggaagagattcttatctgagrggggatttgagaatggcattgcagagtgggaggcgctgctgtgtggaaaaatgaactggaataattattagaacagttctcagaatttacaggatatttgatcataggagtaactttcctcaggagtgatggatggaatgcctgtacttggaatatttttaaattaatctattttcattacattgaaagtrtgacacacagagaacactaaaattggatgaggcactacctggaattatataaagaatgacaaagatgcggttatccatttattttctaggcaagttagttagcctctctgtgtttctatttctttgtttataaaagagggacaaaaataggacctattactatctaggtgacaggatcattcataccccaaacctcagcataatgcaatatactcatgtaacaaatctgcataagtacccccttaatctgaaataaaagttgaaattattaaaaaagaaaacgaaggccgggtacggtggctcatgcctgtaatcccagcactttgggatgctgacgcgggtggatcacatgaggtcaggaattcgagaccagtctggccaacatggcaaaactccgtctctactaaaaattcaaaaattaggcttggtggcacgtgcctgtartcccaagctactcaggaggctgaggcaggagaatcacttgaacccagtaggcggaggttgcagtgagccgagatcgcaccactgcactccagcctaggtgacagagtgagactccgtctcaaaaaaaaaaaaaaaaaaaaagaaagaaaacaaaaacaaataggacccatatccctggattgttgaggaaatacgtgaacatatgtggcacacattatagtgtctggcatacaataaatactttgtaatgttactggtgtyttcttaccgttattgtctcactggtgaccgtttgaaatgttgaagctttattrttacagataatggtggatatagtstcttccttgtttattttttgacagaatctttttttaaaaaagtttttatttgtttggtgagaatttacttgttacaggtctagtgctgttatagttgaatgttttgaattatgtaacttaagtgaaacataaagctatgacttgaattttgtggttagaaattttctcagtygattgacaaggatggcgtattggccaccttttgccgcagtaacaaacaatcccagactctcaaggcttgcaaaaataaatgtgtgtttgtttgctcataacacatgtggctgagggttggccrtggctccacagtcacrggtgggctttcctgggctcagcttctcacagcgtctccttgcagggcccaggctgtaggagatgtcatcagggcctgcagagggcaaaacctcacagaggcttctgttcatacattgttgtacctcatgtgtgcgtcatattgtcatatatcaatggcagtagccaagaccaacagccaagaccaatgtattctgcccacaggaaagtgaggcaaaggcagggagggaatgataattgtgaacaaagaattcacttgaccaaagatggttttcttgatatggttgccacttacctttcagtaaaatagcacttcacaaatttgtttaatgttttatctcaagctcccagaagtagctaaaaccacgaacatacatgttgaaaatttcaaaagggaaaaaagaaaagaaaggcacatctgagtcaggaaaacattaactagtcttatttctgagaatcaaaccggkggtcttttcagtgatcagtcaccccattaaccacacatgaatggcacaagtaggaaatgcctgctcagagtccctggaagaggtatccagatttatggctcatcccagacttctctaatcgaggctgttttccctctagatgccttagtcaatcagtaattaatttgaaatccaaagtttcattaagtgttattgagttctcgcacactgacatttgtagtgctatatttctttaaaatcacaaaccatttttcatactgtcgtttgcatattttaacagaaaagattgtggttctggtgtgaatgacccagttttctggatatatttacttgaatgtcataaacttattatccttctcttccacttcattgcttttctgcttttctgaagtattttgaaatcatatttaaaacatcattatagcctctgaattctatctaaagcataactaaactttaccgggtgactgttttcaaaacaataccaagaagctggtcttatttagatctagtcttatatcattgaaatatcattagaattcttatggaaaatatgttttggctgtttagaggatgctaggggctggaagtgagaaggtttcaacaccatatgggtatgtgagtatagatgcttacaagaagaagggtagacttagccaaaactaatttgggatttttgtttgtttgaattgttggagggtggatgagagtgaagacatatccttttgaaacttaatttaatttttatttattattattattattattttcaattttttatttttattattattattattttctattttttatttttattttttgagacggactctcgcactgtcgcccaggctggagtgcagtggcgtgatctcggctcactgcaagctccgcctcccgggttcctgccattctcttgcctcagcctcccaagtagctgggactacaggcgcccaccaccgagcccggctaatttttttgtatttttggtagagacggggtttcactgaagtagccgggatggtctcgatctcctgacctcgtgatccgtccgcctcggcctcccaaagtgctgggattacaggcgtgagcaacttaatttaattttttaaaacaatatatgtctctttggagtcagggtgtttgttacagtgatgttttgcagacaggtttattggaactgcttggtaggtgataggtttttctttctgttttttaattaaaaaataagattggccgggcgtggtgtctcacacctgtaatctctgcaatttgggaggccgaggcgggtggatcacctgaggtcaggagttcaagaccagcctggccaacatggtggaaccatgtttctactaaaaatacaaaaattagcctggcgtggtggtgggcacctgtattcccagctactcgggatgctgaggtgggagaattgcttgagcctgggaggcagaggttgcagtgagctgagatcatgctactgcactccaggctgggcgacagagtgagactccatctcaaaaaaaaaaaaaaaaaagatttatgtcaagaattcacatttctggcctctcttaaaaatattggaagacatggcaataattatctgggactgaatagcagctgcttctttttgggacaggtgatcacccccaaccccaaacccctacccttaactcttctactcctttggatgttatccctgcctggtttaaccatcaaccctctaactcccgatccttttaaacttcctctactctttttattcttagcacttagaacccactaacgctctatgtaactgtcttacgtgttccatttcttgtttctagactgtctccctccagtagaatgtgcgttctgctatacagcagtgctgtgtgacgcgatagcaggtcctttttaaacatctgttgaaggagaaaatgaaggcacacgtggccttgctgacatctgagtttgcaacttcttttatgccttctgctaactgggaccccagtgggcttccctgctacaccctctgaggttccccagwcctgccaagctgttccatccccagttccttggtgcctgctggtacttcmccctggagagcccagcccttccacttgttcagatctcagtctctcatctgggagggacagcttgagcactatgacctgtgtgaagcttttcccagtgctggcagactgactggaacctgctccttcattaaacctgacagatgcctccacctggcagttctaccctaagaccatgaacttcttgagggagggagatgtgacttttcatccctgggacccagcagctggctcacctcctactggttagtgggtgatgattggatggcttccgaatgaactcaggtgtcttaagtaccgttggtcctgacaccatggccaccttccagaaatttccacatgttaagattgcagatgcaggctggacacattagtgatttctaagtgctaagaaaaaaaaagagcggctcacacctgtaatctcagcactttgggaggctaaggtgggcgaatcaccccaggtcaggagtttgagaccagcctgagcaacatgacgaaaccctgtctctactaaaaatacaaaaattagccagacatggtgctgggcatctgtaatcccagctagttgggaggctgaggcaggagaattgcttgaactctggagacagaggttggcgtgagctgagatcgcaccactgcactccggcctgggtgacagagcaagactctgcctcaaaaaaaaaaaaaaaaaaagaaaaaaaaaagattgaamatgtggaatatgagacaaatgaaaaagattgaattccgttccaactgggcttttgaatttattttcgcacttcctattttttgagcccgggagtgcaagatgtaagctaagaaaagataagatgaaagtattgctctaacattctggcttccttctattagagaagaatgcaaatctttgccttatctcgatgatgggccccacttaaccctttgttttactgagagcacttttctgcagatgatcaagtggaatttactatgatggcctgtcaaatcttgaaataatctacctttaaggaagaaaagtttaactagatgattgtaccttttagccatatctacaattaatttgaatgtattgcaagctgtttaaaatattccattagtgaagaaggtaagcctagcttctggtaaatacactactaagtgtttatagtacatttcatattttacatgatttcctttataattctgcttatcttttcattctaattccctgaaggacatataaaagaacccctaaagagagtaattactgctgtactctttaaccaaggctccttttgcaaagagaaatctgagctgctttttaaagaaggccgtttttaaataaaaatgcaaataagctactttgtaacyacattaattacccacctagcctcttattaccatgtttgtattgtttgcaaatactatttacagtcgtgtggaaattaacattactggtcctgaggaaagattgtgttggggaggttgtgctttggaaccaattagggcgaaccttgtctccactgagactctggggaaaagcacagccttgcaatgtcaaataatagcattagctctgactgtacaggcagagtgctgtaattatattattggccctattttgcttctgcaatgaatttcattgcctgcattgtaaaatcagcaggtagcaaagtttctgctaatgatttaatgtactctctgatcattttggacaaaagtcatggtaagatccacaaggcaattttatcatccccactgactactgcctggtttaagcattttaagtgaagacaaaacatgattctcatctccttgtttcctggtgaattccttcccacacagaagagagaattacttgtctaatatataatttcaggcataaggagaaggtgatattgcattgcaaataatagcagttagtgggagttgagagccagctctgcaccagactcgtatcagccacttgacctccattattccttattccttggtacytctgcgccatctgtgatatcagatccttttttctgcaaggaaactgaggctcggcgatactaagaaactcagccagggtccgtcagctgtcaagtggcattgctggcacccagattgagggccatctgactccaaagccacctgactctttcccatataccacagtttctaatacgatattataccaagctttaatatgagcacacctcctggatgatgctgtaaattagttgcctcccaccacaccacatsaagtataatggatataatatgatttttcagaattcagctaattacctactgagctttacattttgtaacttttttgactgtccatcaaaatgtctttgggattaaaaatttttttcatatgttttgaggtcaatttgaatctgagtttaataaacgttaccatgaaacatttctcccatctttttaggaaatatctgtgaataaactcattttgtgatagaaggctgtgtgtttatccagttttcatcctaaggagagggggagaagggaaataatacttcacgtctttattgcatgccaaacgtttatagacattatatgatttcatcctttaataaccccatgaaaaggatgtcattgtcttcacttgacaaatgagggagatggcagtgcaatcaagacatactgacaaggagaggaggtgagcgacttgcccgaggccacgctgctgataccttggcagaagcagaatttgaaaacagagcccccatatgttttaactgctcattggaaactgactaggtcacatactcctcctccttccctgtactggtagtttttcttttattttttttttaaatttcttccattttctttcctttttacagcaaatttgtagttatggtggagcaaagggcagttttcactcctcttccctaaaactgtagtttaactaaaaagtggccactgtctcctggtagcrgttggtaagccatccagtctctgcaggcatctacgctccaggtctccagtctgaggagtctsgctcctrgggcaggtgcctctgggggtctctgccaggcttgtctggtcatgcagctacttccagactgattcctagatcttgcatttttacataggacatccccagcattcaaagaagatcctgggaactggattcctaccagaggaattagaatgaaaccaacaaaactaaaaacgacaccctcccccatcccccgcatccgatacacatgcaaggtaatatttgatgtcagtaggaaaaaaatccagtgttataggagacaaaccatagcaagcaatggcctctcacccttcccttcacaccctccactctgtccacttgtttgttccttcaataaatactratggagaatgggctctatgccagtgtttctctggatgttggctgcagggatgaacaaaggcaacttctaggagaaatttctgtttttgatgctctcgtggctgcttcctgtgtcttaatattgtgcttaaactgccacttcttcagctgttgatttcaggcactatctaatgacttttgctgttacgagcatggatttagctcatttttaccatcttccctagttgtatcaccttcctcccattatgtttgtaacttcagattttgtatatttcrcatatgtcaatatgtaaacattttatatatatatatatgcatkcacacacatgcatacatatatgtaatggtatatatacatgtaagtttccatttttgctcaaattgctctggacagttctttgctctgggagttctttactccctttctcataagaagaggctgtttgtaccctgatcaatccctctacctcttcttttcccctttcacccgtaacttctgctacttatacttctgccttatcatggtccataacattcaccttccactctgtagccataattaaatctcccatgcatcccactttgggaggctgaggtggatggatcaccaggtcaggagattgagaccatcctggctaacacggtgaaaccccgtttctactaaaaatacaaaaaattagccgggcatggtggcacgtgcctgtaatccaagctactcgggaggctgaggcaggagaatcacttgaacccaggaggcggaggttgcagtgagcccagatcgcaccactgcactccagcctgggtgacagagcgagactccatctmaaacaaacaaacaaacaaacaaacaaactaagaacarcaacgaaaaaactcccatgtattatctatggattgactgtaaaatatgagaagcaataaatatgttcatcactagggccatctagaaatttctaacccaagggtcaactaatctttccctgtgttgtatttcctgctctgcggatccrgcatcatgacctttgtactacccaggaaagccagtgttctcatgggctcttctcttttttatgctctaccagatgctagcactgtggcatgccattcgctcactagcagcttaaagggtacaggttctaaatctccttagtgctactcacctgttatttctgagcctgcgtagatgatcttcttttattcagacgtctgtgtcacatatacatgacatcctacccccttcccataaaaaaaatcacatttgtgaatgtctctcttaggctgagttccagactccaagatccctcttctctcttgtcagaatccagcagctgatggcatttatgtctgtagatttcactgtcaatgagtcattgacaggctaagcaggctgttggatggagtgatcaatggtatgagggaaaacactaatgtatgcaagaagagccatttcctagtaggaaaaatatttatgtatggagccacaaaggtgatcgcttcagtagaaatcaccaaggacctggtagtcaatgtgcaacctaattttctttcaaaagctgtaggaatggcaagggaggaaataaataatgcatttctttatatctcctgttttaagttactgagtgtcgccaagagatttctaaggccagacattgagtcagctgtaaaactggaaggagcaatgtttgctgactgttgcctcagccgctgaccctgatctcctctgcacgtagtaggcagcttaaaaattcctcgcccgacttctgattttcacgtgactcactgcttagttgtctgggtttgttttaattcctttccccctgctgacagttctttaagtggatgtctataaaggttggggcattcgctcttacaacaataggaaaagaaaggaggaaggaataaaaaagagagaaaaggaataaaaaaaagtttggtttagatgtctgatttctctgagcctcagtttcccagcatgtaaaatgttgtgagggctcacactggtcttgtccaggtgcttagtagagcatccattacaccataaagtatcacaaaaatttttaatatcatcattattactgtgctttcccttgagtttttttttttttaaatcagttaatccacatactggcagatctgacttccttgttttaggccctggggaatttttgttatctgtagagctggattaattttacagtgtggtgcctttgcccaaggtgaacctgtctgtttatagaaagtgtcaccaagttctgtcttgggcccgtccactcggttatatgtgctggaccctgggtggaagcactttgcacgtgtgcattcaygatgggctgtgctggaggggaaaacaggcatcactcccaaattctattcatgcaattaaaaattcctttcatttttatttgtgagagggtatgggtgcacagcagacggcaaacagaagaaaagcttttgattgaaaggtaaacatttacttctgccttttaaatagacatagcaagtctctttactctcatggaagcagttataaggaacatagagctgaagagaatatgaccatttctggtcttttactatgctcgtattaatccaccctggatagaagggactgtactatttggaaacacctaaataaaatgtttttgtcttaaggtgttaaaatgtactcattaatgtggcagtgtattccttttcttctgtgatcgttgaagtagggaaggaatttcaactaagaaccaaaatgattgtctgttaagacacttattttttgagaagacaaattaatataacattattatgtggggaatgtggaaaggctaaggttgtattgaaaacttattaagcttatgagaatattgaaagcatgaggaggcatgaccggaaggtattaatgatttgggcttgattattctaagactgtattctaagtctaaaatgttgataactaagacctgaaatgataaatgtttggcaaaaccaaataaatgagtagcaggttgaaaaaagaggcaagagagaagtagatatttatagttttctaaaacaatttagtcccttctggaagagagtcctacctcagccatgcctaccaggttgtgtttgtgggattatttctgagtcacccttaagctcatctttacccctctcccagacccccagtcccctcactgggcattccttggattatttatttatttatttatttatttatttatttatttattgtttgagacagtctcactttgtcaccaagtctggagtgcagtggtgtgaccttgrctcactgcaacctctgcctcccaggttcaagtgattctcttgcctcagccccctgagtagctgggactacaggcacgtgccaccatgcctggctaattttttgtatttttagtagagacgggattttgctatgttgcccaggctggtcacgaactcctaaactcaggcagtccacccgcctcggcctcccaaagtgtaatcctggattataggtgtgatccaccacacccagccttccttttgtttttgatttttcctctttaaactctacttgtaaccacccctttcctttcccaaacttttactagcttcttccatcctggacttgcaatctggctgaaaacctgctaaataagggaacaattttgacatggctcctgkactccccacaaacctagttgatyccagaccagtaatgtcttggggacagtgttgtcccatcttcctttctaggctgggctcagattactgacgtggaagagttgttggtcctggtgcaacatgccatgaccatgaggcctctggtagaaaggaaggaatgaagggtggttctccaaacccttggcccatgcctcatccttctgttcccttccttttccaggtacgtagctggtcaggtttcttaaattccgtcgatctggctttatccattttaagccttaggttgttggaacatagctaagttggtcaccttttcaagaattgaatctcaaaaaagccatgtagacctcggttgtaaccatcacattcattgacttggttgttgatctgtttgtcagatcagttttctgtttggggaacatttttgtaagtgcatgtatttcagcttttaacattttaaaaataaaatttcattgggaaagaaatttcattcgactggagtaccaggaacttagaatgaatccatttgtcagcagtatttataccctgtctaaaagagtgtcctcccagttctctgtctctgtactgtgtccccactttaaaaaatagctcaacctctcattatatttgcaattttttgtttttttcattgcctggtgggtttttttttttttgtctttttaaatgctccatgtagaaaagaattcctggaatagttcttggaacagcgtaggtgaataaatgagcaattattttgtcctcagcactataactgatttgagaaggtcaaaacagaaaataaaaacatgtttcagtagtaccagttcctgcacaggctgtctgccaactatggaagtaaagggaatagaattaggctgtctggattatagtgggaaaacaaaacacaatcacatcctgcctcagcctatccttgaactggtgtctttagaaaggggaggtcaagtaaaggccataaggctggatggtggggaagaaagaggcctgggaacaggtgagaaactgcagagcctggcggagttcatttaacctcactgtggttctgttggacttagtgcaaaatcaagagacccacctttgcctgcccatcctgcaatggtttggggggccccaagtagatgactggggaagatgactgggaaactgcagcactggttcatgttctgggacaaatcaatattaagcaagtttaatgatgggtaggttcattcaaaagggaaatatgtttcaatggagaagagaaatttgttaggttgtataataaatattttgagtgtatttggatagaagtttatgacggaaaaggcaaaattctctgtgtctttatggggagatattcgatatgttttttcttggcagaaataaaacatattcaataatatamttaggcaaacttgtkttasttgacaagaagaccgtatctccgtctgcaagatgaaggcaagatcaagagatgtcagttaacattcttgcgaccacaggtagggaggagaactggggaggaatttatggataggtgagagcataaaactagatgcggaagggatgggggagcaggtaaaataatgaggctcaatgttcaagaaggtcttgggcaagcgcgtgctagttattttcctcactggtgtggtcgtgacagatgaatcacattttactctcctccctttctcatagtatrattacataaaggagaccttccctggaaagagccctgtgcatggcttttgagagtgggcctgggctaacagtgagtgtggaagcttgctgccttgaattctttccaattctggagagttgatgggtaacaagtgtgtatctatagtctgcttggacatggcrgtgtggccactgacacgttgtcagccatcccctcaactccagggacaggaatggtgagaaggtggtgagggcacagtctgcccggagacgggacagtttgtactacctgtagcaagagcatgtctttgagagccatagcagctggcttcctatttggagagaacaagaatgtgaaaagctatttattaccagatgtgggcagaccctccagcctttttttgttcttttaaaccctaatctctttttaaaattttttttatttttaatgtttatgggtacatagtaggtgcttatatttgtggggtacatccgatgttttgatacaggcatgcaatgtgaaataatcacatatgaagaatggggtatccaacccctcaaacatttatcctttgtgttacaagcaatccagtcactcttttagttatataaaaatgtacagtttaagttattattgactatagtcaccctgttgtgttgtcaaatagtaggtcttatttattccttgtatttttttgtacccattgaccatccccacctcctcatcaaccccccactacccttcccagcttctggtaaccatttttgtgctctccatttctgtgagttcagttgttttgatttttagatccaagaaacacaatcttagatgcatagtaggtgcattctgttgccatctgcatcatgggactgcacaatcggagaggcaggaaggccctgagaaatacctgattacacacctgcgtgctgggatgagaaatatgaggggaggagagaaaagatgagcctcatattgcatagcaagtctgtgatggaagcaaagttagaccctgttgatttttatgtcttacctccttgccattagttaggtaaatttagaccaccatattttctaagatcagagaatagagaattttaaattctagattcttgccttgtggatgttgaaaagaacaattaaaagttatttgggatatccaatcagttaataaataattatgaatgaataaactgttttgttgaagacactcttatggcagacatgaacatggggcttaaatcagttctgacatctagaagctcaaatccaggaggcagaggagttggatattaaagaactctgtggtgagctggacaggatgacatgacaattatggaagttcagagcacatagcagtcttttccagtgatggggatggaatgtgggggtcatggaagactttgtggaagagttgcaagtagaattattactgttgaaaagagatggggagttaggtagacaaacagaaaaaatgccaccaaacaataagttaggatagaaaaactccacgtatccatatgtcagttggcccatctgttcgttcatacatcctttcattcttctatccatccaaccgtccttgcatccatctatccatccacacaaccacttattcttcattcatctgcccatctgcccacctacccatccacccttccatacattcatctagtcatccccatccatccactcatctatccacccatccatccacccatgaatctatccatccatctgccaatccacccacccttccactcacccacccatccatacacacttccatctgcctttccaattatccacccttccatccatccatctacccactcatctaccctttcatacatccatacacatccatctgttcattcatctatccatccatgcatccttccttcgttgttttcttccttctatccatctattcatctacccaccccacccacctatccttcacccatctggccatccatccttctacccacaccttccttcctaccttccttccttccttccgtccttccttccttccttccttccgtcctcccttcctcccatcctcccttccttcctcctgtcttcctttcctttccttccttctctttctttcttttgttccttcctttctttcctccctccctttctttcctccctcccttcctcccttcctgtctccattattaacttgctggtattttgtttcaccattgcattgtgtttatcaatagacgattaatggaagaagagaagaaatcaggtgaagtctttgtaggatctagaatgtctaggctaaggagtttgaaattttttatactatgttctattgggaaccatttcagggttttgagatatagtatgatataataacagctatgctaaattctttgaagttattggtrgtggaatatcaatccagaatgaaaataaataattttggaaatgagcctgtcattgaaatatactttatttctcgttaaatgtcccagcaaaagtattttggttgttaaaataaaggaacaaccattagaaaggaggaggagaagaattagaaggaaaaaaaaggtaaaggtaaagtaccttggtattttagggtttctaagattaggaactttaaatgttgaccccattttggtctttaccttcaaaagacgggagaaagactgagagaagtttctaagctgatgctgctctactacctggagtaggaatgagaaaccatctataaatattacctttggtgtttccatcaaaaatttagaatttcaccctattctatttttaattctggtttaagactgaaggggttcttggtgaatacttttgtagatacaattaatagttatgaaaatcattactgattacctccagggttcagatattgggctgaatgtcttctctcaccatcagaactaccttttgactagagtgttaattattaacatattttagattagtcagacaactgcaatatttaaggaatacgtccaaggtcacacaactaaaagaagtgacaaagtacggtttcagacccttttagtcttttctgtgttgcaaaattgagataatgataatagctaatgatacctctcccttactgataattgaatgttttatgtgaattaaaaagtttaatctgcatagtgtttcatcaagatagattccttgttatcctcattttggagatgaagagactcaggcatgcaaaggtgaagtaattttcccagggccagagggctaaggaaagggagaattgggattaattctacattgtctactggtaatacctattgctcatttttaccagttaaaactatttaatgagcatttgcccactttctaaaaatatgatggtcttagttacccacatggacctactctatcccaggcagatgccacaaattattttgttttctttttgtatatatttatgctgtttcctcatttttaaatagtgggctttgatgactattcttctacataaattattacatatctgtatcatagaatcttaaaaattatttgattcaaatgtatacataattttcatatccctgatagatattgccaaatatttaccagaagtgaatcaagtagtttttctaccaacattatctaagagggcttgtcttattacatctttgtcagcactaagtattatctcccttacttttttttttttttggtaatctttgttactttgttaggattaaagtagcttctcattttaattttcactcctttaattgagaagcagaacgtattcttttttggtgacttgtttcagagtctctttagtttgaagatacaatagatgtagcatctgctatatccggtaacaggataacagtgcattgctgggatgatgaggctgcagtgggctgtgattgtgccactgcattttcagcctgggtgacagaggaagaccctattacaaaaaaaaaaaaaaaaagggtctgttatcaaccatgcttttttattttattttattttattttcctgtttctgagttagagtctcttttgctcaggctggagtacagtggcgtgatcttggttcactgcagcatcaacctcctgggctcaagcaatcctcctagctcagcctcctgagtacctgggattgcaggtatttgccaccacgcccagctaatttttgtatttttagtagagacagggtttcgccatgttggccaggctggtctcggactcctgacctcaggtcatccgcccgccttggcttcccaaaatgctggtattacaggcatgagcctctccatctggcctcagcagtgctcttctggctagcttgatcatatgccaatgttttattccttcgtggagctcagagtaagcttgttttactggacgttttctataataaagctaggggatggcgaatcattctaattaccaaaaagctgtctttgataacaatgtaggagataacgaaggcagaaataacatttgagtaattctttgccattctgtctctgaatcttgaaataaatactcttgaatttatatgttcttggtcctttaggagtcataaaaacataccgttacatatgtatatgaaacggtgagaaactgcgtatttattaagagtcacgacccttaggactagacaaatcaaattaaatctcataaaaacctgttatggaatatgaatacgtggcactattttttcttttagggtgtctttattaattttgtcatgtttaatatgttgcagttgcaaacaaaggcataaatgcatgcgttcattcctaattaatttatgtaattgggttttataaatttagctgtttaggaagctgtgcataacacactccatttactgtgtgctgtagccaataaaagcataatagaaagaaatatagtttgaagctcacttcaatggtaaatatagattagttgtaaatgatatctttgtaatgtttattttaaattttgcagtgctgcagattttctgaacataccaattaatgttcttatttgaaataatgactagttaattactataaattctaagtgctccatctctgacaattaaaaattgtcttacagctttttatttatttatttattttttttagttctttccaaattatattaagtgcagcatctggggaaagaagaatgggaatggaaggagtgtgtttaaaatgtgggtggttttgtcaattcctattgggaatgcttgtatttgaatgtatatacatatgcatatttatgtgtaatgtctatttcatgctaaatagggagtgatcaagttgaaaaataagaaatgctgtttgaatttttaaaataggttataaattataacatgaaaatcaaatacaatgggtaaaaccagtaaattttaaataagtttacatttgttgtcgtgatgtgactgtgacgttacctgagatctcagcaaggagctctgcagcccgaaaagaccaactggaatgatttgatcagaaagggaatgggtattaggctgctccactgatactttatccacttcgggagagagagccctgttccttcttcatctagctcaagccaactgtcagaaatgcatgtcagagctacacaattctatccaaggcattaactgttgtcaagtctgttttttatgaatatgtttcaatataagaaattgtcttaggyccaaagtgaaacgtcttcctccttgactcatagcaagctcatgcaggtatttgaacattgttctgtataatatgtgcacctttgagaaatcccatgattcttgctattctttgtaaatctaataccttccatccagagagagagtatacatgtggagtcaattgggagtaccttttgtatcctctagtctgagccttacaggttaaaggagaatgttggatttgcttttgaaagtatgggcttgcggagattaaaaaaaaaaaaaagaaaccttgaataatcatgtacaaatataaatactgtatgtagaataagtgtaatggatcacatttatgatgaaatatgtatgtctttccaagggtaagaccttcataattcatttataagttaccttctttctcttacatgtaagtagcagaatagtaattttcttcgttctttctgaagaattgccacacagggaatgaaaagaagaaaggataaacttttcttaaacagcagaatgttattcagagataactggaaaaaagtacgagaaaagccaaaaagaaaaaaaaaaattgtgggtcctggtgatgttggaaaaatgacgtgtgagctgaagttccagacgccgagcttcatctattttgtcatgttatgacagaaatcattacaagggtgataggtttatttataaagacttgcttcaatattcaaagtacatctattctagcattcctcattttgagccaggctgtggatcaagatgaaagaaaaattaaattgtatattgaagagctcttaattgagccatgctgtatttaacagggaagcatcggcttcaggcagtcgataccactgaggatttttaatgccctgcatcatgagactgtcagtttgctttggagaatgcaaacaggctaatgacaaagccctgcaaacttttgtagttgctgctggtctctttggaaggcaagtgctaatttacccacagttgaaacctgacacacacacgcgcgtgcacacacacagacacacastctctctctctttctctgtctctctctctttctctgtctctcataaggaactaaatcctgcgttttctcaccagagggctaatgacacactgcttagtcacccaaaacctgtttcctaaggagccactttggggcttgtttaaagtttttaatgtaaggcattatataatattagatttcccctgtttttccttaatcaatgtaaattcaattgcatttcagagggtggccaagtggcatttcatcatctctaatatccatttaaaaatgttaggtctacccagttataattctccaaagtagcctatctgtggtttaatatgttatctacattctctaaggcagtgttaatttccttttgtagttaatctatcctactaccaaatttagtatatttatagttaaagattctgttaagagctaagtgatttaagtacatctgggataaagtggccttggctttaactatgaaacaaattttctttatttcattctcttcactgataaatccatagtaactggaggcatttttagaattgtgggcaatttcagcctctaaagtttgattaaagatacttcagatattcctactgagaggctagagggctgaaaggaatttattttgggttctggccctagtgcagctcagtggaagagaacagacattgtgagtttaattcccacgctgccaatttcccacgagtctagggtgggtgttacttctcaagaaggcgatggtagaaccgctggagacttcttatggctgtggcaggggactcacacgtcacaaggagtccagaggcatggctttgaagagctcttttcattcattcttccttttgttcacttgtacatcaaatacatgctgtgggcctactgtgtgctgagcactgatcttgtcaggttcttggggaagacttcattgctgaggtgacctttgagctgagtgtatgagtgcaagagagagcgatcacacctgggaactgcttaataaagtccccggcatcttgaagccacttgcagaccttggcagttgctgttgctcctgctgctgctgctgctgctgcattgtcaagactacattgatgtcttggaaatatagaaaaaagaggmtgctggactgtgtgcttagaatcwgtgtgctaactctgttaccaacaccgtagagaagtggttccagaaggaagagttcagggtgagaatgaataacggagtggctttgcagtgggaacctggctttgcagcacagctaggattggagaagatcttcccagcagggagaagaactcaaagaacatgcatgaagggaggaaggttgcaccagtgggagggaccagaatatggtgtggaaagaacgaggttcaaatccaggctctgtcattaactgcccctaccctctctgagctgagtttgttttggacactggagataatgcatgttaacatcctggtagctctatttatttgctaccatggtacataatcatgggagctctatttatttgaacatcttcttttgttattatttggtgtayttgggaaaggcatgtgggagcagcaagcaggtgagcatcctgtttggaatgcagggccgggaactgccctgcccagtccagcctcattccagaggctagcacctggcctcagctgtagagctgctgggagcatttcagctctctgcttctttggcagtctagtgctgtcacagaaggaaagctcactccatggaaaaggggggattgatttcttctctgagggcagaggctgatcartctaggctggtaggaatagatgtaacctcagaggaaacaatttgcattggcgaaagcaagtcaatggccatccccaaattcaaaaggacagggaagtgtaatcctactgtgatccctaaagcatccaggccccaggaatggtggtgatttgccagggggaaatggaggaacaaccccttctttgactacctctgtagtttatattggattctgcaaagtcccatgaggactgatagatgggctgtgtctgcatttgaattttgtagctgaaatgtgggtgagttcacctaggtccccttcatgacaaggtggtgagaaacattttcttgttctacaaatctgaattaggtccacgaaagagggtatgcagcatagagaggaaccaaaaaggacgcaagatttaggatagatattgccccttgggaggcctgcctggtctgcccttgataactcatgaacagtctggtaatgctggaaggcaaagtaaaagccaacctcttgagaaagacatggaacacaggatggaacttgaactgcttaaaatggcttttctcaggccagctgcactggagtgtgctgctgtaacaaacacgcccggatctcagtggcttagcatggtgaattcatttcccattcgtgatatctgaccacagatgggaggtaaggggctgtgctttaaagtcattcatggatctggctgggcccgatgcctcacacctgtaatcccagcaacttgggaggtgggcggatcactttaggtcagaagttcgagaccagcctggccaatatggtgaaactccatgtctactaataacacagattagtcaggtatggtgacgtgcacctgtaatcccagctactcgggagactgaggcacaaggattgcttgaaccgtggaggcagaggctgcagagagctgagatcatgccactgtactctagcctgggtgacagagcgagactgtatctcaaaaaaaaaaaaaaaaaaaaaatctttcagggatccaggctgacctcagcaccatctcttacatgtgcctctgttctttccctaatataagggagcatgggggattagtgtctggcttaagcacttccactcagaaatcttgcttctccccacaatccattggtgaaagcaaggcaatggtcatgccccaattcgaaagataagtgcagtcctactgtgtgccctaaagaattgaagatcaggatacttatgagcagcgctcacaactgccatagtggcaatgcgaatggcatctatttttaatgtgactgagaaaataattggtcagatattgcaggatttttgtgggggagagggtggaaaagaacttacagattaaaaaaagaactggcatagcacctagattttaaacagaaggaaaagatgacattggggaccagagacagaaatttcacttctgtgccatgacaaataccagggagatgtaattgcaaaatgaagctgcaaatgtcttacccagggaactaggtgacaacctgcttggcttcatgaagaaggaataatatccaattaggctaagtgtattcggtgcctgagtgacaagccctggagacctgagggcttctggggcccccagggcggtttcaggaggctgtctccagacctgtccggggtgtgagcatgtcacgctgtgrcccgcgcctcccctgtacagctgcctctgctcttctaagcactgaaatgagaggtgtaacctgtgttccagagtctgcgcctcccagccactggggcaggggcacctggcccatcagacttaccttgcctcccctgctgcccatgccctgctgcctagggctgggctcatgactgggtccacatcagctccacattgcagactgaccccctggaccctcacgtctcaggatccctatctccctgtcagtgctttgtcacccaaagtcaccgcagctcctcttgagtgctttcaagatcagaccgaggggtcctagttcaagctaattcctacctgtgcgatcactagccaagtactgaacctctctgaacttcaattatctcatctgtaaaaggtggttggtttgtaattgttcctaccycttagggcttttgtgagagtttagatgataaaccaccaagcaacagtggctggcattctgtgcacaatcgawgtctgctgctgtcagctctgtggtcgctgtctgcactcccacccctgtcatcctccaagtctgatctcctcccgaagtctcttcctggacctcagccctcagggattgcacctccctctgaatatgctgtcccttctaatcatgccatttagccacactgcctagcactttcttttttgaatattcgtgtcccaggtccctgaaaaagttgctaagcctgctaaaagcaaggcaaggcctttctttctttgtaaccttaatgcccagcaacgctccattcagtttgaccctcagttggcttcatactttgattttatgtctttatttgtttcttaatgagctactttatcattgtgaaaacagttaaatatcaatagtcaatgaataaatattaccaaaaaaaaaaaaaggtttgtcgtttaaaaatttggagctgggctggaaactagggatactacttggtatattttagttctactgatatgacagtatttgatacttaatcatattcaagcagctttacagagactaccatgagaatgggttaaattaagaggattgtctttgctgtttagccaatatgggccaaagttcagtggtttgagacatggcggggtttggtagtagatgtaggatattgctggggaaagagtgttagaggatggaagattgcatgatatttctggctttgctctttgactgtgtgctgtttgtaaaatcacttaagtcccatgggtcattttcttccccatatcaagcacctgctatgtatcaggtgttgtgctcacgtggtgttttatgcacagtgtttcctctttgttaatcctcatgatgattggtatggtttggctgtgtccccacccaaatctcattttgaactgtaatctccataatccctacgtgccaggtagggacctggtaggaggtgattggcccgtggtggcagtttccctcatgctgttctcgtgatagcacgtgagttctcgtgagatctgatagttttataaatggaagtttcccctggccttcattctctttcctgctgctttgcgaagaaggtgcttgcttctgctttgccttctgccrtgattgtaagtttcctgaggcctccctagccatgcggaactgtgagtcaataaacctctttcctttatacattacccagtctcgggtagtatcttcatagcagtgcaaaaacggactaatacaggttgggcacggtggctcatgcctgtaatcccagcactttaggaggccgaggcagatggatcacttgaggtcaagagtttgagaccatcctggccaacatggtgaaaccctgcctctactaaaaatacaaaacagccgggtatggtggtgtgtgcctgtaatcccagctatttgggaccctgaggcaggagaatcgcttgaacctggaaggtggaggtttcagtgagccgagatcatgccactgcactctagcctgggtgattccatctcaaaaaaaaaaaaagagaaagaaaacagattaatacaatgatctgtgagatattgggactgttcttattcccatttcacagatgagccactaactggctcctggcaggacagtgaataaggggcacaacagagacacaaacacatsgctaaccaatggtctcatccgtcagccacactgcctgtctcagcatgggccctgtgtggaccattccatctcaatttgtttctgattcttgtcaattaaataagaacagctgaaaagtaaaataataaatatatacataaaaacaatggggggagtaataatgataatagatacaattttttggtctttataatccccagagcctggcttaattattttaaagtaaatcaacactttgaacacttgcaggttagaaaaccagtggactgatggatgcgttacagccattgtttccaagtgtattagtttctgctggccgctgtaacacattatcaccagtgtagcacctaaacaacacaaatgtattgtctttcagttctgtaagatagaagtcctacagggttctccttgggctaaaatgtagttgttggcatttctttctggaggctctgggggaaggtcgttccttggccttttcccatgacgtagaggctgacacattcctctkctatggcctcttcatttttcaaagccagcaagattgcatctctctgtctttcttttgtggtcacattttaccaggactcttctcctgcttttttttttctacctttagggatctttgtgatttcatttggcccacctagataaccagggtcctctccctatttatttttattttatttgtgagacagagctttgctttgttgcccagactggagtgcagtggcttgatcttggctcactgcaacttccgcctccagggttcaagcgattctcctgcctcagcctcctgagtacctgggaccacaggcacatgccaccatgccagctaatttttagtagagatggggtttcaccatgttggccaggctggtctcaaactcctgacctcaagtgatctgcctgccttggcctcctaaactgccgggattacaggtgtgagccaccacacccagcccctctccctattttaatgcgaggtaattaacaaccttaatttcaccggtaacctgaattctcctttgccacgcagtctaccatattcacgggtttcagggattaggacctggacatctttggttgggaaatgggcatcattttgtctaccacaacgtgagagcccattgccctgcatccacagtcataaaagtctgttcccttcctccctgattcttcctaacttctcctgcctgccttgcaggatatgtggagttatcagttcctagcaccactggccaaagcgaggatagctgattgcactcctactttcctgctggtggaaacagcatgtatataggtacaactctggtgtggggaaaatgctaaagatataaagtagaaatagcctttgtgtgatgtgagcagcagaacaaaaatcgagggtgccaaataatcgtatgaagtggtgaactgcctaagatggaatattgctgttcctaaatcctggctgtgttgagacatgtgatcctgccgatgagatgagagctgaaccactctcttctcccagatgctgggcttccgaccttaatagagaccgagaaacttaacagagggctcagaagagaaatctattgaaagttactaggtgccaggtgtctcggaaagtgtttaacacatgcctgagacgttaaaggcaagattcatgcattctttcagcagacagtttcttcacttaccggggaagggggtgtaatatatgggggtatagggataaataattctgtgtgctgtgcaggccgtggagactcatcttctgcacaggtcaagttctgaagtcagcatataagctggaagtggagtgaagtcaaatgaccctcaaagatccttccagacttcatgcccttggcaactcagtttggacactcatatgctggtttcttccttgtatttatgcagcagcctccttttccacaaaaagcagaggccaacgtatctcaccccctcaatttttttactttccctctccctccctgtgcttgcctttcttttcttttcttttttctttttaagacaggctctcactcttgtcacccaggctagaatgcagtggtgcaatcacagctcactgcagcctgtaactcccagactgaagcgatcctcctgcctcagcctcccgagtagcttgtactgcagatgtgtgtcaccatacctggctgatttatacttayatttatgtatgtgcatgtgtgtttatatatatatatttgtagaaatgggattttgccatgtttcccaggctgggctcaaactcctgggtttaagcagtcctcctccagcctcccaaagtgctgggattacaagcctgagccaccatgcctggcctttgcttgcctttcttaatgtctttgacaattcatgtaaatgtgtgtatgatgtaactctataggactaagggtgtgtgaggatgccaggaggctgttggttgacaggagtcatgatttgactatatgaggtcacagaaaatgctttttaaaatttaccgccaacccacaggaaaactattctccttcttctaaggaaaaaaaaaatgtcacgataaagcagctacattaatgacaggcacatcaaggttttaacgtgttctctagatttatgatgtgtagcgtggtctccattctagaaagcaaagtagggaaagcacgactttggggccagggccctttctggttcagaatgtccctggccagtgtgcgccgtgcagtgtggaagcacgcttcggtgcgcrtgtaagtttacgtgctatctgtagggacagtgatttttattcattagagtttttgagtctaattgtttttaaactgccacttttgtttgttaaagatacagatgtctggccatagaggaaagcaaggtggatttatcgttgcaattagatgcttcacaatttgaaaacttatcacttaaattggtgaaatgtcacttttatgcaacttgatgtttagaagtccttggcgtccaggactaaagtcatgtgcaatttaacaagatcttggtgagataaaggaagttgcgcttgaggaaacattgaaacacaccagatggaattttccarttccctcctacatgatagagactaggtgaagggagatagaccacaaattgattttgtgtaactcttaaattaagtggagcagagttaaaaaaaaaaaatcactggatttgaagttggcctatgttagattactccaaggaagttagttaatatgttaatatgaatctagatgaacattgagtgttttrctcttcttgttaatttgcgccatctactaatctctggacaatggagaaaaagtcgtaggttatgagttttttatttatggacattaagcaatatctttaaaatgtaaaatgaagccgacaaaatgcacagccrgataacaacaacaaatctaatctaaagtgacaggaagagactctcccagacatttttctctttaatgtaacatgactttaaattgatgcaaccccacagtgattgaaaaactctcagagcttgtctcctatgattacatttctgatctgtacaacttaattttttaactcggtgagtctcagttttgcgaatgaacagttctcttttgctttctctctcatattatttgggaagacattatttggcaaccaggcagataaagctctgttaccacgacgaatactgagaagtcctaaaacaataaagaccccaagaactcaccctggaatatgtacctccaaatctcttctcttttccttctctccttctctttgtttttctttctcttcctgttctcttgttttatcttgacttctctcgactgtggtgacggtttgcatatatctgcgattgtactgaaacttaccaaacattgtacgttttaaatgggcaaaatgtatttgaactatatatatcacaataaagctataatactcttttaaagtgtctcctgaatcattaccagtataattattctgtgaactgtattttgatgaattcagaattaatttaaaatggattatccccctgtagaatgggaggtaatgctgaatgattgtgaatgattgtgaatgtttgtttattcggggtactccctcaaatttcttatccagtggtgtctagaacatgttgggattttgtktgatagtttcttgagttggaaattgcgtttctttggcctcccatgtgggtatcaatgagttttacatggtttaaaggccagttatgtgatggatacttctattaccttatgtctttctgatttcatacacttaaatgtacagtttttatcttccttcaaaaccttatttttccragcaagttttatttattcactttcagtcattactgaagtgaataacaaacatataacagatgctattttgggtcatagctgttttgctaagtaatacttaaaggctttctgactatatttttaatttctcgacagtctcccatggttattttctgatcataacttgaaaatcaaagctttctgttcagtttaaccatcttttaaaacccagtggttttagcttgggtattaacctttaacatagctagcgaaaattgaacatttttatttgaaatatgcttaatgttgtcttgtgtaagacaaaaagtttagggacaagtgaaccatttacttttcttttaatgtggaaagcagtttacaaatgctggtatgactaacaagaatgaaaggaccagaatggcagttctgagctagaatgtgatgagtaagtaccaccatagttagcggctagggaagggaggttgttctacagagaaacatgcycatcatttcttctgttacctggtattcactctggcaatttctttttggactcattctaaaatcaggattaaggatatccactgagaagcttgcatttattactctaagcaagaaacttctatttaattttttaaccatttgattcatatgtatttagattttaaaatttcattttctcttatccaaatgtatcatatatctttaagtaggtgaatcttggagtagattttattatatatcacatcacagagttaagctcggttcatctggattttaaaaatctctacagctttgagaatgactttgaaacactctttactgttggagcttaaagaaaataaatctctaatgtcctctgtattaattcacctgcttggaaagttagagattaaaaggtttagtaggatttttatattttctataatttctatttgtattggagtaaactgttcgttgtatggagtggcttagctttcataaaacagaaagattcctatattgagaaaagaggaagaaggaaaaagtgtaatataaatacataaaacttcctctagctttcttgtgttatgtgtaaaggagttagtacgttactttaattgtgtactttgaagaaagcaatctcctatttccattaatggtggactctgtgggtagagacatggatatttttccttttataagaaaggtcttgtctttcctcagaaggcattgtgagcaaaataagggaagaaaaagagamgtagataagaaaaacraatcacaatattgaagcaggacccgagtactatagccttcctcatattttggtatctggaaccgaggttgctaattaatgacccaagagctaagccttgtttgatgaaatgcaagatgtaatacacagattgccttggagtgatgtgtgattattaccatccattcatgtgtaatcccgtatttggaaggtttgtaatttgtttttgacacatttctctctgattttatacactcatgcatacaggtctcacctccctccaaaaccttatttccaaagcagactttgtttgtttggtttgggtaattcattgggccctatttgtcttccttatacataatctattttcttactgctgcctctgtcttccaaaccaagaatataaagaatgaagcctggggactggaacttaaaacttctgccgagaaaagaaagtcaaggcctgtgggctcctaaaacatcctgtggaattcgcctcagatgcccctccatttgcactggtatatggaggatgtttgaaaaccaccagaacctattgtgtactttggaacaatggcattttcctgcttgattgtgaagatggccgctggaaaagaagccaactcccagggggcacgaggggctaagctgtctcctgggaagtttgagggaggccaagtgttttccagttcatttccaaygcgtatttcttcagggccaagggcccagctgtgcctcattaggggtgagagtttggctgtgacacgacttaatagaaaaaaaaaaaaaaaaaggagaagtccaactagctgagtggcaacagaacttgggacaacctgtgcccacagcctttcatgtcctgtaatgagtgtgccatttgctcactgggaggagaaaaaaatgacagtatgcaacagtcaactttttcctgaagaaagagagaaaaaaatacatattttgcagccgagacatcggggtacctgttaactttaggcacagcgctagtgtcagccctggaaagagactccctgtgaacagcactttttaccatttaatcagcctgtacttcttcgtatttatagccctggcgaggctggcccattgttacaagaggaaattgtgatgttcagcagtttataccttgggagctggaagcgtttctccatggtgaatttgtaatattaattggccatgtcagttcatgacaaatgtagtracatctatttcaagtatttcagttttatggtgctgaagaagtgacacgcgctccagataagtaatctcacaaaagatcttcccgctcgctgtggagcgcctccagaacatgctctcagaggagatgcaaataggctcagggttcagggggctgtccccttccttttgctcaaggctcagaggggagccagaggaatgcagggagggacgcactccctgtcattcccctttcagtctcaggagattctggttgaagctctggcatggactttcctgcccaagaagtgtccttgcggtgatcatttatgtgatttgggtacctgctgcttgtaggctgtgactgtcagtagcagaaataaatatattgcctttctcactgtgtacagtggtgctgtaccaagggtgactctgcccatcaagggacacttgtctggagatatttgggttgtcatatcttggaggagaataggctgctattagcatctagtgggtaagagcaagggatgctgtagaacttcctacaatgcacaggcgcatcctacaacagagaattgtctggccccaaaagtcaatagtgctgaggctgagaaaccctgcacttgtgtggaccatgcccttttatgcttttcaaccttgaagcactaataggtcagagaagaatgccagggatgtgttgatgggtctgcaagaggttgatgggggatgcttgagctcctaccaagtggaaggtggtgtaggcaaagagaaggatgcataggcacattggacggtggaaggcaggggctgctgaatgatgtggcaggaaacatgcaaagtgctcagcgtccctgggcggtgcagagtcttgggaagcaagaggatggagccatcctttcagtttccagcctgggtttcccaaaggagagggtgtttgagttcagtggcagagagagtggggaagagtgttggagcccagctgagtggccacctttgtcaaatggagctgagaaatgattttcacatggctggcgtaatggcggagtttccaaaacagcagcacaacaaaatagccatttacatgtcaagactatattcatagaatccatatgtctaaggtggggaagttgtcattattcctgttttatagatraggaaacagaggcccagatggagtaagtgactgctgaagtacacatgatttgtcagtagaaaggaagagaccaaaggtggcatcaactttatctttccttcttttttttgagactggagtcttgctctgttgcccaggcaggaatgcagtggggtgatctcagctcattgcaagctccgtctcctgggttcacaccattctcctgcctcagcctcccaagtagctgggactacaggcacccgccaccaagcccagctaattttttgtaattttagtagagatggggtttcaccatgttagccaggatggtctctatctcctgacctcgtgatccgcctgcctcggcctcccaaagtgctgggattacaggtgtgagccaccacgtccggcctgtttttccttctttgttaagtggaacaagtcatttttttggtggtcatttccaatatgtaattcctgataacacacgtatatattatctctttaaaaattaaaaaaaaaaaagccagccaaaaaaagaaaatggaagtgttcaagaaactgccttttttcatgtaatagtatttctgtgtcactaaatccttcaacagcattatttttaatagctgcccaatgtcctaatggatgggtgagtcatgatttacttaaccaatcccctgttgttggacatacaggttattcacagcttttctctattgtaagtggaattgcaatgaatgtttttgtagtacacaccagtgagtgattccttggtgcgcttggaagtgctggttccaagaataagataaggctttgagattaattgccaaattgctttcttgaaatattgaggctactattttccagtatcttcactaggaataagtaacgtttttctaaagctgagtagtaagagaaaggtagaatctaattttactgtgcattttcttgattattagtgaagctaaacattattttttattgatgtgttaacaatttctttcttttgcaaatgatctattmatgttctgtgactgatttctatcttggtgtctttacgtttgtgaatggtaagaatttttatgtgttcaggaactatttaaatgttcaagacattaacctgtggttatgtatatcacaggtacagtcacatcgcttaacaagggagatacattctgaaaaatgtattgtcggaattctgtcattgcatgaagatcatagagtgtatttacacgagcctagatggatagcctactacacatccaggctatatggtatagcctcttcctccagggctatgaacctgtatagtatattactgtaatgaatagtgtaagcagttgtaatacaatgggacatatttgtgcatctaaacacacctaaacatagaaaaggtacagtgaaaatatggtattataatctgatgggatcggcattgtgtacatagttcgttattgactgaaatgttggtatgaggtgtatgactatgttttctcatgacctctgctttttttgtctttaagtttttaatttttgttttacttttgtcttttaattttaattctattgcaaccaaatctatcagcctgtcttctatgatctctgcttttaattgttacsctttaaaaatccttctccatggtaacattatattgactcatatgtcttactggttgaacgtgcctatgtttgactttgaaatcattaaattcattgaggatttgttttgccatgaggaattgggtaaggatccagctgattttctccagatgagtagttcattgtcccaacaccagttattgcaataagttattccttccccaggaaatatacctgggctaattaagaaaactgtgcttcaatgtaattattccaccttaatgcatgaaatattaggttaacatggaaaaaacatggcatcccatgttttagtattttttccttatttccaagcagcacctctctttgaattatattctgttctstgtttttataatttgactcccttctattctacatctaaatagtgcattgtctgttttcactcaggactttaaaaatagttctagtactaattgtatttttattctaatactgctattccttttactggtacttctgcatcttaaaaaaacaaaacaaaacaacgaaaacttggcatgttggctcacttggtgaatgaaagcatatactgttcagttgtttattcttcagcaacatctgagtatcctcgagaaatgagtggaatgaaccgctagagatgaatagccttaagccctcaaagctgagccctttggggtaacttgctctaattctgccctctccagtttgagtttaggttaaattcagcttgcagattgcaccaagcctgatgcctcccagccatcaaggaaaagggtacctaacattttgaatctccattaatcttacagctcagatcctgtgtattaaatctcagcattttcagggatgtatactctggcagaaaaactttaatgattttttttttctgatgctgcctagaaaatattagaaagaagacccttctttcctttcctttcttgtcctgtcctgtcctgtcctgtcctgtcttccctccctccctccctccctcccttccttccttccttctctccttctcctcctcctcctctccttttcttttcttttcctttccttcttcttcctttcttcctttatttctttcttcctgtattattttcttgtatagctcaggtctcactgctttgctgccattcttgtggagaataataggtaacagaggtgtgcacctggcctcatttattgtcacactggataggtaatagacgccggcatggctatgctgtggttcctgctgatgggcacactattacaggtgcatgataagtgtgtcgtacgcaggaagtacrtttcccccagccttccctacctgctgagggctgctcccagcstaaggatttcatccagatagattcatagcgcttccagtaaatgcaccccttgcctttcaaagttgaaaaagaaattactttggacacaaagaggtgtttcttttgacacagcaggcatgtgaaaaaataagcaaaaaaacaagagggatttctgttaccattggcatgtgcttctcttttacttctttagttcacaatgccagtggttcagcttcccgttctgatcctcactgctctaatctcttcatctgtgcttgcaatcacagccacgcgggctcgcaatattaccacgaaatcattttatctgttggaatctctttcctgttcattactcttttttatccccaggtagacaaacaccctaagtttacctcttgcgaattgtacgctttaaggttaaggaattcgtagttgaataagaatgacttttcacataaatttaatggagttttatcttctgagccaaggctttatttaaggagtcttgggaggtaatcatgtgttacctgagactctccgcccataggatgtagttcctttccattggaacacatggggaccgagggaataaagaatgttttcatctctgaaaatayctctcattcttccaatcaatgctgctcttttcttgcatactgtatactgggaagcatttgtttcgatttgtggttaaatgtatgtgtccactggacttcagtatccaccctttgaaggaccgcaggagaagttgttcaggtagaaacatacaagggccggatgyggtggctcacacctgtaatcccagcactttgggaggcctaggcgggtggatcacttgaggcctggagtttgagaccagcctggcyaacatggtgaaaccctgtctctactaaaaatacaaaaattagccaggtgcggtggcgcaaacctgtaatcccagctacttgggaggctgaggcaggagaatcgcttgaactcgggaggcggaggttgcagtgagtcgagtcgtgtcartgcactccagcctgggtgacagagcgaaactctgtctcaaaaaacaaacaaaaagaaacataccgggagatctggttctattgaaccccagtgcagccatgggtagaattttaggcttatttatattccatttcaccacaagatgtcaccagggcaccacaccaacatggtctatggaccctctctctggcaaatagagttatggtcatcaaacagcacctgcccagggctatggggagaggaagctggttggctttgtcacaaatgccttgatgtctctttcctcccctggggcccatctcttccagcctttgcatagagagagaaggcaggcaacaggacacaagaagattttcccagagtccagggtgttctcttacccctgaaatcgtttcttcactggatgggaaggcaggcacccagggggagatggcatcagctgcataaacaatttttctcctcagtagacatttacatgagtcaataggaatcatattctctctttttttttttttttttttggagatggtctcactctgttacccaggctggaatgcagtggtgtgatctcagctcactgcagccttgacctcctgggttcaagagatcctcccacctcagcctcctgagcagctgggaccacaggtgcttgccacyatgcccaactaacttttgtattttttgtagagacagggtttcaccacattgcccaggcaggtctcaaactcccgggctcaagcgatcctcccaccttggcctcccaaagtgctgggattacaggtgtgagccactgtatctggcctaggaatcatattctcttcactgaaacatttcagatgacttaaaaattcaccttgtagaacttttaaaattgaaactttctggtgaacatcattagttgacagatrtrtcattgaagtttcatccttcttcatttcagagtctgctrgaagacccttcatttaccactctctccttcctggaggtgtggaaatactctacctgggtgaggctctcgtggctttttgtgccaagtgtccgtaaacttcaacttaattgttttaaatcctttgtggtgattatgcggaaggtcaaatctaacaggaagctccatgtccacttgatgtgtacttacttctatttttgcaccttgtgttgtttgttatcctgaattatgccagggctggtttgtgctaagatacttgttatttgacctcataataccagcatgtcccgtttgtataaccctctctgtagcttcttccagcatgtgatcatacatctacctaacctctcccattggttgaatttaatatactagtgaattttccattgcaaagatgaggttacraatcatagtgttcatactcagaaggactttataaatattttgcctttttgaagtatatacaagaaatgaaaaaaaaaacaggaataaataaaaagaataaaaagagccaggactagaacctacaattcctgactcttgatcaaattgcttttctttttaactctagttaaatattttccattctttttaactcaagaagcctttgtttttgttgtcatcgttttatgattaacttatatctggtcctttagacatttagattttttctgttttatctctctctctctatatgtatatctrtatatatatttatctatatctrtatagagatatatatatatatatataataatgaatgaaatggactgtttgcaacctcagatgtatttctaggacttagagtgattagcttgaggcgatggtagtttctgtttttggagtctctgtaggtctcagactcacagtctgtacttcttgttttgggggctaattaagtggacagtttcagtgttggtasctcatttaagccataaacatgcagaccatgtggaatcccattagtcaaaccttagcagagtgccttgatgagtacctccttttctttctgaattctattagttgatgctttgttctttctccccaagagccatatctcagctatttcttttcatttcttgtgtatagttcaacatctttctttctttttttttctaaacaggatctcactctgtcacccaggctggagtgcagtggcatgaccatggctcactgcagcctcgacctctggggctcaagcgatccttctgcaacagcctccctagtagctgggactayaggtgcatgccaccacacccagctaatttttatattttttgtrgagatggggttttaccatgttgcctaggctggtctcgatctcctgggctctagcaatcctcccacctcggcctcccaaagtgttgggattacaggcgtgagctaccrtgcccggcsttacgtttcagcatctttcaatccatctaatacgcagtgccagggaaggtttgtgaaaacatttgaatcacagagtcacaaacagtgagaatakctgcagttatgtttgtgatgctctaatgaacttacaaaaggccaggcctagtatttcagctgtgtccatgatgtctctgatggaaatggacaggtaacatgatgtacacaagcatttgactgttgcatcctttgattgggccatgttcatgcagccagcctgggaaagcaattagtagttttaagcatgggaaatcatataaaagtaaactaaaattgcatttgaattaattgatgaacatgtttgcttgaccatatcctgctgttaggcgtcttcaagttaacttaagtggttgataaaactttccaaaaagaatactatcaactgctgagcacctgttgtcagagttgtgggtaattcgcaaaggttttcaaatggaaaagttgttttctcctgctaggaagcatggtctcagatccacttctaaggtcagtgtgaaagggaaggcaaattcactttgagcaggggaggcatgatctggaagataaagcagctaggagtatagactagggggctgatggaggggaacacctatcacaatatgtgttctcacaccaatgatatatattttccacacatttagattctccatgccactccttatctctttagtgcagaaaacggagaggaggttcagtattcttaagaaactcccatgattgctttgaggcaatggatttaacrggtatctttatcccttatttacgcactgactgtggtactgagtcatccctggtgtttctggattttattggcaatgccaagagagcaggaagactgggacgtgaactgacaacatttatgattctggcagcttgacatcacccaactgttctctttgtttggttttgcttcagacttagtttagttttgttttttaagggctggggtggaggagagggatttgctcttgcagttttcctttcaaaccaaactctttcaaagccttttgcaaactcttttatggattttactcactggttgagcaagagttacttatgagatgtggcttcggcattttcacagtgtccataaaaaaatgtatattactatgcattgcacatttgccacttagaatttctgaatgcaaattaatcaacttgcagctgtgactaacaataaaacacaggataatgtacctacagaaatgagggcattggaaatccgctctcaggtggccatcgaaaatagtcagcctgagtgttgctacctgttttccataattgtgtagctttgcctttccttarttaatctgttcaataaactcctctgcagaatccaaatgcttaaattcagtttctttttgtctttatggtgtttwtcattgttaacgtggcatcggagtagctcgacttttgcatcatgataaattcataacccaagagaaggcagaaaacataattrttrtcaattgcctctctcctggaattgccattggctgagtggaacaaaatacgaacttaaggagtagctgattcagagaaatccagggtaggaacgggtcccatcttgatttcaatgtcttttttgaggaggccttcccattgcacttctcttcaagtttgcccagatagtaagttctactagacatgtcaattttttctgaggtctaatcttgatttttttttcctgcacaatatggaattcagtgtttttatttaatcattcagtaagtcttgactgcctgctatggaggttaagccctttactaagttccaaggatgtacctgtgaataaggcaagttcctttttatcattgtctttgcagtctattaggggctacacaatttaaacagagaatatatataaaatggtagaaagtacaagtaagtataccttatttttttaaaaaaaatgaatgtggtatttcacccacagcctcaagaatcactttccttaaaattgccagagtaggaaaacttacaattgaagaatttcaggtatttatgggaaaaatagtattagggcaattgcggtcaaacacattcgtctgttcgttcaattacagcagtaaggatggaagtctaaagagagtttctacgtgatcttatttatcctgcatttataaatacacaaattcttgtacaattaactcagtttttcactcctttcttgcttgcaacttgtcaggtcgttccctccccastagttgtgaacttctttatgctagcttcttccatcaggggctcacaaccagggactgtagaggtttgcagaggtaaatcttggtagataaggattttatgaaaagggagctcactgttggtgaaaaatccttgtttctacagattttgggtcaagataagaaaaattaacttttaaaatctgaggaatttggagattatctccaggggctgaatatatttttatgggagaaataaaatggatagttttaaacttgaatttagtttttcctaatggaggcccttttgaagatcaaatgggatctgtaaaaactctttgaaaaatgtagactgcttcttatgtgattcttactggtctattatttatcaagaaattaaamaggaatgaatatctgtagctgtttttctttttctttcttttcttttcttttctttttttttaagatggagtctcgctctgtcaccgggctggagtgcagtggtgctatttcggctaactgcaatctctgcctccygggttcaagcaattctcctgcctcagcctcccaagttgctgrgactacaggcgtgcgccaccatgcccagctaatttgtaattgtttgtttctaaaaggatattcagtgcttccactgtcttttagaagtctgtagaaggaaggccaagaaagaaatacccattattttggctgaagatgatcactttagctgaaaccagttcaggttcaaactcagacattggtgctattttcatatatctgaaatgttctgaaaagattactgacgatcaacatgctgaactgacatttcacagatatgcagatttattcatctctgttcaaggtatgccttttccaatcataatagccaygtagaggacattaaacaaatattttattgtggtaaaaacacttaacatgagacctacccttttaacaaatttttaaatatataatttattattattgttgactataggtaaaacaggacatttttaacgtgctgtggtggcctattggactttcagcctccctgggtgtatttcgctgtatatgtgtaccatgtcagcttaccctagaatttgaaacattttcctttgatgattaaattttttttttttttttttgagatggattcttgctcttttgcccaggctggagtgcactatcgcgatctcggctcattgcaagctccgcctcccgggttcatgccattcttctgcctcagcctcccgagtagctgggactacaggcgcctgccactacacctgkctaatttttttgtagttttagtagrgatggggtttcaccgtgttagccaggatggtctagatctcctgacctggtgatccgcctgtcttggcctcccaaagtgctaggattacaggcgtgagccaccgtgcctggcctgatgattcagtttttaccccaagatgcagtatgcctcmgtctcactaaaatatgccaatatgttcttcttcttgaggatcagggctgatttcttctactgggaaaatgtatcccctgtgtttggccccagaggcatcagggtaacctgctctcttccattctcaaagcagaaacagtgttcctaacattctaagcctgggaataggatggcaggtcgtgggaccagcattttaattacctaaagggaacttattgattttagtccagaacacggtggggaggagttcatattcwtttttttttttgagtctggattttagaataaattcactgtgtacatagctattccatctttaaaaacctttgtgaatgytaatatacagcctttataaatttgaggtataatgttcaaaatgctctaatccctaaattttccagtctaggttattatacttttatgactattcattttgatgtaggccttttaaaatcaattcctccctgttattacaatgctgctttatggtatttgtgatatatcatgtgaatatacttgagggtcatgagaagttcatatgtgtgtgtgtagtgtgggccccagactttcgccacactgctggctaaagtggccatgtttttgtacgtctctgcagagcttacaagttattcaacagccagatttctattctgatatgcccttttagttttcaaagcatcgaaaaagggtaatctttagaaccgaagtatttgcaaaactcctagacttgaataaggtatttttgaatttgaagagctaagaacccatcaaatcaaaatgctaataattcttccaagtcaaaaggtaactctcattttattatgcattgaccaccattcactttctgttggactgcttttggaaaaagaaccacaagtctctatttttaaaatagaggtacaatgataaaacaaaacaaaacaaaacaaaaaaacaacaaaaaaaaaacccacacaggtctcatcagccaagggatttaaaaatcaaatttaacttcaaaaaactgaagttgatatagcaggatcttggagatgcagtttcttcacttttcttttttttctaactgagggattaaggatataaacccaacttcaaatttctttctgggtggtcttgaaaacttaacagtaggtcctgtaaagaggtgggggaraggaaaaagaaatcctttactctcatctgctggttttaaaatgagaaaaatacacacacacacgtaatgatgttcgtgatgttaatggagggaaatatcataaataattaagaatttaaaattattataaaatatttagtattattgttgttactgttattagtaggaaggggccttgccatgcttcctttcttcaaacagctcagtactttaaaatcgagtgtggctgtgtttgtcagtcgtggtttgtgttctttgatttgttctgcatgttcttcttttggagaggatgtgtcactttgccartcttggtccttgctgttgtctggtggagggaaacaagcctgccaggccggctcatctgacccctggtggcagggagtggaggtgcactcaggatgctcttggggaatcataaaggaggttaaagaaagggacagcagaaccctgacaatccttgcccctaagcatggaaaagcctccggaccgggtctggagtgcaacagaggcccctgaccttgtctctagctctctgtctgcatcttcagcgtggcttcactggtttctaagtctctggtgtcttttktcttttgcagccggcttgcaattgcctccttctaactctcaaaaggatgcatgggatgggttcagtgtagtcactgttgtgccttttggacaaggctttccagccaggccaccctgtttacaaggctgtcctcacgtcatgggcgctcatattgtccagactagatggtcaaggtgattgggggaaggaagtcacagagccaccaattactaaggaactgcccagagatcctgcctcactgggaacctgtgagtgggctggtttcccccagcagaggggctgtagcatagcaggtacccacaggagcctgggcatggcctttttctctaaagggctggatagtcaatatttttagctttgtgggctttatggtctctgttgcaacttctcaactctcctgttacagcaggaaagcagccacagataatatataaatggacggatgtgttccaataaaactttatttataggaacaggcagtgggccagattcagcccgtgggccataggttgccagcctctgactctggtgttcagatcacagactttggatgtctcatatctgaatctttctaatctcgtgatagggcaaggtaattaaaatgttaatacgttagttttctcactgtcaatgtgttctatgacatcatttatgcaaagcatacaaagctgagaataaagtctcagcaaatgctagtttcctggcctccttatacatacttacaaaggatggtgggagatagtttgagatttgaggcctctgaagaataggtgtttttgtgatgattttggcttttcagtttgacagttggctttgcttttttgacagacacmttaagagcttcaagggtcatttcatggtttgtcctttccatgtcagggacacctttcacgtggccattttaagcacaggaattgccttcaagtagtttactcgtacgaacttgtctgtaatcatctttccccatttggatggtgggttgcccattttaattcaaggtttgtctaatgtgttagtgcatattcttggctcaagcaggataagacactagtaaccatgaacctgtatatcaaaaagcgtgactagagtttcatagttaaacatgtgctgaaatccacagtggacaccagagagggtcatggaatctgrgaatggatgacttgtcccatgatgataatatctgtgttcctacggctgggcccggtggctcacacctgtaatcccagcactttgggaggccgagatgggaggatcacgaggtcaggagttgaagaccaccttgatcaatatggtgaaacsctatctctactaaaaatacaaaarttagccggtgtggtggtgcatgcctgtaatcccagctactcaggaggctgaggcaggagaatcacttgaacccaggaggcggaggttgcagtgagccgagatcacgccattgcactccagcctgggtgacagagtgagactccgtctcaaaaaaaaaaaaaaaaaaaaaaatctgtgttcttgcctggcttattgagctccatggtaaatgttcagaggctgcaggaatgattcaaagtctgactgatttatgtgcattgggcattttgttgatgtcattcagattaatgatggcactgaaaatgtgtaatggaaatgagaagtttgtatcctgcctgctataccatgattccaatttaagagggggtaaaaatattgcactttttaatctattgttttttgaaagagactgtttaaaacacgtaattttgctaagttatggctcatatcgtatttgttattttggttttgaaaaattgagtaggaagcaattgcrttcttaaatgacttgaacatcaaaggcaagtagtgtcttgttttaggagcagccaggctcctatccctctgatccagccaagtgctttcacttggtcccactctggggaatcaccagtggttctcactctgggagaggcccctggttgacctggaatgacctagaccagcagtcacaagctcctgcccatggacaaaatacagccggtacctctttggctatggcctgcaggctcagaayagttyttacattttcaatcatctgcaaaaaagaataaagaggagaatattatttcttgaaggaggaaaatgatatggaattctgatttcagtgtcataaagttttgaatttcatcaataaaaaatttgcagaaatttgtttttctctcctgttatgtaaatacctctgtaatagcctcggttttgcctcttggctcacaaagcctaagttgtttactatttagccctttacaaaaaaagtttgccagcatctgatgtccaacaacaattttcagtcttttttgtagctcccaaattctctcattaaaccagatcccttgagggaagcctggtttacaaaatagattaagtgatgtggctgtttggagcaggaggctgtggtctgagtcttgctggcctcaaccctcaactcacttccacaccttacctcctggggataaggctgccttcgtctagaaagtgcctcggttccagcttggaaatatccatgtacagtcccttttttgttattccaaaacccaaagagatctgaaaagcaaaaacaaatttattgtatatttatagcaaatttatttggtggtgaaatttgacttcagctttagcgtccctgtttctcstttctagtgtgaatgttcattttgttttgtttgtttttttgaggcaaggtctcacttcatcacccaggctggagtgcagtagtgtgttcacagctcagagaagcctcgacctcccgggctcaggcgatcttcctgctgtagcctcccaagtagctgggactccaggcatgtgccaccatacccagccaatttttgtgtctttgtagagatgcggtttctctaccatgttggccaggctgaataatcatattttcactgaagaaatagaaatgtcattgttataggatgttgccccaaaccccgcaaaggtattttgtaatatgcagtatatgtgctaaattactttttttgttgttgttgagatggagtttcgctcttgttgcccaggctggagtgcagtggtgtgatcttggctygccgtgatctctacctcccaggttcaagcgattctcctgccgcagcctcccgagtagctgggattacagacatgtgccaccacacccggctaattttgtatttttagtagagatggggcttctccattttggtcaggctggtctcgaactccggacctcaggtgatctgcccaccttggcctcccaaagtgctgggattacagtacctggcccaaaatacctttctaacatggaggaattaggaatactgaaggcatcggcccccaagggtttgatgtgctcttgtccccaaggcctgcagatttgcatcacctctccacttcgtggactcctcgtacctgcctgattccaggatgctctaacctggccacgcatcccccgtggattctcagctgttgtgtgtttcctcctcaggtggccactgtgtctggtgctcacctacattttggttcatcctgactttgcctcagcctccccattctgcatttctcccacggcttctcccagccctggcccagtgacactgtaatgtggactgtggcatcccctgagtctaagctgttgaccagctcttgatggacagatgctggcagagatggggaaggtgctgttcccttcctcctgggaagggcaaagaaagcagggtggtcctcccatccccgtgaggaaggaagagcctcattcatgctgagaccctgatggagaactgggtccagggataatgttttgtgttcctgctcatgggactggtgtgttattgtcaagggatcttacaggccttgcttcccaggcccctctatcccctctgttcttgcttaggcattagtgatttggttcttctagctttttttctttttttgagacagggtctcgctttgtcatacaggctggagtgcagcagcgcgatcttggctcactgcaacctccgcctcctgggttcaagcaattctcctgtctcagtctcctgagtaggtgggtctacagtcacatgccaccacgtctggctagtttttgtattttttagtagagatagggtttcacttgttggccaggctggtctcgaactcctgacctcaggtgatccgccagtctcaacctcccaaaatgccgggattatagatgtgagccaccacaccaggctggctcttctagtttttgaagctcacttttcttttttcctcaagactcacagggaatgggaccaggcacctgtctttatacattctcaaagtccatggtgacgatgccatgctccggttctaagccagttggacagacacaggcaagggaagctgtcagtgtgggtgagttgcagtgtaagggtagtgggtggaatagcgtctccccaaaatccacacccacacagaatcacagatgtaacgttatatggaaacagggtctttgcagatgtaattagctaagaatctcaaggttaaatcattcaggctttagagtgggccctaaatccaatgacggttatcctcatgagaagaggaaagcagggggcacagtggtgggtgtgcctgcaatcccagctactcgggaggctgcggagggggcatcacttgagcccaggagttcattgccagcctgggcaatatagcaagaccccatctcttaaaaaaaaaataacaccaaaagacaaaacagaaaaaggaggagaggacacagaggagaaggctctgtgaagtcagaggcagagattggagtgatgcgtctacaagccaagagatgccacggtcatgggcagcccccagaaacgaggagagaaacctggcacggtttccacaaggagtcacccctgccaacaccttggtttcagacttctggtctcctgaactgtgagagtcagtttctgttgagcttgtgctgatacgctagggcagccctagcacactgccacatctggtttcccggaggaacttcacagggtctttgttctttatctacagtctctggaagtctcagcagcctcctgtgttcgcaactgtcattccagagcagccgtctcgtgttatgcatttgcttactcataagcaaatatttcacaagaacctgcgagggccaggctgggccaggcaggtattgcaggtgcaaggatctatataagacagtgccctttagaagatccctgtctcattgagaagcgttgagtaaatgggtctctctggtcattctctccagaacatgaagccaaagggcygagagggagagactccaagaatgaattagtgtccagcaaggtatcgcttgtctcaggatgacaacttgcaatttggggatctctcaacgtcctgacctccatctcagtgggcatgttcctcacctggctggctgcccctgcttactgatgcagcctcctgtcacacggtactcacctctattcactgtattccaccaacactggccttgggagccagcagtacccccattgtacagatgaaagtcttgtgactgtcaacattaaaatgagaatgatattgacccatgatacttacccacctgttcagtggattcggtgtgccgtcagcatggttcccagcacatagtaagtgctccgtaaatgtcagcatctattattatcatttgtgtttttttttccccttctctgccttcctttctctccctccttggtctgcttcctcctgttgctatcagagcctgcctgcctcatccttgttccagccttgatggtgatgatgattrtggttgctgttgctatttgtttttttggtttgtttgtttgttttgagagggagttttactcttgtcacccaggctggagtgcagtggcgccatctcggctcactgcagactcttcctcttgaagctggggaagttcaagcaattctcctgccttaggctcctgagtggctgggactacaggcatgtgctaccatgcctggctaattctttgtagttttagtagagatggggtttcagcatgttgtccaggctggtcttgaactcctcagctcaaatgatctgcccacctcrgcttcccaaagtgttgggattacaggcgtgaaccaccacgcccctcacgcgcagccactgttgctattgatgattattatgacatcattgctcagattcacttggctcagagagggcggagtcagagtgacccaggtggtcactgctccccttcttgtccatcaaatcagctgcctccaacagcattgcctggcagcgtcacgtagtagccctctccctcacaaggcttttgaggcagacaaatgccactgataaagcaaaagcaaatgttttgggtgaattccccatagctacactagatttgaggctgagaaatggaatgcctgtcattgttgactgaaaaatacagctctcctaatagagtcttggtgcaggagctgttagccttgccgccctgcagacttgaagaattgcgacgtcggcctaacataattttggtaactttgtctgcttctgcctcgggtagaaataattcagatttcactctccattttctttaatgggctaaacagccactttgtaatacctgtattttattagacataattctggatattgtttctgcagcgtttttgaaaagacaaacctgagagagcccagctatttaacttaagcaattttaaagttatttgtaaaatgatatgctgtcttttttgacccagttactttataaagctacattctttggcaaacattaacacaacttctccgtgtgtgggctaaataaatattcgggcaacactgattgagcactgccttgggtaaataattctctctccacacatttcctagtttataatgaggagttttcttcgtggtctgaccaaatgtaacattccattgaaaatgagacataaatccttgagtgagggagacgtggaaccagggtttgaggagggttattaaaaaggtgagggtagcagggtgacctcctgagtcccctgctctcccgagccttctctcctctctggaacccatggctaataggggacaggagagagcggaagcagaaagaataagagatatgaaagccagccgggcayagtggctcacgcctgtaatcctagcactttgggaggccgaggcaggcagatcacttgaggtcaggagttcgagaccagcctrgccaacatggtgaaaccctatctctactaaaaataacaaaattagctgggtatggtggtgtgcgcctgtaattccagctacttgggaggctgaggcatgagaattgcttgaacctgggaggtggaggttgcagtgaactgagatcgcaccactgcactccagcctgggcaacagagggagactgtctcaaaaaaaaccaaaaacaaaaaaagagacatgtgagccttcccttccctctccccatcctagcctcctctcacccaggtccattcttccactgtcatcccatgatgctctcttgcattttaaagtttggaagcccttattcctttgttttgtttttgaaatacaaatatcaacatttttattgttctatagtaatacacgtttcttctatagtacattaaatcacaagaggtaatagtgtatctactaacacctatacttttgagtagtgttgagtgtaaatgatattttgaaatatctgcagtaactgatgtgatatgcaaacatctgtgatttcttttaatttttattaattttcattttttaaaaaactttagtttctggggtactcgtgcagggctgttaaataggtaaatgacatgtcatgggggtttggtatacagattcttttgtcacccaggtcagaagcatggtacccaataggtgctttttcggtcctctccctccttccaccctctaccctccagtaggccccagtgtctattgtttccttctttttttgagacagagtctcactctgtcttccaggctggaatgcagtggcaccatcttggctcactgcaacctccacctcctgggttcaagcgattcttgtgcctcagcctccggagtagctgggactacaggtgtgcaccaccatgcccggctaagttttgtattttgcgtagaggcagtgtttctccatgttggccaggctggtcacgaactcctgacctcgagtgatctgcctgcctcggcctcccaaggtgctgagatcacaggcgtgagccaccgcacctggcctattgttcccttctttatgtgcatgtgtactcaatgctcagtttccacttacaaatgagaacatgtggtagttggttttctcttcccgcattaattcatttaagataatgaagctcctgtccttgacccaatctccactctaccgtttgatgtccagtgtggactgcccctctgaaagcccttcactgcggctcagcctgtggtggaaggtgtccaaggtggctggaacacctcctgctgggggtgtcagtcttggctctcctgtkttctgcctgtgcaatggtgggtaggtcccttgatacctcgtaacctcagcatccctgtgggtgataaggagatgataatagtctcttcccgatgggggttaaataaaataattctcggagtatgtgaagcagtacatgtgaagtgctcagctttgtgtctggcacataaggaagtggtcagtgtttaatgttagggatcatagatgctgataaattgccgtttatggcatatttcatgtattgcctcatttaaacctccttgcaatctgttatgactcctgctgatgatggggaatttgagactgtgagaggcttggcaaaagatctaagctgtgaagtatctggaataggattccaccttcagccctgccttaatgaagaccatggtcttgccacattgcatctccccaagatttttatggttctatttttagtcacgttggcctgcgttggtaaatttacctttcctggtccttttgagtaactatctctggaaaggattaagtgcagtgatcaatcagcagcaaagtcctggaagaaacccatttgttagtctctgggcctccccaggccttatcagggcttagccttcgagcagtagcaacacttgcacctgcagttactaattcctgtggaatgaagtaggcgggcccgaaatgtacagcccttatccagtgaattctcataggagcaaaaaaaagtgttttctttcccccttggagttctgtttcttcttaaaattagctatttctcatacacaatagggacatattcataaaaaagggaaaatactccaaagttgaaaaaaagattgaaaaagaaaatcctccaatatatatctactcttagcattttggcacatattcttacagtagtttcaaatgcccaggccattttgttttattttgttttgttacaattgtggcatatgtactcgtgatggatttgcttgttatctctaaattaattctcctcctgcaattcaaatattccagagatatgtatatttttaacacattgttaattatcccatatggataatagtttcttttctctcttaacattttaaaagcatgcctccaggttgttctagacggtcctgaacagtgctttgaatggggacatgttagtaaaccaatgagaggaaccacggtttagttcatcattctccttctaactgtatttttaggttgtcactaactcttttcagtcgtcatttccatggccacgaacatctttggttctaaagcatttttcccatttaaaattatttctatgggattgatttgccagaagtagaatttctaggtcaaaggtacaaacgcttgagaagtcctgatacatattaacttgggccagaaatctaccatgtaattgagagcaccttgagcttggcttcagagccaggatgaggacaggaataagtgggccttttgatttgaaatgttgagatacgaatgtattctagatgggccaaataaccagcttattttattttaaagtcgagtgaattttctgcctcactaatgtgcatgtcttcaaagacaagtagtgggaacggagtggggatttgtcatcccatagaatgccaccacatggaatcggtcctgaggcttctgaaagcagttccaaatttgaatgtttcctaagttagttcttgcggtacagcgcagacaatattcttcctcgacaatagctgagacccaagtgcctgggcgcttccaggtcataattaacctcttcaaaataagagcaaagaaaggcaggaaaaggtcctctccattccagaaaggagaacaaagagggggaattctaaccctcttgccacctctgttctcgtccgttccatattaagaagcattcaaagactaggatgccattttgcaaacgtctcattctccctgaatggtaaggctccacgctttagcacaagtggtacaaatctgccttccctcattcttttttgcagatcatcccgctccccacccctttctttatcatggctcatttggagcatctgtgcattttttaaaggctggattttctttctgttgccattgaaacattgcatttgtacaggagaactacttaatggcacagtttgttattacatggaattaaatacaacctatttaaatcatgtaccgtgaaaccaaagagctgtgtatggaaaaagcctcatataacccagtttgccaggtcctaactcccttcatacatatactaacatgcaaaagacctcctaccttttttttccccttctgtttctctcttggtataacactaccctgtttttgaaagtacttgtactgctaatatattctttaaagaagaggggggaaacctgttggtcccctcataaaacagttaacaggaagcccaaggcatctttcagtgccatttttggctgatgtttggaatggttccatcaatcacygctgttcatgtatagctggtttttatgtcagttaaaccatcttccatcaagttggtgaagcagagtcagggaacaagatgaatagcaaaacgtcttctgtggcatggaaaaggctttgcttttaaatgcccgtgttgatttcttaatattttcaacttcctcttctgaagccagttccccccgaccatcagtcatgagtccgttcttttaacctygttcaggtggcgtggggcggtgtgtttggtggggagtgmtgggtgcttgcctggaagtgcgagcaattgatcagctgatgaggggtatttattatctgtccctgactcccgagagaggaaataaatccttggaccccagagtgattttcggagccacaagaatgcaagatgtcctgtttccagtcagaccatagcagtatcagtctgtgcagttggaatcttgcatggggaggtgtttttatttcacacaagaaagaatggcacatctttccttgaaagatgtattttgtatatcttaatgtcagttatgtttacgtgtttgctgctcagaaatcaacaggatttctgcccttccccagccccctttttttcagcccttcagagaatatttgttgagtgcagtgtgtaaaatcatggcggtgccaagagggggtgtgatgggtgtggccgcccccctgccagcaggaggaatctgttttcactgacattgtttggaatcaccaagcatggtgatgataaaaagcagttaaactttggtcacttttattaatacttttaagtccttagcgaacaatgcacccgttattacttgcacctagtggacatggttctcattgctgctgcccacctttcttttttttgccatgggtgcaaaagatgcctctggggatcccagaggactcagcattggtaaggatgcagtcctaatcctgaaggagggtacagctgaccagggaggtaacacatgaatgcagctgatagggccagttggacccagatttcaactgcaatctctatttccttcggatctgttgcatctgctcaaacactagttctgcaatttcccaacacctgccccctgccccttataaaagctcatggttccatgtgactttccactcctgcgtctctggccttggggcaggtcagtccgtggatcacctcactgtcctagggatgctcttctggtccacactgtgcctaccttggatatggagttccacttgttcccttacctttcacccacctgtgctcctcacccaagcaggcattgatggaggtctcatactttactgaagatgtgaggaaagaggacacttatgtagaacccaactgcaggtggagccttggcgatccatagccctctgtaaagtggggattgaagcacatatcttgcaaggcttgggcattgattgcagggagtaatgtgtatatgaatcatcagctatgcaacataatgctgatgctaagtactaacattgatggagtgttggcatgagctgggcagagtgctccatcctctatgtgtgtattagttcattcttgcactgctataaagaaatacctgagactgggtaatttatttaaaagacacctttaattggctcacagttccacaggctgtacaggaagcatgatgctagcatctgcttggcttctggggaggcctcaggaaacttacaatcatggtggaaggcaaaggggaaggaaagcatctcacatggtgcaaacaggagcaagagagggagcaagggggcaggtgcaaaacacttttcaacaaccagatctcaggagagccaactcaccacacagcatacgtgctaaaccatgcatgagaaatctgtccgcatgatctaatcaccttccaccaggccccacctccaacgttagggattacatttggacatgaaggctgggtgcggtggcacactctgtaatcccagcactttgggaggccgaggcaggtggattgcttgagctcagtcgtttgagaccatcctgcacaatacggtgaaacctcatctctactaaaatacaaaaatgtagccaggcgtggcggcacatacctgtagtcacagctactcaggaggctgaggcaggagaattgcttgaacccgggaggtggaggttgcagtgaggtgagatcgcaccactgtactccagcctgtgtaacagagcgagaccccatttcaaaaaataaataaataaatttgacacgaaatttggtggggacacagattcaaaccatatcaatgtgaattaaatgacatcattcagtcctcaggacaaccctctgaggaagtacttatgccccccggcctttttttttttttttttttttgaggcagagtcttgctccatcaccaggctggcacgatcttggctcactgcaagcttcacctcctgggctcaggtgattctcctgcctcagcctccggagcagctgggactacaggcacgtgccaccatgcccagctaatttttttgtacttttagtagagatggagtttcaccaggccagactggtcttgatctcctgaccttgtgatcctcccacctcgacctcccaaagtgctgagattacaggcgtgagccaccgtgtctggcgtcatgccccgttttatagatgacaaggcatggaatggttaaatgtctttcccaagctcatggagtggtggcggtggaggtgttgtgaatgtgaacccaggaagtccgcctccagagctgcaggcattaatgcaaagctgcactgcctcacgaggtcgctgatgcactctcattccttttcctccagggactcctgcactttgccaggcgtggrccagaatgccactcgtattgtttatcttaatgcttagtgatagtagctacctccagtgcacgccgcattagcctctccaatgagtttctcctttattttaaatgtaaatctagagttcccttaatccccttaatttttagtacgtggctctgagggcagaaacattttcaggagcagcctgggctgagtttttaatgtggcagcagcctcggctggtttcagcatgcaggtgagaaggccgttcatctggaacttgggctacccaacagtgcaagtggggagatcagagcatggaaaatgtttttgtataaacttaggtggaccaaaatgatcatttcaacaacatttcggacttgattttttgtatttatatggcccctttcttcccaagaattgaaagcctcaaactagaacgtggcttttgaacggtgaacattccacaaacatttaatacagagatggctgtggggtgggggctgggggctgggggcctggaagrggagaaggggcaccagaaggagaaatgggaggaaagggcgagtgagatagcaaagagaactcagaaagtaataaagccctgcagtartcagagggctgaggccaggtccccagtgagcggctgaacacacagtgattcaaacccactccagacctgtgttcttaatcattaccttcacctggagggacagacctggccttgggcaagccacccccactccctggctctgtgaccttggcagctgactggccctctccaagatcagtttcctcatttgtgtaacagtagtaatctccaatttagggggctgtatggatattaaatgagaaaacacacacagatcatttctttagcacaacgtctatctggcacattagcgagagctccggaaatacccatgccagggtcacaagctcggttctggagctggatggccggggtttgattcttaactctgctcctttctagctgtgtaactttaggcaaataatgtaacctccatctgcctttgttttttcctctgtaatagaaggaacaacaacgaacaacattttttttttggcaagattaagtgagatcttccatttgacatgcctggctaattggcagtgcccaacagatagaaactattggtattgtaaggactgcttattgggtacatatgctgtgccatgggaggtggaggtgctgtcatgctgaacccctattaacctcaataggaaaggcaccaggttcaagagctgaagaagacactcagagccaacagatagacatggggttttattaggaggttacatataggggagagagtccagtgatggcgggctggatagtacaactgcccaccttacatacagaaatggtccagtggcagtaggctggacaggatatccacctccctacagtccagtggtggcggtgggctgggcaggaaaaccataaccacctgcaaatgtcatgtggtttatatcacaccttcacttaacaccctcsccctaacaacctctacctggcartcttcatttaactccaaactcaggacctcaatccyctgtttggcctgtgttccacgggacaggcatggggcacagatgtctgttatatataagggacaaatctctgggttggtcactcctggattccccagcccggaccacacattcaggtgcatctcccacacaggatcattctaagggtatgcttacgttaccgctattggggtgtgttcaccctgcaggtgcagagatggcaaccgaggcagctgaggatcagggagtggaataacttgcctagttctggctcttcccatctaatgtggctgcactagatgctgttaggaggaggaggaagcctacttttgttttttacccagtttctgttcaaaggtcgtatttcatggtgcctcatcacagtatgttcttatatgccctggcaaacagaaggtgctcaataaatgctagttcatctggtcccttaatgaatactctggcttcgtcatcttccctaggctttggttaatttggtgccctcttttgccatttctgcaacccttattcattgctgtcaactgctcgttacacagcattgcctgtttcactctgtacaggtgccaggcgtctctcagcttctcctctctttcccatccaactgagcagcaccaataaatagataagaaacctgaaggtctacatcaaatcagcttctattgctgcaaaaytcttctagctaacttcattctaaaagctgtctgaaatatatttacttacacccgagaagattcaaaaacattaccgctgaaccccgatgctttgggaacacatggtgtccttggccacttccttgcttgttaccttgtccaacagctgattggcatagtacagatgtagacatcaagtaattctatcgttaaaggattagtcagcctctccctactccccacccacttatctcagtaaggtttagtcaagaagttggaaattaatggggaaggaaggttttgggttatgtgtggatttcatttatccatgctatctcttccctccattagcatggttaattaagagttgtcaatacatctttgttggagtatttgattattttttcaacagggaagattagaatgaagtcttcagatctggcaagtgtcatgggacttgtaaagtaaattgcaggttaagccctcattttgatctctgggatgagagcaagcaccgtttcattgacatgtcatcagctatgatctgagggagcacacagaggtgccctttggggaaagaggggcatcttgcacttgtctcccacattgaaagggtttattgcacagtgagtgtgtgcaagtgaacaaatagcagatgggttagaatggacagaagctagctctgagcacctcctgatttatgctttatttaaaaaaaatcatatgtatgtatatgtgcatacacatacattgttttgtatatatttgtcagatggaggtgtgtgtaaacaaataacagaaatgagttaaaattgacaagttagcttggtaaacatcttgatttataatttattaaaaactacgtgggtatgtatatacatacagacacacacacttcttcaccacctgaacaaaaatcccttttgaatcatccttcttgccttccaaacaagtacactagcaaacacttttcccagatggcaaatgactatgcccgttaggcatttcttttagcatttgtgttgacaatggcctttatttttccttctacttaagggctctcacgttctagaatacatcttaccagcgattaattatgccttgagattgccaggagacgtagacgagcttttattgttttagccactgaatatacctctagataacacaatacatatttacagtgacaagctttgtattatttataggattatagcaaatcatcaaaaaacaacccaaaaagggccacttagaccaacatccttatttctccctcggcttcagcattgaattatgcatgcattacaaatggcaataaggagtaaaggtcggtttagaacaacacagnnnnnnnnnnnnnnnnnnnntcggtttaggaacaacacaggattgcaaaattacaccatttgtttaaacaacattcattattgattattcagcataggggctgatagaaacgcaaacagtggcagtaatatcatctatttacgtaggccctttataaatgtgggaccataccctctgtttagatcggaacaattgttcaaattttccagctctgttttgcaagaaagtaaagatgaatttggcatctacttccttgtgtcttttaatttttgaaagatttttggtattctccctatatcactgaagagagggaattggggttcagatggattaagtaatttacttaaggtcctgcttctaaagttataagtactctttccatcatataacacttagcatgtctgaagccagtaatttattaataatagtaatgataataattataaccatatctaatacatattaactcttattttaccagtccatgcacaaagtgttttgcatgtgcttcgactttcagcctttacagaaaccctgtgaatagacattattatgatgttcgctttatagctgaaactgaggtgcaaaggagttaggtaccctgctcaagatcactgggttagtaagtggcagaactggatgatggaagtcatcactgtgttccagtatctgcagaagtgtcacacttttgtgctttgaccgtcttctcatgacccatgaatgccatgatttcacaaacctgttcaaacagtattggtttaatggttgattcaaatgggtgttccaaagatatcgtaaatatatttaggatattagaaataagatatttaactttactaacataaaccttcaatttagttttaaagagtcttagagcagcataaacaacatgactttcaactaaaatggaatttactaaataaaacccaagagattaattgtaggagctatgtcctggtgacttgggaaagaaaaatgtaaggtggtaagcttacgtacatgctttcggcatacacttcccacctccagcctcgcattcccctggtacaactcaacaggcatttcattttgccttacaaattgagtgcaaccgggaagctcatcgcatagctgcttactcagaaaatctggtgtagtggcttagctagcataacttttgagaggtctctgtgtgatggtcttttttaatgtctttcgtgaagaattcttcttttttttttctgagacaatgagttgttctgtcactcaggctagagtgcagtggcgtgatcatggctcactgcagtcttaacctcccaggctcaagcgatcctcctgcctggtaggtgggactacaggtattcaccaccaagctcggctaaattttttttgaaactatttgtagagattggtggcagggttggagggcaggtctcattatgttgccagggctagtctcgaactcctgggctcaagcaatcctcccacctcggcctcccaaaatgttgggattacaggtgtgagccaccacacccagctgaattcttctcttgatcattaatccccaccccaccccaccccagaaaatccatgttatctttttgcttagaggttcaccacctctgttccatcacttttctttttcttttctttcttggttttttttttttttttttgtttgacacagggccctcactctgtggcccaggctagtatgcaatggagcaatctcagctcactgcaacctctacctcccaggctcaagtgatcctcccacctcagcctcccaagtagctgggaccacagcctcctgagcacccgggtgcatgccactgccaccatgcctggctaatttttatattttttggtagagatggggtttcactctgttgcccaggctggtctcgaactcgcaagttcaagcgatctgcctgcctcatcttcccaaagtgctcggattacaggtgtgaaccaccacatctggccaacttccctttctaagagccctcttggggctctgatatgcacctctcatacctcagccccagtcagggttgttgaaaacccactgtctgcccagaggctgggagcacatcttggtctgcctggtatggagggctgggaggaggattgcaggaactgcttaagaggcctcactttgcaagagcagttcaggatgtgtttccagcacagtttccaacatgtgccacccatggcttcccctttcatgttcctggcctttatgctaagttctcacattgttatttttacaagtcttttccaaggcctctgattttctagaccatttaatgtttgccataacccataagggtataactgtcttggcacattcagatcccccgtccccctgctgtccttctagtcagtttctggcacactatgtttatgagcttacagaacagctcctaggttttcttacttccaaaacagtgggcaagaacagctaccttttagaagcaggaaaaaggaacataatgaataaacctaaaggatttaaaaacktggaagacactaagaaactatattgccgagaaagagaaatgtaaattccgctggataaattagcgtttgcggttacttctctctttgttgcttaagcagaggagaaacagaagtcatagcaaagagagaggtagctgcaaaagctaatttatccaaaagaatttacatttttctctcttggcactatagggggcatgtttactctcctgatgtcttttggggaaggcgaggcacaaaagaagggcatcttcttccttcacacacacaccccacttaggaaaatacgtacacttgagatgccagagacacacccaagtagaacacatcccaagaacagtcaataataataatacccatcatttattgaacatccacaatagccagacatttttctagttcttataaatccatgtactcctcccagtagctttatgaggtcttattattctcattttattgatgaagaacttaaagttcaaagaaaggagtaaatcacgaccaggcacagtggctcgcgcctgtaatctcataatctcagcactttgagaggctgaggtaggtggatcacaaggtaaggggtttgagaccagcctggccaacatggtgaaaccccatctctattaaaaatacataaattagtcgggcatggtggcatgtgcctgtagtcccagctgctcaggaggctgaggcaggagaatcactcgaaccygggaggcagaggttgcagtgagcctagactgcaccattgtactccatcctgggcgacagagcaagactccatctcaaaaaaaaaaaaaaaaaaaaaaaagtaactcattcaaggctacacatttactccatgaagtgagcacacttcagacttccagtcttgtgtggcctgtctaccacaccatgagacttcatgtctctcctaaatgaggagaaccaaagctggaaattgtcacyccctgtcagcccacagcactggtttctaaacctactggcctctaccgcttcacttctcactgtaatctctctgaccctaccttccagcttctcttgagaacttgactcttaaattcattggtgagaaaggaaatttttgctccaataaactgggtagctcagtccaggagagaaatgtactggactcagacttggaggacagagctttgtgaccctcctaggcaatgtaatgaccctctcctggcctcaattaactgaggccaggagagggtcattagcaaactgtcctttgctaaatgggactaatgggaagaatagtgtctgccaaataaggtggttgaaggattggatgagactgacatttcatttgcatttagtgaatacttgttgaatgactgaatgaatggttgatgtacagaaacatgaacagagagtagagcagaacattggtgaatggtagtagattgcctcagacgcccccctttagaatcacacaagctgtcatctgtgattgcatacctgtagaagtctctatcatttcgtagtctatgtaaatgttgaccaactgagttgttcagtgtacagactgaacaaccatacagggaatccctaatctcctgcactgtgagtcaaagagtcagacaggtctagatgcatttgcttcaggtgaggccaaggcagtctactcttaatggcacattaggctttggacttgaggccgtgtcttttacatttcgcagcaatcagaaggaatggggtcgccccatgaacttcttaaccacatacaggctcgtggcgtggggtcttcatctggctactagattgtttaaagaaggatttttgtgattcttctaggctgacacattgcctgtcatctgttgtttttctaatcttctagtaaacatttggaaagtgaaggtttaggcatgtatgtttctcttatgtaggaaggggaaataaggccwtgagattgcatgagttttctttccaagtttgtgcagatctgcacaatgattgaaatatttgcaacctgtagagcagcagggtatttatttggcagcaaacagtattgatggattcggggaatgccatttgacagttacaggctcccgtgaggcggtgcaggctcctccgagccagggatggagctggggattgagtgacacaagactctttgggtatstctcaaacaatataaatcaccagcaaaatctcactcctacaaggagaacctgcagggagctccgtgggaggcactgctgtttactctcctcattccccactgcaaccacgcaattaaaaccaaggaatggaatctgatgtctaccgcagcggttttttccatctccattccttctgcattgggaggcttaaaaaaaagaaaaattagatcccagattctttattcttttggaaggatttgaaacgattatcactcatgctctgctgctttgaatggaaaagtgatttgataactttcaaaactcttagccttctaagacttagattctggtactatctcatttatgtgacgtgggacaaatagccactctcttgcataggattttcttttctttctagaaacaggaactgagtatgtttccaatatttttttatttctcctaaaaaacatcagagactatatatataaaatctcacaaactttgtttcccagaaaaacaactatatttaaatgcagctcatactgtatgtaagtatgatgtaggaaaatctgttaattgtgtgacaattatgacttctgagctgctcatttattaaaatattctccctataattaaaaatattttatttcggagacatggctccattaattgcacatttcctaatgaagtttgaaggaagatttaaaaatcannnnnnnnnnnnnnnnnnnnnnnnnnnnnnnnnnnnnnnnnnnnnncatatcatagcattaataacaaaaaaattccactgtttatttaacgtaccagcaaattctaccgtatattgtttgctctccgtttggtgggactaaaaagggatttaaaaataggctatatacactgaatgtagtttcactggaagatttaatgccaacatgttcttttttggtattaacatattgcattggtgtgaaaactaaaatgccttcagcgatgatcttttcctttggaaaactagattcccactcggatgctacgaggggtaatctgtgctaagtttatggtgtgtctgccagggctctgctttaaaaaacaaaacaaacccttttggaggccttgacagttccatggaattcctaggaacagcctagaaggtgaatgatgcagcccagttgtttttattctgagtttggcaaaaatgatagagaagaaaatgtacttttatgtgttcgttcgacagttaaagagtattccagattcctccctccaaaaaaaaaaaaaaaaaaaaaaaagggcatattccctagccaaggcccacatggcttttctttactttaagtactcctcatattatcttgaccttaaagtttacagggtaaaagaaacatttatggaacagttaagaccagttagaacataacgacttgcctcattatcacactccacaaatctccactttacagagttcacttccctgcctgctttaaacatgtgtttggcctgcaaacagtgttactagtgctcgcatatggaaacagagaacttctcattccttacctcagacgtgccaaaaataagaatctttaagaactcataaagtaatttagcaccacgttaataaaagaagcaccattttgaattagttctgtaagtatgtgtttgagktagaaatagagttttaaaaaactgtctgttcatatagttcatctgcttaataagtaaacagctctttcaaatcaccaagctcaaataaaacaaacaaataatgggacaattggcaaaactctaaaaagtgatacaaaagaccaagggatatttgaaaaatgtttaaagttattagcagagaagacacaatttagaagagagactgtattccattttatttttatttatatttatttttgagacagagtcttgctctgtcacccaggttggagtgcagtggcacaatctcggctgamtgcaacctctgcctcccgggttcaagcaattctcctgcctcagtctgccgactagctgggactacaggcacacgccactatgcccagctaatttttgtagagatggagtttcaccatgttggccaggctggttttgaactcctgggctcaagtgatccacccaccttggcttcscaaagtgctgggattacaggcatgagccaccatgttcgaccccatttttataaatgtaaaattaacttaggtttaaactattaatacacaaggttgagaagtatagaagtgggcattctaatatactgtggatgggaagaacaattgattttcatagttctgagatataatttggagatctctatcaaaagttttataaactttttttttacctaggaatttcatatctagaaaaatattgtaaaggaatatttaaagatatatccacaaatttatgtacagtgatgtttatgcttatattatttatagacttttaaaaaacttaaaatatttaacaattgagttattttatgatgatctaaactgcataggataaaatcctatgcagtttacagaaatgtaaactaagtgcttcgttaaatgaatcctagatcccgtgccttctgactgggtgagacctcccagcaggggttgccagagaacttacacaggagcgtttctgctggaatcagctcgatgcctcttgaggacagagactcccagaggaaggagcrggcagccatccttgctgtgctgcagcctccacaggtgacacctcctggtgtgggagggacccaggtgaacagggtctggagtagacccccagcaaactacagcagtgttactgggaagaggggcctgattgttaaaagagaaacaaacagaaaacaacaacatcactaacaaacaagttcccacaaagaccccatccaaaggtcagcagcctgaaagatcgaagccagataaattcacaaaaatgtaaggctcatttacattacaggctcaggcctgtaatcccagcactttgggaggccaaggcgggcagatcacttgaggccaggagtttgagaccagcctggccaacatggtaaaaccctgtctccactaaaaatacaaaagaaattagctgggcatggtggcaggtgcctgtaatcccacctacttgggaggctgaggcaggagaatcacttgaacctgggaggtggaggttgcagtgagccgagattgcaccactgcactccagcctgggtgacaaagctatactccatctaaaaaaaaaaattagttatctctgccctttgggaggctgaggcaggtggatcacttgaggtcaggagtttgaacctagcctgggcaacatggtgaaaccccgtctgtascaaacatacaaaaattagctgggtgtggtggcgtgcctgtaatcccagctattggggaggctgaggcaggagaatcactcgaacccgggaggtggaggttgcagtgagycgagatcacaccactgcactccagcttgggaaacagagtaagactccatctcaaaaaaaaaaaaaaaaaaaagttattgattaaaatttaaatataaattacaagtaataatgaaagtatgaaatttttattgattcataaatatttggttttaatcaaatatgatgtgaagctttaagtgaaattattgatattcgaagtttttttttgaatgtttaaatcatttcacattcacattttttaagtaaaatgaaacaacttgacattttagcatagaatgtttatatggtggccaaaaaagcagattggtatcatgctttatgtgtgttcattctagtcctgcacgtgtagaaatgtaagattttaatgtatggtaaggtagatagatagatacatacatacatacatacatacatacatacatacatacatataaaattaggtaagaggatacttttaatgtatggtaagctatgattgcaccactgcattctagcctaggcgacagagcaagaccctgtctctaaaaataaataaataaataaataaataaataaataaatattttgtaaaaggtatcatagctgtataaaaagaaaagactaaaaagaaagccactcaaattccatttctcttctgcagatttttttttagttttgtatttcatctgtgattgactgtgtatgtatttttgcatatatacctgcaagcatttgtccttttaaccttaggaaaaaaagtctgattgcaactacgtgtttgggaatcagggagactatggaagaacaatctcagatctcagcttgaggctccacttgcaatatcacaatttytaaaacatgttgtatgtgggcccatttgccatgtgtgtgtgtgtgtctgtctatctatctatctatgtatatatatatatatatatatatatatatatatatatatatatagttataatgtggtgggttctcgaatcacagttgtaattcacatttttctccaccaattctgataacttgcattaagaaattgactgtgtaagttaaattttagatcaataatgcaaattggaagacctagtacaggccaaggcctcattatatctgagtagggctttaagaaagcaagaaagaatcgcttgaacctgggaagcggaggttgcagtgagttgagagcatgccattgcgctctgctccagcctgggcaaaaagagtgaatgaaactctgtcaaaaaaaaaaaaaaaaaaaaaaaaaaaagaaggaaagagggaaatatacatcctcctatccagggtgaattacaaatagtaccagttggttgtaagtggatttaaaattactttttactgctaatggggcatctgtcttcattcaacaaatatatttcggtctctgttagatacagtgtatctctgttagatacagagcattctgttagatacagagaatctctggtagatacaaagtattctgctattctgatcttcctgttagaagatcagatttacagaagtctacatttgctctcaagggaccttcagtctgtttggagcaatctctttattaatttatttattcagtaaattttattcagaaccagctatatggcaaaccctagtccttatgctgaggtttcagagatgataatgggggcagatgcagccattcagttgacttcctgtggacaccagagatgacaggcccctgtccccagcttaccatccagcatataaggcatatatgcccctttccatgaagtataatctaatgagaacagttggagaaggtcaggcaaaggggacaggacaggaactcaggaggaggggatatttagacttacagacctgccctacctaaggtcccacagatggtctgtgatgacagatagcccctggactgctaagactcggatctttaaatataggcccatctgggctgtggggaggtgacagcctgagaaaaagtcattcttagatgcccttactctgttgatcataaaagtaggagctgaaattctcatagcctgagaagctatttgcagcattccctgagggctttgaaacactatcaaacaacaaggagagacaaaacagtttttagccctgctcaactctcatgggcttgccttattttttcagggcatgctctgtctccatcccttggctctgctttccttacattggtcttcttgggcatccgtcttccattccayagtgtagcaagccagaagctgggggaaacatggtgcgtgcctgtaatctcagctactcgagaggctgaggcaggagaatcacttgaacccaggagatggaggttgcagtgagccaagattgcacctctgcacttcagagcgagacttcctctcaaagaaataaatacactgtgtcctctcagcaagaccaggacaacagtgattctctttcctcaaagttccaatcagtgcccagggcttcatgcatattggacagacctgagtcatgaggccatctccgattggtccatccagggccatgtgctcaccccttaattcaggatgtggggtccggctcccctgaagtgcacagagaagaggggttgcccaaaggtgaatggggagaaggggatataagtgcaggacaggtaagaacagcaaatgctcattaacaccatgcagtgatgaaacgcctcttaatcaacccttgctggctgcagttgatttgttacttaccgtgaggttatcatagctttgcagagactttgtgatggggctgtcaacagagagagagagagagaaagaaaagaaagaagtgccaccagtccattttgttccactcaaatgtagatcgtaatttttaggtttgtaattactgatgagaagaatgcctgagccagaacttcccagagatttatctgccacttacctggagtaagtagaaaggatatcagttttccccagtacacctgcctccaatgaagccaactctcaggctctagaagtctctgccttgggatggattcaccagtgtgcttctcaggctggccagtgtggaagcagccttgctgtatttcatcctttaaaaatacagcctgcttgccatctcacgacttttcccttaatgcaacaaagaaatatgtgtttggctgtgaaatcttttttttttttttttttttttttttttgctgtggagcgcaaaatgttcatttatctctggatggtttgtttctggccacctgccctaagtgtatctgaatattgtaacggtgatcacttcttgagtcttggtcattacgaagtgacatttggcatgaatttgctcatcaccacagagggccccagggacccacttgggagaaggtgagttatagcccacaagataacatttctcctggtgactgtcctgaaagcctactttgggccaccacatcagtgtgttgggagatgagttaagaggttttattcttatacatgcggaagaattatgccttcttgagccatgctcaggagatgtcagccttttccattgtctccccgcycccaccgccagccctgcttaaattatcccctctttttaaacaraatatcctaatcttgcaagtggcatatcatgttccttcttttttaagagagaaggagaaattcctgcagatcatcagggactgaggctaactgaaactttggaatggatacagtgctactctcagctgaaagcacaaatcacttccatcacgtatatgagattcctacttgcagcactgcagaggggtgataagcaagagttgatcgatgacagaacacccacccaatttcttgactcattcttcaacgggcagggtctatacatgtggtatggctgcaatgtttgttgataacccctacattcacaaaacgggcgcatgggaacttgtttgctgccttctgccatgtgaggacacagcaagaaagcacatacaggaagtagagatggagccctcattagacgccagatctgctggtgccatgatcttggacttcccagcctctagaactgtaagaaatcagtcagtatctttgtttctttcctttctttttctttttctcctttcctttctttttctttttcccctcccctcnnnnnnnnnnnnnnnnnnnnnnnnnnnnnnnnnnnnnnnnnnnnncctttcctcccctcccctcccttcccttccctttctttctttctttcttttttttttttttttcagacagaaatctcactccgtcgtccaggttggagtgcagtggcacgatctcagctcactccaacctctgcctgccgggttcaagtgattctccttcttcagcctcccaagttgctgggattacaggtgcatggcaccatgcctagctaatttttgtatttttggtagaaacggggtttcatcatgtaggccaggctggtcttgaactcctgaccctgaggcccaccttggcctcccaaaatgctggaattacaggcataagccacctcacccagccaagaaattaatttctgttgaatgtatgttgttatagcagcctggatggactaagaatcatgatgaaaagttgggttgctttcatatttagaaatatcttggaacgggcaggcgtggtggcacacgcctgtaatcccagcactttgggaggctgaggcaggtggatcatgaggtcaggagttcgagaccagcctgaccaacatggagaaaccccgtctctactaaaaatacaaaattagccgggcatggtggtgcatgcctgtaatcccagctacttgggaggctgaggcaggagaattgcttgagtctgggaggcggaggttgcagtcagctgagattgtgccgttgcactccagcctgggcaacaagagcgaaactccatgtcaaaaaaaaaaaaacaacaaaaaacacgaatatctttttttgtcagctccatgagggcacaaagttgtatcagcttttttttttcacagctgtgtcttcatcctaaaatagtttctagcacagaacaggactcagtaagttatttgtcaagtaaatagactccttaataaattgtctatcctgtatccagtacaatgcttggcctaatatacatccagtttcatttaatcctcaaaacacattgatgaagtgggtgttaatccctattttacagatgtgggaattgaggtgtagagctgttgaagaacttgcccagggttgcagagctctttcacaggggcagagcatgggctgaacaccagacctgtctcacactaaaggtgaaacaatttcccctgcatcaaactgtctctgatatgaagggtctacacactgtggtttgaaggtcagatgtggcctgtcatgtttttgtacagcccgagagctaagaatggtttttacatttgtaattgtttgggggaaaaaaccaatagaataatgttttattacatgtaaaaattgtatgaaattcaaatttcagtgttcataactaaattttaaaaacttttattgaarttccagagagatctgaagtagttttattggaacacagccctacacaccttcatttataagctatctgtggctacttttgcactatgccagcaaagttgagtagttgggatggagactrtatggcccataaagcctaaaatactctctgctcctttccagaaagcttggcaacccctactatcatctccacgtctgcctttgttcttcttatttgtcccttccctctgaaggcaggatagcatagggtgaccataagactctctggaactagcctgcttgagtctagtcttggctctgtgctgactacctgtagggatgtaggtgagcttttttatttttctcaacctcagattcctcatcaaatggaagaaataatgagtatccactaccttgggttgtatggaatgaaccaagttaacttagctaaactcatcgcttccaacatcgcctcctatgtaataagtgcttgataaatgcaagttctattcttctattctctctctctctctctctctgtctccctctctccccctctctctcatagtgatatggtttggctgtgtccccatccaaatctcaacttgaattgcatctcccagaattcccatgtgttgtgggagggacccaaggtgaggtaactgaatcatgggccccagtctttcccatgctattctcatgatagtgaataagtctcacaagatctgatgggtttatcagagggttttgcttttgcttcttcctcattttctcttgccaccagcatgtaagaagtgcctttgcctcctgccatgattctgaggcctcctcagccatgtggaactgtaagtccaattaaatctctttttcttccatgtcttgggtatgtctttttcaacagtgtgaaaatgaactaatacacatagacacatacacacatgtacccacacacacgtaatttttgtatctaagaaaggggagaaatactttttagttgttctttctgcttcatttatgtgtggagtgcttaatgtggtcacacggatattaattgcatgttttcttgttttataattaagaaataaaaatgaatcactctgacttttcgcttcattttctgcatttgcacaatttggatattttattttgtagtctattaaaatgtgaaagtcagtgtaaagtgtcagtagctttcatgagtgttcttaaaggaaggccatctgattggaatgcattgtatctgtccttccctcttgctggggtcagcccaggactcgaggggaatgagcccctgaggaaggctcagtccttggcagcgaaatccaggcatggaaaccaagcctgagacatgagctgcaggacatctgacactgtcttttaagagacctgcctgtgaggtcctcatcctgctccctacactgcttcagatccacttgtccacttgtagtgagggatagtatctgttccacctgattgattgattgattgattgattgattgtgaggcagggtctcactctcattgcccaggctcatctctgcctgccgggttcaagtgattctccttcttcagcctcccaggagtgccatggtgcaatctcaagtcactgcagccttgactttccaggctcaagtgatcctcccacctcagcctcctgagtagctgggactataggtgcgtgcccccacgcctggctaagtttttgtacttttagtagagacagggttttgccatgttgcccaggctcatctcgaaccccttgactcaagcgatctgcctgccttgtcatcccaaagtgctaggattacaggcgtgagccgccgtgtctggcttgctccacgattttcctctatgaattccacctttcccatggtgggaccaaggctggaagtacttcacaaaggctccatttgaaaagtggctacaaataaaagggaaaatatagtattccttaaaaaaaaagtagcattctatttttccccattggtaagtagtacaaatttgagaaagtgtaaatttgaattccttaataatcagatctctgcaatgtgttttgcttttatcatcctgggttgccatcttggccaagtgtagattattctgctcagggtagccatactgagatcctggtgtgcacaggaaaagagctaacctttgtggatgaaattgtagagtcactacctgcatttgctgtagctcttacaattattttattcttggaagacatcgagagcatggtccaaagctgcataggttgcaagtgggtagaggcagaatttctctccaggcctggtggattctaaagctgtttactcttcacccaccatttcctaggtctggtttcttggttaaatacgtggaagagtggatggacagaaagacagattgatcagttctccacaggcttccccaaactggccaggtagaaataagctaagcaaataaatgacttccccattttataattttctgcaagtcacataagccttcatgttgtttatttcttggttttagatttttttaattataaaagaacattattatacattatttgaataattttttaaaattatagagctgtctaaaggaggcattaaaaaaaccctttctattccttcatctaattctatccctctgaggcaaccatgattagtattttgtacttcttgtacatcctccttcatgttaatatagatgtacacatatataagattttgttctcattttctgaaataagtggacacatactccaccatccccaggtagtgtacagtgtgtgccctttcaggctagtatgtacagctttaaatcattcctttacagagctgtgtaatattccacaacccagaggagcagcttgaagccagctaaagtatgtatatccaagtggaattaagagcttcatgcgtagtttcttgattttgattaagaatctttcttaatagatatgtcagacgtgactttatgctgcaagacatagcataggtagaaatttttatgtcacaggtgggcctaattaaccttgattaatgttctgcaaacccggatagactggagactcagaaagggacgcaaaagctagyctggttcccatgttagtccctgctctgtgagcagctgccacacagtcatgctgatggctcctgcagcagccattctggtttgactgtgctcgtgctgccctgtgacatattgtttaacacagtgagttatgacacagggagcgaaatcaagacttcagccaccgatttaacaaactggtgactcggagatcagcagtccggcattgccatcctcatcaaaagctctatctttatctaaaatttattagccaacttcaaacctgtttgccagctcactaatggaagccttttgaatcaatttgctcctctaatttaaacagcatttcaatgtatattgtcgaagcagaaaggagttgcagcttctggccagtagaattaattatttattatccttttcataaatactttccgaggccgacataactgaaaattgctcgggctgtttgaaaacacacacacacagttttccagtggctaatttgaaaaatgtcaccgtattagttttcatttacatctgtcaggaaacatatctatacataaggaagtttttttttttttttttttttttttactttcaccaggtatttttttgtggagtatgcatttaattcacatttacaaattggtttctgtttttaactaaaggtactttttcagcagaaatgatgtgtatgatgtcatatctaacttktgatctcactggtatttgatgttaagcctcaaaatcatcaaattttttttacggcactgaaaaaaatacataaatctgcttgattggttcatagaaaaagacccctgtgattaaggtaatgctagtttttgcattttctcctagctgtcattggttggacacagtgatcctcgggtctcttgtgttttcacatgtcttgggaacagaagtgctggcagctttggtttcaggccatctttccaaggaacgttgtctagcaaagaaacttgcaaggtacagatagtgtctccctcaggagcagaggacaggatggctttctttccagtataataaagacagtgcctccttccaggacaacggtttggcagatttgcttgataaaggttggggtttstaagcttggggctcytcagccatgactgaaacgtacyatgagcacggcatctaccgggctgttccacatcctccctgtgkgactaggggccagggcaatgggaatcagtgcagaaataaagctcatgctgtttgctstgccatgagtaacgaagtcctctrtatctgatcctgggtctcctgttttctgctagcttcctcaaaacttggtagctaactcattaacttacaaggaagaggktgaacgtgtagacccttcacagtttgaaaaatcacctgatcaataactgagattatgaaaaggtaggaatgaaccaattatggcccaaaggctaactccagccagtagccttttatttatgacccgttaaaaaaaacaaaaatgaacaaaaaatccaaagaaggctgtgtgccagagacgatacgtggcccgaagatgaaggtacttaactatctggcccttcacagagaaaatgtgtcaaccctttcctgtttgcgttcaggtcaaatagttgcattgaaaggcctcatcttacaaatgaatcaatatttagtggtttgaaaatatgttgtttaatttggggcgattcaatatcaaattaagatttttaggtttatttatcgatctytagaattacatcaacattaagctaattactttaaattgtgtttttaagtaaccaagaatacatctgtggacgctgttctgtgccatcttgagtcacgtttttaaaacaattacctttgatgatttcgtatgttatcccattcacagatggtttttttcgtccacctgagtttcaaatctgttgtagtcctggaaattttgcttaggttgaaggaatgagtgcgtgtatcttgtcaaaggaaatcacaagcccatgtaaactcgctcttgcttccgtcacctcgtgctttgaaacataaccacaatgtgctgaggtttcacattgttacatcctacaagcgtgcttacctgcatcaccttgctgggctgtttcagcattggaatatcactgggaatctcaagttcccaggagccaaccacragagcttcacagctcagaattttcaagatgtggatgtaggcagggagcctatgtagtaattcaagtaarcatctcttcttcttgttttccttataggatgatagaaggtcagtgcttgttcaccccagtgaggtggagcctctgaggtgggaggttttctctcatccttgagtttatctttacttcctggtcattatgcaagttaatttttctagcagtgaaaacagtcacatgggactctgcccagcgagggcgttgggaggcctggcggagaagcagttgtagcatcgtccagccttctctacctaacaagggaatatgtgaggtagggtaggacattttggtagcagtcacacagcccaaagagcatggtgaatttaattagtctgccacacctgtatggccttaygttttccgggataacttaacaagcattgtgtgcagccaggtcaggcagatggaggttctaatccaggctgcacacctcatcagccaggagactacagataagtcagccaaacttttggagtaacaagtagctcatctgtaaaacgtggatgttccaatttatgtatagccgcataatacattaccccaaaacttagaggcttaaaacaacaaccattttgttttatcttgtgatttctstaagttrgggctcagtggagtgactcttctgccccttgtggtgttgactggggtcagtcagtggtgctatgctggaggatgaattggactggcacttcagctggtccaggatggtcacccatgggtctggcactttcacgaggatgactgggatgcttggctcagctgagggactcttrcccagagccctacacatggcctttcctgcatggcagatatagggccatcagatttcttacatggtggctcagggctcccagaggattccaaaagaaagtaacaggaagctgccagtttcttatggcctggcttaggggttggcacagcatgactgctgtggactaagcagttacaaaacccactcagattcaaggggagcagacatacacctcactttcttctggtagaagtgacaaagaatttgcagccatctttattccaccacagcaggtaataatagcatctccctcattacctatagaataactccaaactttctgatgattaagtgagatatcatgtaaagtaccaagcaccttggataggcaatgggaaatgttcacaacrttcccatttttacctataacagcagtagcaataatgctaatagtaatgatactagtaataaratcaggataatgctgtttttaattcaccacactgtatgccatttgcttaaaatcagaaaggactcatcggtraggagtagggtggtagtatcattttggtctgcctttcacccccacaagacaacatccttaacagcagctatgttgaaggtttaggagtgcttgtcattagggtctcatttccaaaatctgggacataataatagatggttactgattacagggatttttgtttgtttatttgtttgtttgtttcttcttgataatctctttcattcatcattccttcatttccactcttctaattctgggcattatatctttgtcagagatagagtcttttagctgtttcttcacctcccaaatccttctcaagtctgttctccgcctgctgtgccttcctatagtgtagctccaattgccttcatccttagaagacctttaatgatatcctatgccaaacttcctagcctccacctgtaccctgaattggccctagcctagttktccaaactttatccccaggtggttgaactttctaagtttccccaagctgatcagtgttttggggtggtatggaactcagaatagatcactttttttattgactaactctgaccataagtatgcttctgtgcgagcctgacctccacggtaccaggcagagaacaacatgtatgcagagaactcattcactcaataaacatttattaaatccaagccatggggatccataggaggaatttagagcagagttgtcgaatggtcagatttgcctttcagaagaccgttctggcagccatgtgagaaaggagggtggggagacctgctgggaaacaactctagtcacccaggcacgaaatgatgagcccttgagcaaaagtgattgcagtgagtacagggaggaagaggaaacattttgatagatacttggtaaaatcaacaagatttggccaacagctctgaaggggatgacaggcgtggtgaatggagaaggaaggacagaaggctagtttgggacttctggcttggacagtgtattgtgtagtggaaccatcgctgaagataggaggagtccttttcagtcatactgaattcatgacgcctgtggggcacccaagtggaagtcatccattggcacctggatttagatctggcactcaggagggatggacaggatagacattgaccagacacaattatattggcatatttggactggagaacccagcatctgacttaaagagtctgcttctcttcaaaattgcttaggtgttttcaaactacaaacaaatacactcccaaaacctcaatagattctcccagtataccctatattttggccaaactggaatcacatcctggtctccccaaacactgcttgctttttgttcctttcttgctcttccttctgattgcaatgaactccccatttccagtccccatcctccaatcccttcatgtccagctcctgctcatcctttgaaacccactggattttaagattccatctgacaagaatgatcactgttccttccagttcttcaagcactttttctgtttttgatgggatttatcacttgaaaatgcatattatagtaatttctgaattcatcctgattctcctactggtttctaaactcttcagkttagaattcctgttgratatccctctggccygaaattcctgaatgagttaagcaggacacctagaactatgcagaggtaataccttccttgacctgtcccttttctgggtcagtttgcccttcatgatttcggcaggagtgtgtctccttccattctggtgaacacatccaatgttcaatgttgctcatcagggtaagagttctaagtccctatgtcttagagacaggggttatctagctttgtcttctgcattggcttcaggcttcacatccttcctggacatgttcaatgctgctttcgtttcttgggcgagggccctagaatcaccttagacaccttgctctagacatggccccatcgtggtattcccttttgagaagacaaagattttaaaaattctttctcccttaatgcctcatgaatgcccaagcagcacttcatggaagtacactgagtctctactgcttgcagggattaaacataacattctcaacagtggtaagagagcctttcccttctctttggctcgttttcagtttttattaatttcctgtgcttctggttcatgaatcccaagtcatgatgtgaatcagttcagttcagcaagcactgagctcccaygatataacaggtttttttcttttccgagctgtggcccatgcagagtttactgagacttggctcttgcctttatgctttaaggatcctaaagagaagatgtaattataagatctaaaacgtggaggggggtggtgaattcagcctgcaggcatgtgtttgctgcccccacccccacatccyctttttttaaagttcgcataaaaacctggattcttggtttctcttaaaaaactggaaggtctggcacctttgctcccacatttcccgggcgcagcccttgactcaccctgtacggtggccgccccagttggatgatggggcttgtgcccaccgggtcagctcacaccaaccagcccctattaatttatacctggcccgctttccaaattgacattacctggctggtccgtacgcatcccctgcagtaactggctttctggaggtatgtgctgaggatctctttggcttctgcatctcaaaggatgagtgatttagccaggtggagaggttggggcggtatcctgaatgaaagaatagcrcagacaaaagtagtgagttgaaaacagaacagcatggcaggctcccagtaatcccatgagtcacgtgttctgcccacatggaatggatggtggagaagggaggagggaggaggttgggccagattaagcagattgtccccattggtccatttttaaatcttccttttggtatttgtcccttaaggcaacactttcagtctcagaaaaaatccagtaaagggcaaaccagtttgggtgaatttctttgtttttgcagcatgtctggtcccaaagtgggacctggagtccttccgacgaggaagtgcagcctcttgtcgaggagtgcactgggaggggaggctggacttctgggctctgctctgcctctaatctgctgcccagcatcagccttagcccagacccccaaagttcctgggcttcattctgctttgcattcatctcaaagttaagccttctggctggcaggggtttctgagacagwctgacagtattagcgtgctgcagtttcatgatggcaagaaggaggttaccaaagccgttttcatacaccttaactcatgagtggtagtgagtggccccaggtgggaagcacaggtgatttggagctggctaacctccttcctttggctcttactctcaccagctcttagacttggggtaggttagttagctcctcccagcctcagtttccctgtttgtcaaatggggtcatagagggtgagaatcagagtttatgcagggcatagcactagtgtaatgctgggcagagagtgagcatccagcaagtggttttgrcaatgataataattataacccaagcgacacatacaatttaatcaggcactgtgtgtccacagcgatgtcaaggaacaatgcacaaagcagagtttttccagtctcctgatgtttgagccctgcgcgagccccactcttctcccttttctcataactgctgtgagcaacctcaaatccttctggaagtaggttggttatgaattatgaataattaaagaaataaactctggctctgcagctgaaattgggatcgcatggagaaaatagaaagtccagtgtttgtagctgtgatctctcagttgcttgcatgaattgtgctttaagaytgtaaaattttagcccattaaaaataaaatctgttgctttccacccacacctggcaatttggtgagggacgggggctaggatatttamtgtctgaaagttttagggaggcttttatgaactgggccatctctccttgtccccatttttctttgcatctccgaactctcattaatttttcacaggcttgtgatggatagtttttatttattcacgtctgagattccgttgtgtgaaaaggactcattttataacatwacatattcatggcttgggatggatgggataaggaacttattattaatgtgtcactgtgggaaacttactctagttcatttgcgaaccttgttaaattcggtgtggtcagcagacccggtgaagttttggatacattctcttaacagagggcaaagagtttgctgttgcttttccttgattcagtaaaacaagtttaaatcttatttaaatcgtttgaagtagcaatttgaaaggggaggaaaaaaagggggatggcagagattaagtagagagagaagctccgattttcttgttgaatagccgtgtttcctcagcattctgtagatttttggccaggtttgtgtaagggatgaacgactctctataaaatgatgtmaggatcctttctttcctgcccattgccatttctagcattctctccttgagggaagttgcagttttctccctctgtgtattcatccttctgacctgtgctccggattccagggagttctcaatttggagctcataccgacatcacagaattccttgcctgggacaaatagagggaatattaacatagcatcttgtaaatcaaagctgggcagggggtgggggagggcacagtggggaacctggcccaatctgcttcagtgtgagcttggtaagaaggaagcatatgttgcatttagttctctgcaaagacaggcgctgctctctggcagggacagcgtgtagggtttgcatgatttgtggggccgtttcatgtttgcacggtttggcttggcttgggactckgccagtggtcactgcagtttaacaraytccccccgggtgtgaaggaaagcgagataaatgcaggaaaaaggatacattttgaaatctggaaattttacataacaggcatcagatttgaagaatgtccaaaatattacgagtcatagcacaacctttgctaacaccatggaaatttttaaacatggaatttgttaatgctgacttggcccaccatggggttaaaaaaagtgaatttctttttgataaccaaggtgatgatcttatgaagttgatgatggggtgtgaacggtgtgagtgggggacaaagcaatgaaatatcccttaaaatgcatcctctgatgatgtttccataatgccaaacatttgtttctctccaggatctcattggcggtttgctggtattatattgccatttatattggaaaggcaggcagtgcgaaaactgtagtctattaagagtttgtgagtgtgtgtatgtgtatacagtgaaataatatctagtgtaatgtgaagtgacagtcaaaattacagcttttctcttgccgcaagggtacttctctgccaagtatagtaatattgttgtagcagtgttcaaggttgtcagcaattctggcttactctgcagagagccataatagtgtgtggaaggaaggagcttcctgtcaggggaaatactataattttgatatatatttgttggtgccaaactgcaattaaataggaggtgttggaagaaggttttatttaaccagcttgaatttgttaattaattagcaaaaacttatctttggaatgcttcaagaaacagttctatgttgttctcataacttaattttacacaactgtcttttgtttgtatcttacagaaaacaaaataccaccctccgccagaaaagtgcagaataaaaattttccactagcaaaagaaggaaaaaataaaagatcttgaatagtctcatcaattacatcttcttttgtgggtatttcctggtcttttcatgttttgacttctatctcggtgatctgacagacatgtacgatttgcaacaacatctattatatgatttaatttatacctttatcagtttgcagttatgctttacgactcttcaggtgactaaagaaaaagagggtgttttaaagtgtgtgtgtttgtgtgtgcgtgtacgtgtatacatgtgtttttctgtgtacataagtgtgtgtgttttaaattgtttgaaaaacactagtccatctctattgtattatctgagggatgctagctcgttacttgggatagtaacaagtttcttggtgacaactcctcctcccattgtcaaggaagactgaggatgtcaccagagttcgctgtcaatggctattcagatgaaaaataccttctttttgaataagtagaaaaaccatgggggattgaaatagcaataatatattaaaagctccaaggcagttatgtgtgaagaaataaagaacagaacagagagattgtgttgttttaaaaagggctatttaagagtcttgaaaagagtgtgtgtgtgtagggggacacctccctctcatattaagtattttgcaaattaaatgagtttcattctcctataaaatatgagtctaatcacattttatatgattgtaaaatgtgtctacttttgtctctatctttcatggaaaaaagaaatattcccaaagtatattataaaaaataattaataagcaacttttcatcattattttctgaggttaattattaccctaagaaatcaatttcaatttcttcagtttgaaagactcatttgtgatggggtgtttccaaaaagagagttagttaaatgctatatggaagccttcattccctaaagaaaatgcctctgctgctggcagtgatttatccagagctgtctcacccatttatgccccatgccaggagaatgtatggaaaatgtaatagagctattagaatccagtgtagtagattggtaatagtaaggaacaacagttgtcttcacattgttaaaataaaagtgagataccctttaatcttcgcaaagggaaataactcttctgctaaccctcctgcccaacctgagatgaagtatcaggggatgcagtatggatgtattttcctgacgattggtcctkctgtcctgggacccaggtgtgagtgcatagggaaaagggaggagaaatttaatcctgtaactatctccttatggaaaacaggaaaccacaratgaatcaaatgaatccgtttcccctctttctgatcctctgcaaaagtcatcaaaatcactctgttctcaccaggcaactggagtttcgtcagctgagtctagagtgttccaggcagttacagctaatcatggcaggctctacccaactgggggaacaatttagctgttgtgggatttccctttaaattaaatatgttcttcaggtacagttttttaaaaccagtttttctcccccacttttaacctactttatcgtccattgctgggcctagaattgcatgtccattggcatggctgacgttatatataaatatttggaattgtagttgtaatgatagatattatatatatttcacatgttttaagattaacatattaacagtttgtgatattcaacaaagaatgcaataacttctgcgaaacaggtaagagaaacaaccagtcacttgatctggatattgagacgttacctgtaggatatgtattaggctgttcttgcactgctgtaaagaaatgcttgagactgggtaatttataagaaaagaggtttaattggctcacagttttgtaagtggtacaggaagcatagcggcttctgcttctggggaggcctcaggaaacttacaatcatggcagaaggcaaagagagagcagcaggtgacatggtgacagtgggaagtgacagagcgtggggtgggggtgggaggtgccccacttttaacccttttcctgtttaggaaaaaaaaagcgcagctcactgccagcgctcatttaattttacataaacatgctctttgaagctgaagcaaatgtgaccgattttcaaagtgataataaaatataaaaacagttcttggaattatttctgaacagaactaacatcagaatcatctgaatcatcagaattgtgtattttggaaaaatcggattcatcaaatgaatcttcagccaacaactgttcgagaatgatgttaacatcacatgcaggaatgctacattttctcggatttgacattttcagtgatggagaactattatattttgtaaatggaaataccactactaaaaacagaaggctataaatagaatgatatccttcgtttccaaagtcgatatgctagagtgatgtgaaaaaaataataaaagcgagatatttcatggcaaagcgatctcagggtaaacactgcacaccagtaagtattcttggggcaaatgggaaaagggttaaaatgaccagatctccagagatctcmctcactrtggtgaagacagcgccaagccatgagggctcygccccagtgattcaaatacctcccattacggacatgtttcaacatgagatttgrgcrgggacaaatatccaaactatatcaggatcccagcagactgggtgggtggaggttcagggatatctgggaaggactaagaatagctttttcttttagtagatcaggagtttcctcttacacacaaaaagctccaaattyaaactagcttaagaggaaagggtcattactggctgacaaaatgcgaagttttgtgcaagagtcagcaaagtttctctgtgatgggatatttaataaatattttggggccttgtagtgtttgttgccaactactcaactctgccctcatagtgcraaaacaggcataaacgayatgtaaaggagcaggcatggctgcgagaaactttatttatggatactggaatttgaatttcatatacattttcatgtgtcacaaaatattattctttcccccccgcccccaaccatttaaaaatgtgaagcatttttagcctgtgtgctgtataagaacacagccgtgtttggcccagcggttatagtttgccaacccctgcttagagtctagctttattcagagcttaaatatgtcatcgaggtcccctctttatttawtcccttagttttgatgatcttttatgggttatattcttcaaagggaaaattctctccraatggggctgccactggcagrcgagcactgtcccatcttggcttgttcccccagtgacaagaagctgttttccccactacccttggcccaaaagccacagggagaaccaggattggcctagttttaggcagacacctatccctgaatcagtcatgtccccggatgatgcggttctctgcagcctgggcagtcaaggctggagataattctctgcttctccacrgagtctgagaggccccgttccctaatggwaaaatgaggtccaattttgcaaaaggaggcacctggggaaacattctggacacacaaatctatagcttctaccgtcaatctgctatgatccttttatggttctgacgttgcarttttatttttgcatgtttctagagacatcaggaggggatcttttcgggatgtggcttcagaaaggagcctgttggatggtctcttactagtggtcagcaaagaacagttcttttgtaaattgcactgcattaagagcattcctgtttccatctcattgatacctgccttgcgttctgttacctggaagcacaggtcaaggtagtcttcttgttccactgatttgatgggggtcaggatgctttcagaaaggaaatgagaagagtggcttagaacagggaaaatgtggccgggcgcagtggctcacgcctgtaatctcagcactttgggaggcctaggtgcgcagattacgaggtcaggcgattgaggccaggctggccaatatgatgtgagaccccatgtctactaaaaatacaaaaaattagccgggagtggtggtgttcgcctgtagtcccagttactcaggaggctgagccaggagaatcgcttgaacctgggaggtggaggttgtagtgagccgagatcgtgccgttgcactccagcctgagtgacaagagcaacactccatctcaaaaaaaaaaaaaaaaaaaaaaggacagggaaaatgtccaggaaggatgtggcttagctgaagatcagcttcagcttgatcccacgggaagctctggagggtgaattgtacagcagagttggtcctgactgagaccagggcctggctgacctatggcagtcagcgatgagccagtgtctgctggggaagagggcggcgtggacatagcctctcaagtggggcaggaaggggtagctgtgagatactagctaattcttacagcttctgggttcaccagcccggcaggagaatctgggttgaggaggcaacatgacaacgtgcctaccttcaccagagagactgctgtcaaaaatcactccatccatgcaaggaggaacgatgcagacacagaaattctctgctgtgagggccagcactgtagtatttactgacctgctccccactccacacctccaagtgcaggtgtacagactgacatcaaacctttcatcccgccctcggcctcatacctgctttccactctgtgacctatttacttcgatggagtcattttcaaataacttttgtttagtgaaactcaaggcttttcaggatgctgtgctaatgtcttccttttttaattgagtaaatatattatacacagctgggtaggttgtttccttgctggccttactgctacaatttgaaaacggatacagttttctttaactcacataggatgaatgtggcatttattcctggtttcctgtggctctcctcctttagaaaacgtatttacatggacgtttttgaagcacttcttaagacatcgaaaaattaaaaaagaaaaaaaaaaagaagaaaaatctcttttccctcccccaaacaatggttacatagtgacaacagtgggttgagctaaattcagctacgtcaaggaagagcaataaaaggagatggattgttctctaagcttcactttattggatattgtaattgacatatagttgtcatttataatcatctgtccattcctgtgaggtgggagcagtaaagttaattgtggcagctcatttgcattaatctcacctctgaagggtacagtaacccattaatatcacgtcatgatgaattatcacaaataacattgaacatattgattaatgatctctgagatttgtatctcgttaaaacattttgttagctctttaaacttttaagccaacaaccattgcgtgtaggaggggtttagagatcatctgagaggtggtggtgggtggtggtgtactttgtagggtcactggtttaaggggttggacaacccgttcccatctgattttcctcttcttcgggagccaagtactttttgttggtaacttccgtctactttttgcaggatagtggtttcttcaaaacagtggcttctttgattgtaaggtggctccgattctcaaatggaatgattttcttaagatttttaaaaattaccccttcaacaccttaagtgctggctttctgaacctcttgcccacctaggcatgcctgctactttgaagtggcaagagttatctttgtctattacatcagcattcccaaacttacatgttaacataaacatggagctcagaggaaatgtgttgtttgagatgaaccatcgtttcaaatgtcacttacttcttgttttataaagtatcattactcttttcttggacacagtctcatctttgaggagtttgcagattttatctcctgtggacatttctacaaaatcaatcaacaaacttgagcagagaaatcatcatactagccacacacactctgcaggcattaataaaataatagtaaattctctttaaccaagtcctttgcagaatttcctggtagaagtttaaatgcaatagatgcagtaaagaaaagggttggcttaagagttgacttacaaagcttggtcctaacagctttttcctttatctgtttcaagagtcatacgatatttgatctttcaaacttacgtatttcttccattatgtttagtattagtttcgttttctcaagatacatatttaacaactagcaaaatgttggaagcggtctcctctgctgtctatttagggaaaatggaactgatctttctgaaataggcatgcatgtaatgatgatgtcattaatgcttggctagctggtggacttaaacccagagggcacttctgaaaaggggcaaagtgcatctgcttctgctttgtttatagactgtcagccttggatctgtcactccctcagaagggaaggattgaggccaggcaaggtggctcacatctataatcccagaactttgggaggcgaggtgggaggatcacttgaggccaggagttcgagactaccctgggcaacacagtgagaccctgtctctactaaaaaaagagaaaacaaaattaaccgggctgggtggcacccacctgtagtcctttggaggactacttgggaggctgaggcaggaggatcacttgagcccagaagttcaacattatagtgagccactgtactccagctgggtaacagagtgagaccctgtctctgaaaaataaaaataaaaaaaaaaattaagttagaagggagggattacgaccctcatgtgtatcaagaaacaagctccatgaagccccrtaggatggctcagcaccagaacgaggtctgactgttaagcaaagtcaagtgcatgatggctgaacattgctgggggaagattttgcaattatgcattgtttgtgcctttagccagtaggtaaggacagtggtaccattctgacggactctcggatgcttggttttatggagggatcttaaaacagtaatcggcccatatgtgcagcaacctttgcrcctaaatagctgaggacaaagtaggttgcttacttcaagagcccttccctttctcttctttgtcaggcctgtaatgttcctcacccactgagtatttaatatctgtgttttcacatcaaagaacaagctttctgtctcccaggatagtatcttgtaaagccagcctctttattacttcaccagttttaaggctttattacttgcgacctaaagcctgctagtgaattatgcatgttagaactcacagcaccgtctctgcccactcttttgccacctttttgggggtccaaaaagtacaaggcgagatcgacgtgtgttcattcccatccatggtattaatccttattcatttaaaaaaatctgctaacggaaatatttccattcagctcattaatcaattgtgattttcattcccttgttttgtaaaagctgttgcaataaatacttttttcacaaggcgaaaatccaagagatggatgcagccagcgtaattaattgcacccagttacaggagatcagcaagtttgtgagattcacatgctgctgtaccatatggttgcccagtgggcgaaaaatttgattaatgttttgaagtagatttttttcagcaaatattgcagccccagatgaggtgggggttgtcccccccttttactttctagtattgttagacttagctgaaggaaacaatcctctgatttaaagcttaataatactgtgattcagtgaaaacttaacatgcgataaaaattacatttctctcatctcttgtggatacagaaaaataatacatgatgtcttcgtttgtaattaaggaaaatgtgatcgttggattctaaaacttgattcttgattttttttttcccctaagaaatggaactgtggttttcactgatgcacttttggtatgatttataagtagtatatttgggcagactcttcatactcaaagcagtaaaaaataaaataaaataaaatacaatgaatccacaaacagcttcttcttcattatgtacccyatacctattagascatcataaaatataactatatgagtatcatagaaaagtttaaagctgtctctactctgttatgctaagatatattagtttcataaccactcaatatattcatagttaatttatcctttattttaaaaaaatgtcctgcagattttaaaatcaattttatagtttcttttctgtttttagttagaaagttcattttatcttagcagctccttgtcatactgggcacccattctcttaggatgctgcccttctgacttttttctccaatacctgggagggaattagccatttggtaatacaacgggacaagcttatggtaggtctgacctcagcattcagaaaaacaatgtgaaatttgtaatatgtgtcagaactggcaatcaacgccataaggacaataaaataaaatacatttctccactttagtaaatgaggcttcatgcttcctatggcataacttttttgttgttgttgttttttcttttctttgaaacggttttaaatttctaattgcctaagcaatctatgacactccttcaatcttaatgtctgttgaaatgaactagcatctcaagcagttggagcatcatctttaactagacatcaacctggttttgaatcctttgagttttggcaaatagaaaattcatccagggccacaaaaaatatctataattttgacccagttgtagtctagagagatacttagttcaaaaagaattgtgttatcgtcatcaagcaaaacaacagtatatgctatcatctctgagatgtcacacgattattgctttttttttccttttaaattttttctttgtgtctaaagcagtttaagagctctaagtgtgctctgttttctgatggcttaacaagggactggctcaatcaaaatagagaaggaaaggacggagaccaggccaaaacggccatctcctctgattttcgattcatgatataaatttttaaacaaaaaagttacagtgtttttggtactttcactaggcttctaattttttttcctaaacttaaaaaaatttttttaagatcaattatgtaataattagccacaaaggcacaagaactgtttcagtagtggcctgttttaatgttccattctgaagaaactggtacagcctttctttcctgagtttgagctgaaactctctctttcccttttatcaggtcgctcaaaacagatttttagagtgaagcagttttagggacaacatttaggagaaacatttccctaagattccctaacatttttttctttaatttagccatttctaatgaatattttttaactgtgcaatttaagtaatgatttttttaatgcctgctaccttcaagacacttcgtgtggtcacctccaattatagactaggtttttaaatgaaaaacggaaacacttttaaatttttatttaatatggccggtgaaacatgaacaatatatgatcagttggcaggagacagtgtgatgaattatttatgagtttacttttttttttttttttgctttaacagcacatacatatatgaaattcattaccaagtgataggacgggtaacccagaggttctgatgagggccaggacctcatggtcataaaagtaacattagacctattcctagtaatttgatctaggttggcctgatttttgttgtggtggcagtggtggctrtggttgtcaatttaatggaatgtatttggaaagagcaagcttcttcccaatgcagtgttttccctgcaaaggagaagaaatatatttcttgcctctctttccttagtcctgtgtgcttccccttgatttcaccaggacaattttataccmatcccttgtattttagaagagcctgatacatttgcaaggwctctctttatattcctgaattttgcatccctagacatcatcctttttgagagagaaaattccgagtgtcagttttcctttatcggaacctccttttatttgaactaaccacaatgggtcrtaatttataggcccagtcagcgcatcattgctcagatagagtcatttacctacaagtatccatcagttaggtgggggctgctagattttttaagtggaaaaaaatccaaacaggttcaggaagaagaagaaaaaatcatcctgggggcagaagaacaacaacaaaaaattttccttggggccttccaatttgagattgttgagtgttgccaagcaaaactaacacgcagtgggaaggttctgcttttctcacaaattctcggttaacacaaggcgtgccaacagctggtagagcgagagtcagggtgccaggctgaaatggagtggaaggcagccctggctggaagtcttgctgggaacctggagcgctgggaggtaaaactttacttggtgctggcagcgtcactatgccagtctgtttcttcccgagcttcaggccatgctgatgttcaagttgaataaatgagagctaatgattttttaaggcgtttttagtgaattgccgtgggaatgctaagttggcaagaataaaacctaggcgaggagagttgatttttgatgacccaaagaaggcatgtcctagagtggtttagtagagctcgaatagtctaagattgttccacatcaggaaaagtgtacagttatcagaattacttactaatgaaaaaaaggggaaaaaaagattattaggctgcagggtagtgggaaggaacagggtagcaactctacagtgacttggtctgagaaaccctgtaacttggatccagccagggaagtacttttcccaacaatcggttccgctgtcctgctgtgaccagtaacaggggaaaaaaataaaactcccctaaaggtaaatgattcacctcatgaacgaagggaagaataagagacctaagtttatatacacagattccaattgtaaaatcaaacctattttgttttctaaataaacaatatttgaaaatacaacattgcagtcttgttttcttttatactggctaggatggtctggtcctttagaggaggtcctgaataaaataatatgggctgtagagagaaacgccgtttgcttgataggtgtttttgtaaaggttttactggcctacagtgtcagtacattgcaaatttaagaatgttcactgacatttttagtagccacttaaaaaatttttctaagcaatgatgtcattgtattttacttataatcagaagtacatcagcccgtgaatttagttaaaggtttttaatgtcacttttattacatttttactgtgcattcatgtgcacacacacacttttaagcatttttgatttatatatccctctgcatattttgtgccttgtgatgtgtttaacgaatgacagtgtctttagtgcattgctrcttggggtttctacactggaagtgtaatccgaggccttggaattggtcaaacaaaactcacttggcaacatttacttagagagcactctgcgagcactctgcgagcggacatgtcgatatcagctccctcctcgttcccccccccaccccccatcccatgtttatttgtaattaaagttaagatgcttgagaatggctttaccattaatctagaaacatagagttgtttcctggtgaatgatgtatgacagttttctttgtgcttcctctgaatagagagtagtttttgtggcattgttacagagaacagctttcctgtagggctcacaggctcaactgtttcaaactcctgttgttcggtaaatctgtcagaagggtctgcaagggaccgtatttatgaagagagtgtagagtggtcagtctaaaaagctccttagtgtagtactttgaattttaaattacacacataattcaaaggtaatgtaacttgccgtgtcggactttagtccattccgttaaatggagaaaaatgactgacgtgaagaatgacttattgattctyggtgggaaaatgacttctgtaatatgggaagtatggtaaaaggaatagcttaattatttagggagcacttttcaaaatgtgcttttacagcagtacaaattgtacgtatacaaatggtatgactaggttctttttttaaaaattctttcataggagaaagttatgagaaggcttatattatttcgttgctaaggcaaagtttaattttgcttaaattcctgtaagactaactaagaaaggtaggaggagtgatgagcagtttcttaaccctttaagaaatatgacttgttctaattgccttttcttatttacattatacttaggctggtgttaggatgccgtggctgccaagtttacacartgcactttctctctctctttcttcttttggtttatgatgtttttcartagtgtcatggaactcacttaatctgatttcatcaagtaaatatatgggaagttgagatgacatatttttatctgacatttgaagaaatattcataaaatagcagataaaatatttattttggccttttcattctgatctctcttttgactcgatgtgtattctttgcttaaggaccacagcctaatgttattttgactgcatttcacagtgttggcggcctttcagataaacagcatatttgtggttaattggctgaacatgttctataattataattatattaaaaccttaatgttcttgaacgtttgcccgcgaaggccactcacgtgaactaagttatgtttctgtcgttataactgagctggctggcggctgccattcagcaatccaggcaggactgggaacctgggaaaactgcagaggtttcttattatttcggtctgaaaccgctgtttggatagttttagaagttgaccatgaaaattgccttctggttgtaacttggatccccaggtttcaatctgtgggctaccgtttcttgggattttcagaaaggattggcttggctttttatcaaagttacacaacggctgtaaaaaataaataaaaaaaaagcaaaattagcactttatcaagtttggggcatatttccaaggccaccagggagcagggaargtcaccaaaagaccgctccttgaaaccaggcaagaagccatctttgcagtgagctgagaggtctgatggccgccagctgagggagggaattccccttttgtgccttcgggattgatagagaagcccagtggacttagcatctgggaatcccagattgatcttttctggatattgggtcaaccataagatggtacctttccctgtgtaacaaagtcagattctgtgaaacacctgttttttgtatggctyatgagatgaggatgatttttacctttttttttttttttttcccttgagacagtgtcattctattgtccaggctggagtgcagtggtgcaatctcagctcattaacctcaggtttttttacagaaaaagtttgccaccctctgatctacatgatgtccttcagtttctgtctctcaccagactgatggtgccatgagggcaggggcaactcctatcctaaggcgtggcccatagtaaggggtattggttagaagaatgaaagattgaatacatcaaagtgatgagtacagagctgtctgtcattttcttatctttggcctaacaactgaacacattttatgaaatttgcaaatctgtttccaaacatgtttgaatggatttttatggtcttttaattaacccaataaaaatggtaacaacacagcaattttaagaaaataacagagccaagtattttttatagctatgcatgcaatccacattacacccacatgcagtatttctatggtccaaataagtatctgtcggacttagaatatttaaattaggatttagttgaaagattatgttctatatcttttttttttaaaaaaaaggaagaaaaataaagctcttcctaaatttatttacatgttggagcaattctggcactgctaaataaggcaggaaattccattaagtttaaatgtgctgcccttaccctaaagtgtttggagggcttcgtagaagagccaaatagattcacacagatyttatttgtagagctgaatgtgcacttcattaaaatactttgtaaggtattcaaggatgggctaggagggtgaggattccaaatcagaatcttcaagccagtgatccaggccaaaggtattctgccagagtgtgaggaaatttcacagcctcatggagacacctcccctccccacccttgttgaacagactctggaaaagtcaccatttcttgttggtcctttgctcttggagcattcttggcctgacctgtcaaccactttagcctccaaggtatctgagcctttctttcgcctctctacttagatcatattcttcctggattttggaatcaggctgggacacaagccacctcctcctccattctagctgtgtggctccaggcaagtggccacacctctttgagccactagttaactcagctgccaaacagggattatacatttacctcttggtgttgcaagaattaacaaggaggatatttgtaaatctccctgggagctggatggtgcttaataagcaggcattaagggttgattatctttgcactctctcctgccagattttgtaactgagtccaggcatctttagaaacagaaatggtccctgctcttctgtatcccctgggataacctagcatcatttcgctgggttacacatcctctcttctctcctgtatgtcgtccctctttcttacggtggttctaagctctatggatcacttgtcttctcctctgagcgggaactgggcaattggaggttctttcccctcccgtgctggtgggagaattgtttagtaggtcataaagtggaatctccattycagtctgatccggtcaattctggtaggacttcatccaagcacaaagaaacctttgttttcattcaagacttccctaaaaggtggctgggtgcggtgcctcaggcctgtaatcccagcactttgagaggccgaggctggcagatcacgaggtcaggagttccagaccagactggccaacatggtgaaaccctgtctctactaaaaatacaaaaattagccaggtgtgttgtcacgtgactttaatcccagctgctcaggaggctgaggcaggagaattgcttgaaccctggtaggcagaggttgcagtgagccgatgtcatatcactgcactctagcctgggcgacagagtgagactctgtctcagaaaaaaaaaaaaaaaaaaaaaaaaaaaaaaaaggctttcctgaaaggtgattcacaggcctcttcggatcccttcgtgtttagcaatttggatttccacacagccttgctgtgccttctgcccatttgtcctctgctgctggtccctgggtgggacagctcccctttctccttgtctgggttgctcagatagagccataaggattctccctgcctcaagagctgacttccttccacgagttcctaaccacctgtccagttgattcttctctggacctgccttgacatctctgtgccaagcccagtgccggggttgcagatgcagaggcactggtgcatatttcttgagttgaagagcttgcaactgatgagccccttccactcagaaaaatgttgttcctggtcttgccactgcctggaacccaccaacacctcctctttccaatattgctggcttctacttgttctataagagccatgttctacaagttctgtattgtgtgtgagtccctctcaacaaaacaatttccctagtcatctcttatttatactccttgatgcagatttccattttactcttacctcattctatcataattatctatttgtgtgtgtatgtatgtccccactaggctgtgaggtctgtaaaaggatagtctaaatacagctatctattgcaaatcttataatgtgactccatgatgagatagttggatatagccttatgttcccagcaggaaggaagaaaggaaaggagggagggaggtaagggtgagagagagacaagaaaggaaaggaggaaggaaggacgggaaggagggaagaagagagtttggtcaacatttgttgattgtgaatgaacaaactaatgaacactaaatgaacaaatgaatgaatgaatggacaaatgaatgaatgtatgagtgggtcaagaacaagattcggccccaaggagatacgcgactttctactttgttttctatttggatttcacacaaaggctckaaggtctcctggtaggccatgctcagaagtctgggttgtcccctgcccaggacaggctcaccctggcctgtgtcctaggtattgtggggccgctgtaggaggatggtggttaaatcttggaggaaatccaggagtctcatgtccccttggcttctgtcagaaccagtacctctcatttattttgaggtcttggctgaagatgtatcatctacaaccctgcagatcagatgtgttagagcagagagagtggcgaggattaatctagactgaaatgtgctaatcaagctgtctcagatgccattttctggatagggaggaacagcagttggcgagtttaagagcaatatggaggaaccactggggattctatgcatgatcttaggggaagtagcattattatctccaacactggctgtttacattatcagaataagaatggttctccaaggccaggtgtggtggctcacgcctgtaatcctagcacttttggaggatgaggtgggtggatcacctgaagtcaggagttcaagaccagcctggccaacatggtgaaaccctgtctctactaaaatacaaaaattagccggacatgatggcaagtgcctgtaatctcagctactcaggaggctgagatgggagaatcgcttgaacccaggagatggtggttgcagtgagccaagatcgcaccactggactccggcctgggtggctgagaaagactcagtcttaaaaaacaaacaaacaaacaaacaaacaaacaaacaaacaaaaacttgtctccaaatgagcagacaccagaatctcatggagggatttttcgaacacgtagcacagggcttcgcccccagcatttttattttcgaacttctggagtgcagcccaaagatctgcatttctagcaagttcccagatgatgttgatgatgatgcctgtttgggtatcacattagatgaagggctttgctaatttcagctgcagagtattgactcatggggtaggattcctgccatctgcagcttctttgggtcatcactagggtagaatcttattttctgagtatgaaaagcatcaaagttattttagtaaaatgcttttgctgtcattgctttaaaactagctcttcgaagtgggaaaaccaaaagttttattgaagcaatttgttgtaaatatgagttctgtatcacatttgggaaatttgtaaagccttactttgaatgtctttttcttcactctatctgtattgtttggtgctttctatataaatttataaattggatgtaccbccacagatgtcggttttctggtaataatacttttttacattaaaaaaaactcctgaaatgaaaatgtaacttagtcttattattgtaatctccccttgcctttttgcatggatcatttgtttgtgaactggttatttcaggaagggctcaaaggtaatttcatggtttatagcatttatattggcgccttcgatgagcaaaacatattgttttctaatacatgaaaccaggaattcatatatatatgtatatatattattattattattttcattttctaaaattacatgtagtacatgtatatcaacttcaagacattgagaacaaccatgtacagaaattatactctgtacacaggggaaatatgaaagttttgtaatgcaaaaaaataaaaaaaaatcaacatttgcaagcttatgagatgattttatttttaatgaatccaaatggtagcagggagctgctgttgtgtttgtgcattgtacagcaattcatatctaaaaataaagtaacatatggctttgttattatttagtttaggaattgatgcacctaaaggagttttgagagctctgggtctcgttcggttgttgtacatggcaaccaaataagagtagctggagcagagactttctcttcttcagattattaagatttgagcaattcattttttttggatggtgtttattaaagtmaagaaatcttttgcttatttgctaatgattctctcccctttctcttcttatatttttgaaggctgaattggtaaaattatctggcccaataaaaatatgtcctgggttggaaaagagcacaagtttctttttctagccctggagtgaggtggctctctggcctctgggttcgtttggtrtcctggggagtcattgacacccacacactcctagtcacaagacctttccctcccatccagattgtgtttattttacggctctcgcacggagcatgcagctgtgtaaacctgagaatggtttctgcacagctttgatctttgcatggatcaacagttgcccttagtccctgaaccctgttccatggccccatatttcttggatttttccattttctagtaattatggcatcatgtagggagccttccaacagcatcccccacagctttgggtggagaatttggaaaaaatgccttaagtctgccatttgtagaaccatattaagtagtgatttccatttgatgccaaaaaaatttgccatttagtttcttcctaagaggcaatctgacaatttcgagtagactgctggagtctgacaaatttgaatgtattatggactgaataaatgtttattgaacaaatgccatttttttaactcttaaaatgttcagttcttccaccaaacatagatgacacaactgttggagacggagcaccggactgatgcagtgtagcattattttgtaatctacgaactgggagcctatggagacctatgcatggtggaatacaaaagtcatgacctgtctttatatcctagtatgggcaataaaaccctccctttaatagccttaaacatggtacaaggaaactgtgcaggagttccagggaaggtgccatttttccatatggagttgatatggtctgactgtgtgtccccacccaaatctcatcttgaattctaattgtaatccccatgtgctagggggagggacctcgtgggaggtgattgaatcatggagaccgttcccccgtgctgtgagtgagttctcatgagatctgatggttttgtgcggggcttttccccactttgctctgtacttgtctgtttcttctccttcttgccaccaggtgaggaaggacatatttgcttctccttccatcatgaatgtaagttttctgaggcctctgcagccctgtagaactgtgaatcaattaaacctctttcctttataaaccacccagtcttgggtatttcttcttagcagcatgagaagggactaatacaggggtgatcacaaacagcctgcagactgggccatckttcttaggcaggatctcgagctaggagatgagaagagctctataggcaaaaagaatgacttggaaggccacatatggcagagtagctaagactttggggtttccagtttcagatagacatgggtttgtatcctggctctgcccctcaatgcctgtgtgatcctgggtagtttgcttaatccttatgagtcccggttttctcctgtaaattgggattaataatagtcacagctagctgggtgcagtggctcacacctgtaatccccgcagtttgggaggccgaggcgggcagatcacctgaggtcaggagttcgagaccagcctgaccaacatggagaaaccttgcctctactaaaaatataaaatttgccacgcttagtggcacatgcctgtaattccagctacttaggaggctgaggcaggagaatcgcttaaacctgggaggcggaggttgtggtgagccaagatcgcaccattgcactccagcctgggcaacaagagcgaaactctgtctcaaaaaaaaaaaaaaaaattatgtccttctagattgtgaggattaagcaagaccatgcatttacattgtttaacactgtccctgagacatagtaaggcctcagtaactgttagctctcttattgctaccggacaagtgttcttattttcccttttcttcttcttccttttcctgttccttgcccttcctctttcgaagaaagtttacgccaaaaaggatgagctgggttgcagccagcattctggtttcacaggagcctaggagatacatggagaatattctgaggctaggttaaatagtttgtctccagtgtgggtgttagtcatattcttatcagtatctgaagaacccagaagactgactctcagaacggaaaactcttggctagaggattccgaaagctagcgtgaagtggaggctattactcagtgggtgccgtaacatgtctgtgtcacctggcacctttttattctctaatctcaggagtgagtgcttcctcctgccgtgcctggccacttctcaccttcagagtctttggtatgcataaattcttcatcacttcagtagagtgaaccctgattacctacatttattaatgaaaacaaccaagaatagttgagcccaaaagtacaaatcaatgtgctgaatcagtttatgatgtctccctaatttctgcacatctgttgagctgtgatttcaaattccattccatttcttttcttttcttttcttttttttttttttggagacagtgtcttgctctgtcacccagcctggagtgcagtggcgagattggcaagatcgtagctcactgcagcctccacttcctaagctcaagtgatcctcccacctcagcctcccaagtagctgggactacaaggttgtgccaccatgcccgcctaattttttgtatatttagtagagatggggttttgccatgttgcccaggctgttctcgaactcctgggctcaagtgttgtgccctgtttggcctcccaaagtgctgggattacaggtgtcagttaccgcactggcctggaaatcctatttcttgtcaagcaggacatcaaagttgagatctaagaatttggactaaaatttggggcaggttgtttccactactgtgtattgagagatggcagggaccatcttgccgagtccaagagattgtgaagtctaaaaggcttggccgcagtgttggttcatctgtaacagctgcctacaagggaatctttgagaaatacagattgctgcatcttataagaaggacagtgcttaaaacagaaagaattgagtagaaattaagacatagcttgatttttttccaacagaatcatgaagtctgttcaattttctttttaaaaagtaatttaatcttctagaagatatctacgtttattcaataatttcctaaggtagtcttcaaaacctaggagcctaggagatacatggagaatattctgaggctaggttaaatagtttgtctccaatatgggtgttagtcatattgtcatccgtatctgaagaacccagaagagtgaccctcggaaaggaaaattcttggctagaggattccgaaagctagcgtgaagtggaggccgttactcagtgggtgccataacatgtctgtgtcacctgccacctttttattctctaatctcaggagtgagtgattcctcctgccatgcctgtcctccctccctccctccttccctctcccctctcccttctcccctcttctctttcccctgtctccttctctccctcccttccctctcttcctttcgcatctgacatctccaaatagtttttcatgcaatggcattactaatggcttgactttttcgggaaatgattcattactttatgatttcaattcagtaaccattttcagctatgccataaatttaaatcctttaccatcaagataacgtttttttctcctgtcactgaaatattatgattggaaactatttttaaaagttgactctgtttgggacagctcttagggatttgtcctttataccagcatataacttgtaggttgtcagtgtctccaggggccatatgttcaccacctagactcaacagttgctaatgttttgccatgttttgtcagttcatctatctgtccatctctttgtccatccatccaactacccacttacccatccatccatacrtttatccatccatctacccacccatccrtccatccatccatccatgcatccatccatccatccatcatccatccatgcatgtaagttgcagacatcaacaaactttacccttaaggactttggctggcatctcctaaaactaaaggcattgctgtacgtaatcacaactatcatcattatcatgtctatgaaattggtaataatttgctaacataaaataatacctagtccataacaagatttactgaattattcacaaattgtcttttatagctttttgttttcaatcaggctgtaaagttcacacattacatttggtattgtatcttattagtctgtttattaaagagtttttttcagggatcagggttagagggaaggctcctttctggatactgtgtatactactaattttctttatcggctaccaaggttttctttatttttttcatacttttctttcattgaggaaacttattgttttgtacattttgttgtacctttatgaatctggttttgacttctggcccagctaagaagctggtttcctttggtgaaacatgggagaagagggaggaaaaatctgttaattagaattgtgggcgtgcactctgtttatctctaacagaataggcttcccacggctctgagctggaaaggaagattcaagtctcaggttaaaaaacaaaccctccaagacctcagggctgtttgcctgtgattagagtctaagaaagactgagaattggaaatcaggactgtctctggtcactgatggttcaactacagcacagatgcactgggtaacagacacaccgccaggcctcaggattacgttacctagggttaggactgagcctttcttccaccttcttggggttggagggcaggaatttaacatatcttagatcacagagtaaggcctcttctacccataagtttggtttatacatcaaagtaacattctaaaattagatgagggtgttttttttttttttctttttgagacagggtctcactctgttgcccaggctggagtgcgatggcacaatctcagctgattgtaacctccacctcccgggttcaagcgattctcctgcctcagcctctctagcagctgggactacaggcgcctgccaccatgcccggctaacttttgtatttttagtagagaaggggtatcgccatgttggccaggctggtctcgaactcctgacctcaggtgatctgcctgccttggcctcccaaagtgctggggttacagatgtgagccactgtgcccggccttagatgaggtttgtagatgtgtttttcatattcccaaagccatgaaatttgacaggtaaatatatcagttataaaagttttagsattaattatcaactaactcccagaagttgcctcagcctctctttttcagccttgtcttgccccagcccagagacaagccacagctataggttttatttctgaaggagaaaactcagtggaccattccactgcctcaggagatattgcctacctgcagacatgttttgtcttatccacacatgatgtaaaaacaaaataaaaatgctgagagaaatgccaattcagaggtttcatataaaaatatagctttcccattagacttgaaaattggaagaggaggtaacaattggccagtgctgagtagagggcatgtggtctctactttgccacaatctccaccataccttattgtctcccttctcagtcgaagcagctttacacactcctgctacttgccaagacactgtacacatttaagtttgctacctgttacttggcatatctcttggttcctaagagttttaggtattatgcaatttgccagctccctcagcccctttcctggctccaaacctttggctttggtttgatgttactgggttgctgcaggaaatttccctgtggacctcactactttatcaactgtaatggtcttgttgaagacaaggcttagaacatcatcagacccagagcctttctcagaggacctgggagaactctccatatggattttcatttgggaagatagatgctcttattggaacagctggttttccctttaaaacagggagtccagcagcttctaggatgcttagaatcagaattgttgctcactttttaaggtatagagtakttgtcttattcttaactacattttatatctttgcccttttttcccctactttaaataaaatctatctctaatttatgttacttaagcaatgacaaattctttttctgatagacaaagtaaagtataaataaataagacatccaagtaataatcagaagtattttttatgttggtctcattgtggtctttttaatcccaggcctgatgcgctttaggtaccagccttggttgaagaggagcttgaacagcctacacagacatgaaacttgagcaactgagctcatggacgttgcttttaatcaggatccagaactagggagttgagtgagcttggatttgagctccacttttcaaattttcaccacctgtgctctttcgtttttgttttttgtttttgtttgttggttggttttttgtttttttgagatggtgtttcgctctcgttgcccagtctggagtgcaatggcacaatctcggctcactgcaacctccacctcccggtttcaagcgattctcatgcctcagactcctgagtagctgggattacaggcatgcgccaccatgcccagctaattgtgtatttttagtagagacgggatttctgcatgttggtcaggctggcctcaaactcccgacctgagatgattcacttggccttggcctcccaaagtgctgggattacaggtgtgagccaccgtgcccggccagacccgtgctctttctcccaccactgccctgtgccaaccaccacccccactcctattctggaaagagccaagccgtcagctattgcttttgaatctatacgcaattctagcagcttcttttagagcccttttaaattagcatgaaatagttttactagccctgaggtttcagccaaggagctttaaaggagccagccctttgtttacttatttttcctcttctgaacatttggaaacatagcttcggtgctccttctccaagaaacctgagtcatgacctccccaaagtgtttccttcccgtggcctcttctcccgatcagctgtttgttatctgagggattcgttaataaccaggacatctgattctcatcattactcatcctctgctcactctcctttctaatgcataggcctttagccttttactttctacctttttgaatgctatacttttttgtaaaattttaattaggttaatgcattgacattgttcaacattcaaacgatggaaagggtgagtgtggaggtttggtttccccactttttccagccatgctgttgccttctgcagaggcttctagaattttcagatgaatgagaatcctttcagaaatagtctctgcaaactccagcacacccatagtgctagggtgggtcttagtaaaatgtctgcagggtaagcacactgttttgcactccacacaattcacttcacaatatttcatagagactttttcatattaatatataaagagatatatacgcgtgctgcttcacgataatccattgcagagctggtctgtaatttattcaagcattctttgttgatggatgttagggttgtatccattattttgctattatgaacaacaccataatgggcaaccttgtacacatttcctgtcaacatgtatcactgaatggaaaggatctattcctagaaaggatccattcctagaagaggaattctgtacaatatggccaactttctctctgttgaggttgaaccatttgacacatytcgctagcattgggaaaatccccattttcctcactatccatttttcttcctctctttccttcctcttttcccttcttcctctttttttttcttttctttccttccctttttccttttctttccttctttccttgccatttaaaacatactgataacttggcagcacagggcagtgattaaactcaggcactcaycccaccctacctgggaatctgaattctgtcttttctgctgctgtggattctcagtccccaagttgtgtaaatcaaagcttctcctgccacactagtgtgtattaggccaggacttcatagtgtgattcaaatcaccaactgaatttttttttcctttycttcccctttctgggggactacgtttttcatggagaccggggccctccagctgctgtgatgatcctcccttgccagggaggtgctgttaatagcaaatgccaagtgagctggtgttctgtccctccggcctccttgctcacaatagccaggaggaaaaagccatgtaacctctggatgagtcccttggccatttagaagtgaaatgaacatccaagaagaagcatagacaatgtggaggaagaactcttccaaatgatggcagggatatttggaatctttccccctgagttccctctggaagttaaagcccagatcccgtgaactgattaaaaagcyscagaccattcccgttccagtcatcttgaaactgagcaagaccgtgtcatccatggagcttgaacataggagcactttaaaaaaaaaaagaatgaaaagcccctttcttgttttggtaatgatttaatgacagaaagtcacccacccaccacttgggtaccacgcagcccacattaaacaattagcccttgacagtggatagttcaagttagtttgaaatgagaaattgccggtgacctgaaacccatcattattaaccttgtggcacaacattgccataaccagtagccaactctcattttttctttttcttttttttggttggaagaaaggctcattgaggaaagttggctcagttcttttttgagtgaagtggtcagaccaccaagaattactttcctttgattgggaacaggttctaatacagatgtcctttacatgggcaatccacttttctcattgattccacaatcaattcgagctgtgtttatatatagacacctgcccacagagaccatgtggagaagcatttgcgtctcgctgcctgtcttccaaaggatttgccttctagtaattcatgtttttatagcttaactacatttatagtgaacgggtggcttcttcatccaaagaaagaacaaatgacaaaaagaaaaattttgatgatttgggaaccgcatttatggaataataacattcatgatacctctggataatgacaataattacagtatacgattctagaagggtgagtctagctgttcccagtgtgtttccatgggttgttatgtgttactggtcaggcgatcagggatttgctgaagattttctttcccatgtggcagtagatatttcagaaccctgcatcatggtgtccacagaagtccccagagttgtatgagagttcatctgggcacctttcccaaaggcaggccccctgtgcagcttcaactattcactctatttataatgttgttcctggatattgggcttgcttccacttgtggccaggagaggatatttcttactccagatcaaagagttgagacattgccttcccacaattcccagtgagcccaactccttrccacaattcccaccccatgccttccccaaattcctgatgagccctatgccttcccacaattccctgtraattttgctccttcccacaaccccagtgagccccactctgtcccataattccctgtaaatctcactccttcccacaatccccactgagtcccattccttcccacaattccctgtaaatctcactccttcccacaatccccactgagccccactccttcccacaattcccagtgaaccccacttgtgtagtgtgtctgtgagtagtctgcccactctccttatgacaggtttccagtattatctgtttcmtaacccatttccaaccttctgggttttttccttcaacgtttcctgtgacagttctccattatatctttgttagataatagttagcaacccattaataacttccaactttttgagcctctaccatatcttgttttcactgggatttctacaccgtggctactttgtgggacctgacttatcaagaacttaagcagcatctgttagaaaaggtattttttttatgaagtaagtagggaactaactacctgttcactgctgcccgttcattgctagcacaatgccaagtgtcaaataaatgyttcttgaacaagtgaatagagtacgcttctaggcttctggaaacggtgaatgttgctttatgtggcaaaaagggactttggagatgtgatcaagttcaggatcttgaaatggggagatgaacctgaattaccgaagtgggccctaagtacaattataagtgttcttatgagagggaggcagaggggactgtgactacgaaagaggaggaaacagggagaagaggtgaagcaggtgtgaggcaacaatctggtggcttctagcccctgaaagaggtgagaaatggattatcatttggaggattcagaaggaaccagctgtgctgacaccttgatttttttaacccagtgaggttgattttgggcttttgacgtccagaatgataagagaataaatgtgttgttttaagacctaagatcatggttatttgttagagcagtgatcagaaactcatacaagtatgaatgctaagagtaaaggcacctgcctcccacatactggacccttaatattccttttcatgggaggttttgcagattgctgccctccttgctctccttactcttctccttttactgaaaagatatttactagatgtctagcatgttaaagactgtaccttaaaaaaaaatcacactctaatttagcacagtttcaattgtggttaagcaccatgccattcacacttcagaaccaagctcagatccatgtgtgacactctggaatgtggcagctgatggaggaagggggctgaagttgaatctgcastagttgagttaaccttcccatggtgcctgcactagcagggactggactgagaccccagctttcccagtcaggccttcatttttctctcatggtgagagctttggaaataggcagtgcagtgtgggagtccttcccctagcatgttagtggccagcaccatgccacacagccacccagagctgcaagagagtctgcagaggtgattgccccttgctaggtgagtgtaaaccaaaaataaattctaagctccccaagcaactgaatggatccctgcctctgggccaaggggattccgaaataaacctgaaaaactagttcaggcagtgatgggaagagggggttggatatgactcattatacccttctttttttggaattcagtcacaactgaacagcattagcattaaaacagatcctaaggctgacaaaacagactctttatagcaataagataccaaatttcaaccctactctagtataggatcactttgcagatagcaggcatggaaagaaatcaaattattttaccccaaaatatatttctctggtatatttcgaaatggccctgcaagctgtttcttgtctacattctgtagagaacatccttccctttccaggtcttttcctgatccaggagagattcactaggagtctggcacctttttagttttgataagagatatttaccatttattctctctgaggcctatttcctggaggcttcatctgcatcataagaaccttggtctttttgtggacttatcttaacccagatagtcctttctactgatgccaggtgtttagctaataacacttttaaccaattgccaatcagaagatccttgaatctacctgatacggtttggccgcatcgccacccaaaatcagacagtcctatctgttgatctcgggtgtttagctaataactcctttaaccaatttccaatcacagaatgcttgaatccatgtgatatggtttggctacatccccacccaaaatcagtcctttctattgatctcaggtgtttagttaataactcttgtaaccaattaccaatctgaaaatccttgaatccacctgatatggtttggctgcatccccaccccaaatctcatcttgaattgtaatccccacaatccccacatgtcaagggagagaccaggtggatgtaattgaatcatatactcccgatagtgagttctcacgtgatccgatggttataaataagtgtttggtagtttctctgcgttcattctgcttcctgccgctttgtgaacctggtgctttgcttccactctgccctgattataagtttcttgaggcctccccagccatgctgaactgtgagtaaattaaacatcttgcctttataaattacccagtttcaggcagttcttggtagcaatgtgagaatgggctaatataccacgtatgacttggaagccctcatccccatcactttgagttgtccttcctttatggaccaaaccaatgtactccttacatatattgatagaagtgtgcctgtaacttttttcccctaaagtgtataaaatcaaggtgtaacccagccaccttgggcacacgttcccaggaccccttgagactgtcttaggctttgttcactcttgtttgggtcgggaataaacttctttaaatattttagagtttcactctttcaatcaacgtacgtgactacccagaattaaactggaatgctgttaataagagaaatgaaaggatgatgggagatgtgcacccagcaatgtctgtcttgtggtcctgaagtctaactctaatcctggctccactatctggaccatgacaggttgtttaattgttctagttagagtgttctcctatgtaaatagggataataattggatgtatggcaggatttgggggaggattaaattaggttatatgcgtgaagttcgtagagccagggtctgggcattaatacgcatttagttactgtcgctcctgtgatctgcacaattattgtcattattttcccttcctcctccttccccctccttccccctctctttttccttttctttctatcatcatccatagctctcttgccccattgttttaaacccatctgtttttgtttctggtaactgtatccaaaagtaatacagaattttccgtaagaacatttattgtgtttccttctacccacgaattktcttatgctacacacacaacccactgaaatttcacctctattgtatgtggcttttctagaaacgtgtgcttctgggctttgtctcacacctcctggccagtgtttggcatgtgctcacacatgcacgcacacacagcctgcactatgtttgttgactgaatgaattaatatttcacagaataacaaacacatgctgattatactccttgggaagctaatttgttttcagctctgagagcaaggccaaatcaccagattgatgcctttggctgtgtatctaaaggacgtgccattgcagctaagtggacctgaatgtacagtaagacytagtggtcaccagaatgcatgccaccccggtgcttctgcatgcaaagggtgcgggccatgtgccagtcacagtggaaaaggcatgcttcgtgtcagcacatttggcatctctctgggatcggggatttataccccaaaaccttgctctagagatttggcttccattagcaagggtaaggcttgtaagaaaggagttttactcacctttgcttgctctcacagctgtgtcagcccattttcatctcttttcaatgttttaagccctgagagaacccagttcaattcccagcaagaaatgagcctctgtaacgcagccccagacccaccttcgagggtaggggcacccttgttgtcacgatgtacaggagccaggcttggcatcggagtggatgcttgggaagccccagagaaatagacgagtgagtgcaagagccagctgcctgcgtggcttagaggaagatttcaaacacctagtgcactgaaagtctgacttaatttgtgatttgtgaatagtctcccagaagctatggggtacagatgtgggacttgtgaaaaataccagacatcctgtgggttaaagaaaaagaaaggggggcggtgggtgaagtgtgagcaatttctggcagctttgtgggcatttattatgtctaggtggcacagtgtggttggactggttggtttcctatcagttgcattccctgtatgtcttcagccaatttttttggtaatccaaggcctgatgtatataaacaaattcctttcttgatcatctaagcaatgaacacttaacagagtcaagcttggagaattcagttcctaccacaaggtccggaatggaggatttataactgggagacagaaggtatgctgaaaggtactcaaactgtcacttccttcacccccaggagcactgaagcagacactgattcctctgcagttgttgggcttttgagctacttccctcctggggagatgcgtgttaactgtttcatgactggcaatgccgtaacagtgagcaagcaatgtgaccttacaaatacatgtgcagaaatgcagatgagtgggcctaaagaatccagactcaacttacttctagtggtaatggctgtaggagagatggggagtaggagaagaaaagccaaaggcagactttagtctggtttataatgctttaatatttttttgaaggaagaaaaatgttcattacttaacgtaataattatttttaaaaagcagcctggggggggggtattcatttttctgtggctgccataacaaagttcttcaaacttagtgtcttgagacaagacatttattttcttaaagttctggaggtcagaggtctgacacaggcctccctgggctaaaatccaggtgtcttcagagctgtgttcttttggatactgtagaggagaatacatttcctggccttttccacgttacagagactgcccatgttcctcgatccatggctccttttcggtcaccttccagccagcaacattgggctgactccttcaatggccatgtctctggttctttgtcttttgcctcctcctcttacttttaaggacccttgtcatttcattggtctcagctggatagctatcaagggtcactttaaggtcagctgactagcaaacctaattctatctgcaaccttaattcatataacctggcgtagtctcgattttattttaattttttaattgaattcagctttacagtatcttttgtagggggtaattttagcttctttctccgttgaaaacttcaagtaaggaaacacttayattgctagtgagtggccagctggagttgtaggtctaattctttttttttttttaagacggagttgtgctcttgtcacctaggctggagtgcaatggcatgatttctgctcactgcaacctccacctcctgkgttcaagcagttctgcctcagcctcctgagtagctgggattacaggtgcctgccaccatrcccagctaacttttgaatttttagtagagatggggtttcaccacgttggctaggctggtgtcgaactcctgacctgaggtgatccacctaccttggcctcccaaagtgctgagattacaggcatgagccactgtgcctggctggttgtaggcctaattctagcaatctcagcaactgtaggatttctctgcattggaggaagcaagactgaaggtcgtctggctttatggacaatgtgcttagaagttcatgccataccttaggtccagtcttgtgactgaaccaaccagacaggcctaggctctgccctaagtggtcagcctccgaggtggtagcacgcagggcctcacttcccactgcctctgtctatgggcatgtgctgtgtgccattctctccccttatcagtgggttcccagctgcctggtgtacaggagggttaagtagatacctgttgagtgattgtgaatrttttcattcacgggggcagatttgtgtcctactaacaccagacatgtcctgttttcagattacttctttttcaacatctgagtacctataacatctaaagaataacaggaaaatccacctgggtggccaaagtcaatgtaatgggcagaaagggcatgtggtagacttggaaatcagacatcttagactccaacacagggctcttccacttgctagccatggaacctcagactgggatccttgacttccttatctataaaatatggcttataactcaccctgtattatagatctgctgggaacatgatagaacgtctgaacagtgctggcttatagcaagtgttcagagatgtgtttcgttgtttttcttttttctttttttgagatggagtttcactcttgttgcccaggctggagtacagtggtacgatcttagctcaccacaagctctgcctcccgtttaaagcaattctcctgccttggcccctggagtagctgagattacaggcatgtgccaccacacccagctaatttttgtgtttttagtagagacggggtttctccatgttggtcaggctggcctcaaactcctgacctcaggtgatctgcctgccttggcctcccaaggtgttgggattacgggcatgagccactgcgtcaggcctattgtttttcctacgtaccgtgattgcttgctttcttctctgtcgatgtccctgccatctaaatgctgagtccccttgtctacattttgaggctcttctattatggaagagggctagagaggccatcagaatttggtttcactagcctttgatccttcctgtttaaggagctcarcatttagcttcacttccctgtcattcatcagaattcattctcagattggaattgtccagtcttagagtgatttttgtccccagtgacacttcccttatatccgtgctgacacaggttcaggagaccaggtcgagtcgaaatcctggctgttccgctttctaacaagctgcttcatctttctgtgcctcacacatctataaaatggagctgggcatctgtctccttcagttatggtgagaattaaaataaaaaacacaaagcacttctaagaaagtacaggagaggccgggcacgatggctgacgcctggaatcccagcactttgggaggcagaggctggcagatcacgaggtcaggagatggagaccatcctggctaacacagtgaaaccccgtctctactaaaaatacaaaaaaaattagccaggcatggtggtgggcctgtagtctcagctactcgggaggctgaggcaggagaatggtgtgaacccacgacgcagaggttgcagtgagccgagatcgagccactgcactccagcctgagcaacagagtgagactctgtctcaaaaaaaaaaaaaaaaaaaaagtacaggacatacgtaggacccctgaacatttatccccctgctgnnnnnnnnnnnnnnnnnnnnnnnnnnnnnnnnnnnnnnnnnnnnnnnnnnnnnnnnnnnnnnnnnnnncagcccccttagtagctgggactacaggcacaccccaccctgcaggggttttttttttttgtttttttgtttttttgtttttttttttgtattttcagtagagacagggtttcttcatgttggcctggttggtctcaatgtcctgaccttaggcaagccacccgccttggcctcccaaagtgctgggattacaggcatgagccatcacgcctggtgaatggtgtcattttgatgtactgagccatctcagtttttccagcaaccttccctcacctttgtggtcagctagaaggtcagttascacatgggatgggaattcttgccaatgtccttcgtaaaagaagaacttctccttcactcacatgtcctgatacttcctcagcatttcattctagcctttctgtctccatccaccatctatcaatcatctatcatctagctatctatcgatttctcttttttggctttaattttgtcactttttcttctgtctgctatagaaatagcaaattttcttatgtaagaaaactctgaacgcgaggccaaagtagaattttccctgaaacagctaccttttccttgaaattgttctatatctaaaatcactaggtgaggagtaatagaaatgtagacatgagaagtgaaactgttttttttccttgtaaaagcttcattgtgccctttagaggataactctgtagtttgatatgataaaaataattatatgattatgctgagtgaggtggctcaagcctgtaatcccagcacttggggaggccaaggccggcggatcacttgaggttaggagttcgagaccagcccggccaacatggtgagacccccatctctgctacagatataaaaattggctgggcatggtggggtgcagctgtaatcccagctgctcaggaggctgaggcaggcgaatcgcttgaacccsggaagcagaggttgtagtgagctgagatcatgccactgtactccagcctgggtgacagagcaagactgtctcaaaaargaataaaaatgaataaaaattatgtgattagagaggggaaaacaatcatttcttgtgcgctaatgccactcagcaggtgcttacactgtctggttcatccttacaatgactccatgttatcgccattttcagatgggtaactcaggtagaaatatgattccattagtttaaaaaaaaatacatagaagataagaaaaatcaccaaaaattcccagccacagtagatgtatctgtatttaactactctcctcgtgttgaatatttatcaggtttctcgttttcttttgtttttgttgtaagtggcactgcaggccagttgcggtcactcaaacctgtaatcccagcactttgggaggctgaggtgggcggatcacttgaggtcaggagtttaagattagcctggcccacatggtgaaaccctgtctctactgaaaataaaaaaaaaatcaggcatgttagcatgcacctgtggtcccagctacttgggaggctgggtcaggagaatcgccttgaacctgggaggtggaggttgcattcagtcgagaccatgctagtgtactccagtctgggcaacagagccacatctccaaaaaggtggcactgcagcaaacagcatccacatgtgtgcacagaatattgttctgttgtgtacctcagatggctttgttaggttagattccctgaagtggaatggccagggaatttaaaaagggttttgctcttgtcacctgggctggggtgcaatggcgtgatcttggctcactgcaacctccgacccccctgggttcaagcgattctcctgcctcaggctcctgagtagctgggattacaggtgcctgccactatgcctgggtaattttggtatttttaatagagatgtggttttgcggtgttggccaggctgttctaaaactcctggcctcaggtgttctgcccgtctcggcctcccaaagtgctgggattataggcctgagccacggtgcctggccaagtctgttttttaaatctggaaaatgggacttgttaacttctgtattgtcttttctgctgctttatccaactttgcaatctataagcttctgttactggaaaatggtgatggtaaagtaattgctttcytatgttccatcacagagggtagactgctagctctagtatttttcaatgctgctttttaagtgatagatgtataccattcagtaccaaccctgcaccctgggacatgcctccttgctgaaactaccatttatctttgtgaattcattattcgtttttccaacaaacttttattgaacatctaataagacctggacatttggctgaatgctggaagtgcaaagatgaaggaaagttgctttttggaaggatattagaatccaaaggtgaagcctgcacagtaagtaggccagtggtgggataagggatccattggcccaggaaattggagggacttggagaaggaccatctcacccgtccaaagaatggaggagtaagggaaggcttctggaaagaagttgtgttgaggctgtgtttggaaaggtgaataggagttaggccagtgaggaatggggtgaacaactgcaggaacttgagtgatactttggggtgaattctctctctctctctgtctgtctctctctgtctctgtttctgtctctctcactcacattttaggtaaagcagtgtttcttccccaggggtgattgtgtttgttacagtgtgatggagactggatactgcatctagcagatagatgctgtcaatcatcctacaatgtgcaggaccgtgcccacacaaagaatgacccgtccccaaatgtcaacagtattcaggctgagaaaccatgtactaaggcacaggacaagcatcgggttggataatggcagagaaaagtaccttacctccttccagaacctgagagtgtgtgactgtgagtgtgtgtgtgtgtgcacacacttgcgtaaagtgagaaaaatctggtgttttttcgaagtctgcctcgtttaggctctggactcctgctctctgttgactctgtccagagagtaagcgactcagcaggtgtgcctccccatgggcccccttcacggtgtcctcaccttgatttattagagcattttattcccccaacagtgtttatgacatccaaggacttggtggaaccatgaggaaatgagagtggacagtgagactactatcattcattttcactccccgtaaacatcttctgtttctgttttagaagacattgctaatcccctcatgcactggctttgcgaatttctttttcagcctgggtttgaaagcaaagtggtagtgactttttcctgatagctgctgaaaaggttccacagtatttggaccgctgcctgcttctaccctggagcacaaaagatccaggcgtagaaattggttctaacaatatccttttagagaacaccaaggggatgtgagtcactttccctttgatttaaaggcactgcgtccctcaaattcagagttagagggtgacatgtagttgatctttacttcccgggggcagaggaccataattaaatggctgtggaaacccagaagcagcctacagaaactcttaggagccctccgtctgggaggaattttttttttttttttttttggtatatctgtgtttacagttctagaaaagtgttggttttgagggcaatggagacaggaatgaggagaaaatgtataaaggagaggttgctgtgagccgagattgcgtcactgcacttcagcctgggcgacaagagcgcaattctgtcaaaaataatattattctgttgtttcctaattgttgatttgtggtccatatatttggttccttaactaaattggagttcttaaaacaaatgttaagaacacaacatttaggcacacagtacttggattccagtagctttggataaattaataaaatccttccattttctcagttgtagaatgggaatagtacccaccttataggcttgctgtggggagtaagtgggataataaatgttaagtgcttttagctgtactgtacatacataatttctgtaagtactggctattttaaaaattattttaacactattctgatataggaagttaaaaaatagcacagaggggatccctgtgatttttactcacttttctacaagcatgactccttatataactacagtacaggatccaaaccaggaaayatgcctgggtacaatgtgagtgtataattccaggtaggtaaaataatggcccttattaggatgtctgcgtcctaatccgcggaaactatggatatgctttgttacatggaagaggaaaattaagattgcagatgaaattcaagttactgatcctgcgaagttaaaatcaggagattacccagggttatctggttgggcacagtgtaattgccaggattcctaaaagggggagagagagtcggatgagtcaggcagtgagatggcagcatgagaaggacaccgccacacattgctggctttgaaaatggagggaggcgggcatgagccacagaaagtaggcagcctctagaaggtggaaaaggcaatgagatggattctaccgtagagctaccagaagggaacacaccttgctgatgtcgttttactattttcttatttatttttgagacagggttttgctctcgcccaagctggagtgcagtggcgctatcatggctcactgcgatcctcccacctcaacctcctaagtagctgggactacagtgtgtaccatcacgcccggctaacttttttgtatttttagtagaggtggggtttcatcatgttgcccaggctggtctcaaacccctgggctcaagcggtcctccctccttggcctcccaatctgctgagattacaggaccctgctgatgtcttaatcttagccccttcagatcccagttggtcttctgactccagagctataaaagaataaatgtgtgttatttcaagccgtgaatttcttattaatgtgtcacatagcaatggaaaaataaacgttctatgccatttttatcacatgcgtaggttcatttaaccaccgccactactaaaatacaggactgttccatctgcaccgaggtctctctgtgctaccccttgaagtcacacttgccaccctccgcccttagcctttctttcagcctgtgaggaagcaaaacttttactcttcaggcatcacctcacgcgtcttttctgcctgggaggcactttttccagttttcctggcgaaatagtcatcttttaagttctctgacaacccctctctgagcatctaatcccaatcagaattccctcctaatgtaaactctcattatatcttttaactttatttcttagcacttatcatgctgtatggataatggtatatttgggtgagagtatttgtttctctttctccctaagtaggctggaaactgcatgagggcaaaaacttagctttactcaatgttttctcagcttcatgtacgtgactgtatacagagtctgagccgagaaaaccttccttgcatgtacgagcaaatgagagtattcaaggtacagaactgaaattttctctgggtttttaagtggaagagtacacaagcattataagcaattttacctgcatttactcaacagacttttgttttttatccccttcggtgtaggttgtcatactaaattggttcagattctgtatctgggggtagttagacttctgtgaactccaagtagacggttgaacatgactgaacttgcacagtggacacattgtgcatttgtttttaagtccctagctgtttccagaaatagtttggttaattcatactgataaaataaatccccgtaagagcattattccccaaagtgggcttcctttgccaaacctaattatctggagaaggtattgaagaagtcaacttacctcttggccaaatgctttctagaattattcaaccaaagacagcaggctgcacctaggggaagccaaacatctggatgaagaatgaaatatccagatgttttcaagtatctggatgtttctaaccatctgtttctcttggttattgacaaatgatccagctgttttgcagaagatggtataccttgcctaacagaagagagaagtaacattcttagaaaactttgacatcatctcatctgtactaacacaggatttctgtctttaattgaagccatgacttgatcacaaaaatgaaaatagcttcatgtgtttctgaagctgttgtcttgctttgggcgccagactgcacaggattttaggttaattgtcttgtttacaattagagtctgcattgtttgtagcttgattctatttataatgtactcacaccttaaccaatagcctcacagatggcatatgagaatactcatactcagtgctgctaaaaacagcctgctgcctgaacaccagagtgtcttttaaagcgtagaaaagttgggtacataaaatttctgttgcaaaaaggaatgtataggccttaattgaaaatgtatctttctggaacaggagttttagaagctgagtaccacccactcccttgctccacaattctcttttgtttaaggcaacacgtaggttcttagttttttaaatatatatatatatacgtatatatatacgtatatatatgcgtatatatatacgtatatatgcgtatatatatacgtatatatgcgtatatatatacgtatatatacgtatatatgcgtatatatatacgtatatatacgtatatatatatgtgtgtatatatatatataaaaatatatttaaataatgttaaggctagagtagaatgacatcatgggaaggcttattgaaacttggagtggattcgtagtctgccacgagaatccttgtctgatgtttgtgggtgtgtaggactgaatttgaagtccttaaatggatgtcctaacagtgaataaagacgtggggcttgaatttatgtattatcttattactctgtcattttcttgagtggtacaccagagtgcatggaaaagtaaatgattggaagccgcgtggtagttaagggtgatgatgtaggagtgagaacacaggcttggtgcctggcgtcagcacacacatcacaggccctccctgtcagtggctgtcgtctgttagtgtttccagcacagctctaaagagcgacgcttggaggctggggagagggggatggagaggcatatgattctgttgacatttagtgacatgcgctcttcccaaccaaacagatgcaaatggattttagttgtgagtggttgtttaacacctgcataagtgacagacctgcagagacaggttgtggatggaacgcaaattcaaatcagtgcatgagaacagcagctaaagtggacagacccaaatgttttgcctaaatatttggctcctagttgtacaaaaagccaaatggtttcaatttcatcctatataaaccagatgattgtgtatttacttctcacttgccctgccagggggatggttggtggggggaagacaaggacaaacaattcgaaagagcaaatgagccaaaatccatctggattttgttaatgctgattatatagtttcttctgttgtttttaatgtcttccaagccttctgtgtattagccagcattaaggggaaaaaatgacattttgactttgactccctttgtaatgtaatgcattgttatgtatttctgaagtttttcttaaggaaatagtatatgataataatgactagcactcactgagtgttcgtgatcaccaggatcaggccaaaggttttcacgcttgtgcctttttaaacttctcaacaacccagtgagatagatgttattagcccaatttaaggatggggaaagtggggattcacagatgaagtaacttgcccctagcatcgtacagtcagtgagtgtgagaggtacaattcaaaccnnnnnnnnnnnnnnnnnnnntaaatcttctgaagcaactcttcatcaccaggtgtggctacctccaatgattactttgtttttatgattatcaacaaagttactctgtggagcaggggcaggcaaacattttctgtaagggagagacagtattttatgctttgcagtacagtcttttgcaactgttccactttgtcaccacagcacaggagcagccatggacgctacgtaagaaaatgagtatgggagtgtttcaattaaaattatgtatggacatggaaacttgaactttttatgattttcatgatcacaacttactctgatctctttcaaccatttaaaaatatgaaaaccattcttagtttacaagccctacaaacactggcattgggttaggtttggatgatgggccattgcactccagcctgggtgacagaatgagactctgtctcaaaaagaagaaaataaaacaggcgttccttacctacagcctgctatgatttggggttcttgtatttttttttgtttgtttgtttgagacggagtcttgctctgttgcccaggctggagtacagtggcacgatctcagctcactacatctctgcctcccgggttcacgccattctcctgcctcagcctcctgagtaggtgggactacaggcmcccgccaccatgcccggctaatttttttatttttagtagaaacggggtttcaccatgttagccaggatggtctcgatctcctgacctcatgatctgtcagcctcagcctcctaaagtgctgggattacaggcgtgagccactgygcccggccggggatcttgtattaatartagggagacagtaagcaagcaaggctcagttaatgataaattgttatcaggagacccagcagtttctgctttttctaccctcctctttgasctctatttaaactaataggttactgggtttsaacatgccatgcagtgggaagaggcgggaaccccactgagctgtcctctaagtgaatcatgcccactatttggttgtgaggctgtggactttacttttcacgcatggcattgaaagaacagggaagggtggattccccatctcctcttcctctttggaatcaggaaaacatgtttctattctaaatgttctttgataaataagattgcatgttcctggctcctgtaacatatattttctttttcctttgtccggcatacttgactaattgtagagctttttgagcctaaaactggataggaacccagtgcatgcactcttaaggactcagaggcctgctcaaggttaagtgcagtatggtctgaataataagcatagatgcccctttactgagcagcagctgggtgctgggcactgtgctaggcatttttggatgcattttcctcctccaacttcactttcccctatgagattatttcctctgtgttagagacaagaaaaatcaatttacaggtagtttaagtgacttgttcaaggctacagtaagcttgaagtggcaaggatgggatttgaacgtctgtctgcttgattccaagaccgtggcctttgtcattcaggtcatgctgctttcctcaaggcaaggaactgaggttttctgttggcagtgaggtggtggcttcttgtttccctggtcttagatactgctcaactcacagttgaaatgtagaagtgaaaagtcagacagcagcaggtgttgctgggaatgtggagaagttggaaccctcacacaccattggtggggatgtaaaatggtacagctaacttggaaaacagtcggcggttcctccaatagtcaagagttcccatatgacctagcaattccactcctaggtacgtatcaaagagaaatgaaaacatggaccaagacttgtacatgaatgttaatagctgcattgttcttaatagccaataggtggaaaaaaccctaatgtccatcaatggacaaatggataaatatgttgtggtaaatgcgtgtaatggaatattccattttatattcataaaaatggacaaagtcctgaggcattctataatgtgagtgaacctggtaaacatgaggctaagtgaaagaagttagttacaaaagtccacatatggtgagattccgttctgtgatatgtccagaacagagaaatttagagatagaaaatagatgagtgatgactcagggctgggggagttgggggtgggcgggataggaggggtagaggtgaaggtgatgaaaatgttttgcaattgtctgtgttggttgcacaactctaaatgtactaaaaatcattgaattatacaattttaaatgggtgaatcgtatggtatgtcaattatatctcaataaagctgttaaaaaatctgaaagtgtcaattaatctttgctcccagagaaaaccactcagggcccgagctgctcatgggcacaaaaacccattcctcagattccttggccatgctggaagcctggcttgtgtgagagcctcaagtctctgtaacagcctgggagtgttggtcccgtcacagggctgtggcagcctttaaagctagaaggcactgctcagaggaactggttcctttgaatccttttccgtcaccatgcaaatgtttacaagctctaatcaggagaaatgaaaaatcacatgtctaattttaaatatgttgcctctgatcacaggtgttgttaaaacagctcttttatgactttataaatactcagatttattttgaagcaatgtttcattattcctatactatgattaaatattgagactattgcttttccaattgttctattgcagtatttaatgagtgcaattaaatggaaaaattgcctttttaactggtgatagtccattagtgtctctgtctcttcaggaaagaaaagaagtgaattattagaatgacaaatgaggcaaagttaccaccgtgatggagaggtgcgatttccctccacataatcttcagttagtgatctctgtaagagaatgtttttcaaaaggctaatagagaagtaatgagatcagaaggaggycaacccggccttctccgtttggcagcttgattaatttatttctccttcttggagattgctgcaaggggcttttgtcaccctgtgtttttcatgggactgtaacctgagtgactgctgatatattagccttgcaggcaaggaagcaagtccgttgccctggaatggaaggcataggagttaagggtttgtttgcttttgcaacttgaacacactcattgggagctttggataatgacaacaatgatgatgattttaagagttaatcaaattaaaggctatgaaatgatgcccactgtggatcctgtgcctggtgctcagcacatacaacatcatttcattttcacagcccttgtgacatgatagggctcttttgcagatgaggaaatgcaggctcagagttatctagcattgtacccttaagcagaagggggaggtaggagtgaatctctgtctgcctctaaactcttgagctcccctccagaagtccagggctcttagaaactttgtactcaaccattaaattgttgccattgtgctgaggagcaaggaaactgggatcacacagctagatcacagtgggggaacctgaattatggggatgctcacaaaagggcaaaacacaacggttgctgtcatttgatgctttatgttaagtrtgcatatgctcagttrcagaaacctaaattgctaaattgcaaggctgtatatgatatgccaatttggcatattctgtctttttatattctgccacccctatcatacttatgaaaatgccaggttgtaatcattcactgggagaaacaaggggttgaacattgttatcgcrcaaaggaagctgggcctagtaaaggaatgtaaatactaaaatgccagcatcactgttacttactgtgtttctctggatgtattacttaacctctctggctttatttctgcccgccctccccccgccccccccccscaatgcctcaatctgtggcagagttgttacattattgaaaaagaacataaagcatattttctggcatacagcatatgtttaatttataatttttgtttttatcattaaaagcaacagattgctgtattcttgcctgccactgacatggacttaattgtttcatttagacatttaartgggcaatacacttaaaatgcagatataactttaattgtcaaaacatgcttattttaggaaatgtgtttctccagtaaagctcagtatctggggctttttcggttgtattctatatgaatcttgaatactgaagtttctcaccatggagatgacaaacacataaaatgtttactttgcaaactgaatttctcttgctgctttttctgaagttccccagaggctcatcatcatcaataccatcaattaatagtcatccttggcttcctcgatcctcagcactgcgctgggcactgccccccaggagcatccatgcacctcaaatcctgaccttgtgactttcaagtccctaagtgaccccacactgaagaatctggtgaaggccatccaagcccagagttcatttaagtggcagcgatgggaccaaattataggccaggtctgtcttatgaaagatgataaatggatgtgtcatatcgggaaagaartcactctgtcatcatatgacaggctggcttgatttctttgcaccagtgtccctaaaagttgggatgggggtgtgaagcgtgccagctttcaaagccagttgtcactccattttgtgctgtacctccccagttatgaatctggggcatcttcactggactctccaagccccagtaccctcagtgtggaaggagaaagcatgacccactgggcaggacacagaaggcttctgtgagaatgaagctctatcatgcttgtagaacatggagcgctcagcaaatacaaatcacagcccatctcctccaatcatttggggtattaggattcccttcactccaactcccactggaaaacctctttgccatgacacagagattccacaatcttctatttttatttaaaaatttttttaaagagtgatctttggttttctcagtagatgctttcctctgaatagcaagcatatagatagtcttctccttcagacccccgaccatggctatattatttagtctacagtggttctttgtacaaagtgcttctgcaaagctcttagagcacccagagctggctttggaaagcaagacattaggaatgagctagcctgaatgagtcctgatttttttttttttttttttttttttttgagatgatcttcttctgttgcccaggctggagtacagttgtacaatcttggctcatggcaacctcaaacttctgggctcaagccagccgcccatctcagctacttagtagcttggattatgggtttgtaccaccttgcctggctaatttgtatttttagtagagatgacattttgccatgttggccaggctggtcttgaactcctggcctcatgtgattgccccaacctcagcctcccaaagtgttgggattataggtgtgagcctctgtacctgagttctgatttcttaaatttcacagtcccttacctgtaactcaaattcccgaaccttcaaaaaacaacaagtggcagcaaaacttgatttggaattgtcgtggtcttgtttataatcgtcatttttcttgtcatgtgatttgatgtttgggtatatgttaacacctcactagggatatttcatagcatatgattgatgtaagtcgtaaaaaatttagaatccttcaacacatacttggattttagatgaagaatcatagatttttatttctgtggctttggatgagctgtttaattttcatttcaagttgctggtaagatgatgatgataatagagataatcctgtaagaatgctgcaaagggttagtactttattcttgcaacaagtatttattgtaggcctgtattcaaaggagaataagataaataagatcgaatgtggaaattagatgaatccggagttagtgcaatgaaagttactaagagagaacagaaatactcttgataatgctgatgtgactggacttttgacaagcagtctgggacttctgctgaaaagtgctcttgaagccaagcaaaatcatttccacaccctcagcacytccagtttttcctggccttggtctcagggtggttgaccttttgccgatgtgtttttctttcttttcttttcttttcttttgktttcttttcttttctcttctcttcttttcttttytaacagtcttgctctgtcttccaggctggagtgcagtggtgcgatctcagctcactgcagcctctgccccctgggttgaagcgattctcctgcctcagcctcccgagtacctgggactacaggckcccatcaccatgacaggctgattttcttttttttcgtaggacgaggtttcagcatgttcgccaggctggtcttggattcctgatctcacatgattcaccaaccttggcctcccaaagtgctgggattacaggtgtgagctaccgcacccagcctgctgatatatttttaattatcataagaaacagttaaagtgaaattgcaaccccatggtatcggtggactgaacgtttggttctcatttccttgagatggtagtttcctcctctggctacttttgtccagccagttctcctctgtgggcatttggggaagggctctctgatagaaatatgaaatgatgagggatgcaaaaaacgtggtttgtttcttagaacaacctccaccacgaaggttccagacagagtgaaatttctgtatttgctgaccctgtcgccagtagcctggaataaacagcaaaaatagttcttgaggcttcgtggcaaatgtgacctacctttgtagttcttgggtaggtgtgtgactgtggcctatgaggccaagttgcaaggtctttggatgaactttgtggcatctggcaatgtccccagtgcaacctatgtaaaatatagcagtttcctgcacacgcttaagggaagaaaccgttgtggggaagcgtgctctgttattcttgccaatgtagccaacatatacatggggaggtctgttttatgttttatgtttgatggttttttctttttctttcttttttttttttttgagacagggccttgctttgtcaccctggctcaagtgcagtggtagaatcatagctcactgcagcctcaaactcttkggctccagtgatyctcccacctcaacctcccaagtagctgggactacaggcgtgtaccaccatgaccagctaatcttttagtttttgtagagacaagttcttgctatgttgcccacagtaacatagtaagtctcaaattcctggcctcaagcgatcctccagccttgtcctcccaaagtactggattacaggcatgagtcactgcctggtgctttctttttgtctttttctaataaccattgctatagatggttgtccttaacgcgtawatgtttaaaatacctaaatgcctaaacgtttgaaaacattccttaaaaattgaagttatagcatactaacaagtgttcatttttataattgctgatttaacttaataaaaaccaataactataaatatccttaatgccactgaattgttcacttaaagtggttaaaatgataaattttgttacgtatattttaccacaaattaaagaaaattaatatttccaacaagccaaagctctatgtaaatgtcctaaattaatgtgtttaaagagaaaatttcaccagtgrtaattttttttttttttcccctgagaaagtcttgctctgttgccaggctatagtgcastggcgtgatctcagctcactacaatctctgcctcctgggttcaagcaattctcctgcctcagcctcccgagtaggtgagactacaggcgcatgccaccaccgccagctaatttttgtatttttagtggagacgaggtttcaccgtgttggccgggaygctctcgatcttttgaccwcgtgatccgcccgccttggcctcccatagtgctgggattataggcgtgaaccaccgtgcccggcagggagtaacatttctatgcaactatatgtgggtgtatttttctgaacatgtcagtgaagtttaaatattcatctcacttctttcagtcaccctcaaaggggaatttaatttacgacttcatttgtactttcaaacttcctcctggaaacagaagaaaataaaattagatttttgtaagctgagatgatatgcatgttcttattttcaatacagttagtctctccactttatttttaaacacaacctcataatacaaataatctagtcttttctggagcagtctatttattcagacaggtggaagttgatgctaaagattggcgttaaattgagtaaaccattcatgtagtaaataagataatttgtttctgccccccaaaagattaaaatatagatttttttcaaagtctgtttttttaacacctacggtccctgaatatgttcgattgaggtttgtgtctgtaatttggaacggctttttgttgcaactaaaatattcatttgcagaaattatcactgagggtgttagcttcttyatgcttgcgtttcttgcatttgttactaaataaaatatttagaagtcacgtcgattttcaaaatgatagttaaggatgaaggtaatattggcatatttatttttatctgtgtaatttttgcaacttataaccccttcaggtccaaatgaaacaggcaaccaggtaataaaccaattacrttctaatacagattacttcatgacagtgtcttattttccagtttatatgtaggtgagattctttggagaccgtcttcgtaatatagctagtttttgtccattcattttgctttgacttccttgtataggtacaaaggtgtaagtaggagagtctaccaggcagcacacagaygtggccctgtaaccacccttgtgtaaaatcagagtaatcctccctatccttgcttatttcactgggttcatgggtgatgactgtaaatgacacaggagacagggaaagagttttgttatcctgatacacacattcttaaatgcctctagctgtgtagacattggtttgtccatattaatagtatttyacgaagtgccagttgtgtgcctgctttgtggcatatgcattggcattcattgctttatttaattcttccaacaacgtgtcagatgtctgttcaaattattcccccctttacagacacagaaactaagatttagagaggttatgcaatgtgccaacagggagaagttggagctggaatttgaaccaggctrgctgactccaaagctgtgtcctcaagcagtacatcagagccgaggaaggtcaagtttggaacgccatttagctgctctcagggagtctgattactgtttctctgttgaggctcagctcaagccttccctgggccatgaaagacaacttaggtttgggtgtcctgtgtttgtaccttgttttgtgcccacctacatcctgggttatgtctttccccaccccaagccttttttgccatctctttttcccagaaagactggaaacttgcctaaagagacagaatcccagatcccagatggatctactattttagaatctctgcttccgcatttctaaaatccttcccagagaattatttgactagttaaagcttaagaaacaccccagtggattatgagtgccttctagccaagaatgggtatttcctctgtgcaatctgagggcccgggacactcctccagcggagtagcctgtgatttgtatgggctgcatgaattcctgcactaacaaggtaaaagaaggatgttaaagaaaacccgagatcttttgggtacatgctataaggtgaaaggcttatttccatttgctcaagaacaaacatccatttgtccaccccaagtatttatatagttcaattaagcgggcaggtaaactgattttttgggtggttaatgatctgatgattttcctctctgtcattgtgattggatatgataatctgagagttgcccaaattagtgcctttactgtagttataataatgtcatgatgactgaggatcactgagtgtgccttttgctctgttaagtgtgcattcagaactttactaacatgggttccacaggaaatattagccccattttgcaaatgaagaggctgaggctcagaaatttaaaattgcttcatgtcgcacagttcagtgtaaagttgcaatgcaaactaagatgtttctgttgcttataatcttaactataataatcataaaccatgttctgttgctcagaacccttgtacttataatataaaacaatctttttaaccaagattcttcgcttgggtattctgagtagcatggaagagcattatactttttttttttttttttttttttgagacagagtctagctctgtcacccaggcctggagtgcagtggtgtgatctcggcacactgcaaccttcgcctcccaggttcaggcgattctcctgcctcagcctcctgggtagctgggactacrggagcatactmccacacccaggtaatttttcatttttggtagagacggcgtttcaccgtgttggccaggcttgtctcaacccctgagctcaggtgatccgcctgccttggcctgccaaagtgctgggattacagacatgagccaccaaacctggtcaattttctatggtgtgtgttacattttttaaaattttattttamtgtttatatagaaaaagttgccttatcaaccattataatcatggtatttagtgagtgtaatctgttctgatgtaatacttagtttaactggtaaaaaatattttgacagaatttaagattagttctttttgctttgtccgtcaatgtgaaataatcagtatatcatatttatagaattctgctaaaacatgcatatatacataaacagatattcatcttaattgatgttaattgagatataggagtacttcattaagtctccagaatacatacttcataagcaggaggcatatatgtttgtatatatgtatgtacatagacttsatacacatgaaataaaatttcaaatggttcctctgttcmgcaaacgtgacccaaagttttggcttatttggcgttttgttttcttgaagacatacttgaattttaaatagttaatccatttaagaagtttcatttaaggtactgttaaaaagaaaaaacacagaacaacacagtgagagcagaaaaggtatcatctcctcyccctcttcttctcttttagaaaccttgctgcgtgatccactgatggtaaatatttcatgtactttgcatatcagcctgagttccttttgtgaagtcaggtaaatggaatgtaaatcccctcgtcctccagacagtaaaacggcattatttgatgttacatcgcataaagatgcagatttgattccccctttactcacactataaaaacaaagtttttaaagtggttagccatacctggaaatgtaaatgcattcgcstaatgtaatgccaaagaaaaattaagacaaatgataccacatcgctgccacaaactgcggctcgtacaaaattcactttagttattatgctgtgaatacgggctctcaccctcctccgtgaatgcacaatttatgttgaatgcaacatgaatcattttaatagaccaagcaaaaagtccccaaagtcgattttcaaattatgaaccttggaacagaatataacaacagcgaacaacaaatagttcagactttactctgagctatgagtgaaccattaaagatacagcaagcactttcggtgaggtgttacacaattcatagcctaatggcaaaaatatcagaaatggggtattttttaatgctgtttttccagccatcattctgttcaattattttcacatttgtgtaatcaagatattcccaaacagaacatagagttgtgtattgttgggaactaattatatgtattataaatccaagaattaatttaaatgacccagtttccacagagaaaaagccacattgtttttaaatagctaactaaacaaaatgctaacccatatgggagaaatttccaaagaattaaaaccacccaccaggaaaatgggaaagtctcccctccacacacacacacacgcgcgcgcgcacacacacacacacacacacacacacacacaaaatcaccaaatcacacctgaacaagaggaagaaaattaaactcattgaggagataccatcttttttaaaaaaaaaaaaaaaaggcagcaaaatgtgagatgggcgtttattatgagatacacgaagacagagaccagaggttccccaagtagcccctggacctgcagtgtcagcatcacctggtagcttgttagacatagaaattcttgggctttattccacacataatgaatcagaagcttatggggtggggcctgcagtctgacgtttattttttctaaaactttaagttycagggtacatgtgtaagatgtgcaagtttgttacataggtaatcatctgccacggtggtttgctgcagagatcaacttatcrcctggatatgaagcccagcgtccattagctgttgttgctgatgctcttcccaccacctgcaagccccagtgtgtgttatccgcctccaccgtgtgtccatgtgttctcatcatgcagctcccacttataaacgagagcatgcagtgtttggttttcagtttctgcataagtttgcctaggataacggcttccagctccatccatgtccctgcagaggacatgatctctttcctttttatgattatataatattccatggtatatatgtaccatattttcttcatcctatcatttatgagcatttggagtgattccgtgtccttgctattgtgaaataccatttgacccagcaatcccattactgggtatgtaaccaaaggaatagaaatgattgtattataaaggtacatgcacatgtatgttgaytgcagcagttttcacagtagaaaagacatggaattcacccaatccgaattttaacaagtcttccatgtgattctgagacagactcatgttcgtgtggttctggctctgcagaactgaggtgggccccaaaacttgmgtttctaaaaggtactagctgagcatgatgactcacatttgtaatcccaccactttgtgaggccgaggcsggtggatcgcttgaggccaggagtttgagaccagccttgccaacatggtgaaactccatctctactaaaaatataaaaatttgccgggtgtagtggtgcacacctgtagtcccagctatttggaaggctggggcaggagaatcgcttgaacctgggaggcagatgttgcagtgagcygagatcaggccactgcactccaacctgggtgacagagccagagtctgtctcaaaaaacgaaaaacaaaaaaaaccaaaagactaaatgtataaaaggtacccaggtgatgttgatgctacttgtcttggccaatgaaatgaaaagcctacaggccaggcatggtggctcatgcctgtgatccacaactttgggaggctgaggcaggcagatcacctgaagtcaagaattcaaaaccagcctgaccaacatggtgaaaccccatccctactaaaaatacaaaaataacaccaaaaaaaaaaaaaaaccacaacaaattagccaggtgtggtgatgtggcctatagtcccagctatttgggaggctgaggcaggagaatctcttgaatccaggaggtgaacgttgcagtgagccaagatctcaccactgcactctagcctgaacttcagagagagactatgtctcaaaaaaaaaaaaaaaaaaaaaagcctacagttgacaggcagataacagagggagcaaaggagtcttgtggaagacaatagggagtgttgaggacctgtcaaacaacacagtccccatctgtactttgggagggaaggacttcttaattccagctgcctgttgccatgggggaacatagacccagaactgccatcytttctaatttttttaaaaattagaggctaaaagttttggcttataaaaatggtatttcctgagtttttacaattatagtattaagatattcctaggtttttgtttgttttcgagacgaagtttcgctctcatttcccaggatggagtgcagtggtgcaatctcctccgcctcccagtttaagccattctcctgcctcagcctcctragtagctgggattacaggcgcccgccaccatgcccggctaattttttgtattttttagtacagacggggtttcagcatgttggccaggctggtctcaaactcctgacctcacgtgatccacccgccttggcctcctaaagggttgggattacaggtgtcagctagtgcacctgaccctaggataatcttaattttaagtaactggtaactcataaatttttaaacactctgcagttcaaagaaaacatgtttgtggtaggtagycagtttataacctgtgtaagactgtgttattagcaaatccctcaatgtgttgaccaagagtgggtaggaatcctgcagacagaatcttttgaaggtggtttgtttttttattcctttataagtacwgttgtagatttacaaagtaattgagtatatagtacataaggtcttgtgtacccaccgatcgcaattgagcatatagtacatgctgtcctgtgtacccactgatccctggtcctgcccctggtatgagggtattaacatyttgcattagtgtggcacatttgctacaattaataaaccaatatcgatacattattaactagtctatagtttacatgaggggctgctgcttgtgttgtacattctataggtttgttcaatgcataatgacaggtgtctgtcatttcattatggagtgaaaccattccartttcatacagcgtagtttcacgcctctaaaagtcccctgaaagtgttattaaaagtactatctggccatgtcctcatttccccagcaaagtccttctgagaatttaggckctttaggctagaggatctcagtgctcagaatgaaatatccctgtactccaagatgcctccagcaattataattgaatcttgaagctagagtttcttggctatcctatttcccttttgtttccaccatgaagaagtggagagccgtgtgacgtcagtggtagagctgatgtagaagcgccctctctgttcctggcagtgcctgtcctgctaacctcgtgtctcttgctggggtcttcatcagtaagagacctcacaagatgctttatcaggtcacttggcaaccaagctgatgaggatagcagtttcttttgttcttttaaaacatatataaaattatttttatcaaacatgacagatcaaaagccttctggaaaggagagatggtaactaatttaggcagtgtcttttgctttcacatggtgtacccagtactattaatatgaatttatcacatggaaacaaacttttaaaaaaattaattttgtgaattaaataaagcagcatgcaaatttactatcgtattcagcaaccaaaattttatcacttgcctgatactgcctggtgagcaggtggaaatgtagacacccaaacacccttcatggattcccagctgctgagagtttgaatagtatgtgaagtctgtagagacaaaattgttgttttccccagttgtaaagtgtgcaatattatccttgcaaaattgtctgtttattttttttgcccttttgggggacaaaatgtctttatgttaaattgttttattattgttatctttatggagttaagggcacataaaatattcttacagagagarattctgtagtttccacaagtaaccagagaattgttcatggcagagaattattttttcaatgcctattttctcctgaattttctgacggagttagagataggaaaataccataatctgctataaattcagttgaaaaatagaaatagtgagaaatccaggttgtgctctgtcgtaatttaagcctaatatgtgattgtctacatgtttacaagttaccgcctttttatttcttctctttttctgttttcttcttccatttttatgttttgctatgccattcattcattctattcttttcatttctttttctttttgtaaaaattgtacagagtttaaarttagtcaggtatgtctattaaatttttacgtaaaaagttaaagcagccctcagcatcaacttyttcttcatttctaactcatttagtgaattcagttggtctttatatatgtagctttaagtaattgcatgtaaactgttacttcttcattttctagtcttagatattatctgtaggtttttcaataagaaggaaatttagcttccttctactttggtgccccatgatgatgtgcatcttttttatttctgcatcatatccatatagtgatatcatgtataatgatgtttaagaagacagttwtttttgtttaaattgttataaataagtaagtgtatgcaccactatgccatgtagcatatcaagattatttttctttcctgcaccttatwttttccctggagttaatactcatctttttttagaaatttgctgagtttgtgatgtacctatcattcaacctcaaactttcatgtgattgtctaaatctcagttccttttattagaaaaaaaaaaaaaaacaactcccctggagcctttgtaccttctgyagtttggggttgttgtcctttttgcttggtgcacaggaatacttggtgatgttctttttaaaactgccctcacattgtatcctggaaagttcatttacctgtacccggagttggaacttctcttccacatcttttcctgtattggtttggttattgttttgtgggagcatgtcttgtagtagctttctgaaaaaggatgatagaatatgtgtgtgtgtctgtgtgtgtgtatttcaggtttcaaaatgtttctgttccatcctcattttattcattgttagggatagaattacagatttaaaatcaattttgcttcagagttttaaattctattttgtggctttctgtgttgttctcgggaagtacaaacccttgtgaccgctgttctctttcatttctatctgcttctctcttgggagtacaatgggaggcatatcatcaaccccttgctgctatccaaataggagactgttccctttcaagagaattttaggtattcagatcctagacctcccagatggcctcataagtatttttatcctctatttatctttgtctttgtgttactttcagggatagttcttctagtctttccatggnnnnnnnnnnnnnnnnnnnnacgttttctatttcctttatgtttgataacattctattcttgtttccatggatgatgttactcttttaactctctgatgttaatgataattgttttaatttttcttttctgtttagtttctatcttctcaaaattgttttcatttgttttggtaattgtgtttgatgatagtctttttttttttttgagatggagtcttactgtgtcacctaggctggagtgcagtggtgtgatcctgcctaactgcaacctccacctcccaggttcaagtgactgtcctgccttagcctcccaagtcgctgggactacatgtgcgtgtcaccaagccgaactaatttatttttattttttgtatttttagtagagatgaagtgtttaccctgttggccaggctggtcatgaactcctgacctcaggtgatctgcccatctcagcctcccaatgtgctaggattacaggcatgaaccaccacacctagcctcttgataaagtctttccccaaatgttctgatctgtggatgtctgtttctatctaagtagaattcaaagttactgctgccaactcttagcacatggccacggccagttaactgtggactcctctgaaggatgatctggctggactattttttgggaaaaccactgtgtttgaatgtttgcatgtgtcctgttggcagaacaaatatcccacagaaggatcttcttatcttctgcttggggaaggtgtagctctgactgctagagttctagagccaagtgagggggagagttctgagtctctgcattcagtaggtaaacatttacaaagtctgtgttttcagtatcatgccactgttctcacctgtttatgttctcttctgataataaacttctgtcatttttctggagttatgaaatgatggtatcctgctgggctgagtggggagggattctcaagctgtacatagctgacacacaggtttctaaaaggttgtctttcacccccattttcagaagtaccaggttccacattttctgagcctttgctggctctctgataggaattgtgttacttctcagctgtccccatggctagcttaagactcagctctcttaagtcacttcctagttgtccatctgctttccagcatccaactgtaattttttttttttttaagagaaatgaagtctcattttgtttcccaggctggtctcactgtaattcctgggctcaagttacctctcaccttggcctcccaaactgctgggattataggcatgaatcgctgtgcctggcctcaactttaaatttttatattgaataatctttgatttgtattgtcatgttgttttatagcagttactgctgttttagtgkgatttgggatgaaaattttaaaaaatmaatatgtataatccaccatctttgttccttttatttttatgttactcattcttttaagcttgtcttrgacgtgagtattatgttttattttgctgggagaacaatttgggaaaatttgagcagcaaaccataagtttcttggtgtctgtgtacttggagctctgaatcaytattgtcactgagggagtggacaggaagtgatgctgagataagtctagatgggataggtgggcaacatgcaggagaaacctcctgggaaaggtgagcaagagcacacaggtgagacatagcatcgagtgtggaaacctccatgggtggcaggtcagtgttgctgagggatgtggacatgtctgaggccaaatagatgagtccctattgggttttgcctctccacaatctagaggaatatttatggaaggttaacagggcatggtggtgcacacctgtaattctagcacattgggaggctgaggtgagaggattgcttgtcttacaggagttgaagactagccttggcaacatagcaagacctcatctctacttggaaaaaaaaaattagctgggcatggtggtgctcacctatagtaccaggtacttcggaggctgaggcagcagaatggcttgagcctgggagatcaaggctacagtgagctgcaattgtgccactgcactctaatttaggcagcagaatgagactatgtctcaagaaaatgttcaagaagaaatacaaactattgaaaaaggaaggctgaatgctttatcagaaaactgtatttrgaggggacctttctggggtcttttagtcagggtacataagtgtcagctgctacgacaaacaacttgcaacgtctcattatcttcatacaacaaacgctgatttgttcctttcattacatayccagtgtgagttggctggaaggtccaccctacacaaccactcgtgaaggcagacttgaaggggactccactgtcttggagctacactctaaaacaaatagcctccaaagtcaaggactctgtaacaggatgaagcagcattttttatgggcaggtttgcacgtggcatttgttgcttccatcaacattccactggcgagagtgagtccctggcccctatgtaattatgagggaggctgagatgtgagaagcacatgggtgttgggagagcactaaaggtctctagcccagaagcatgacttccagccaagtgagacagggaagsccagaaaaatgtgtcacagaacttatggcatcagaatctgattcccaggcatgctttccaccatatgcatagacatttgcaccccagggatagcaccattactcccaaaaattgcaggtttgaaagggtacctaaaaacaagccaccagattgtcccattccactrtcattctgccatcaacaccgaggtgtcggagtagcagkagagccacatatttcttagtgaggggacccagaatgatcccttttgtgctagaggatctgagttcatttcatgaaactgaagcatcttcttggagmtataagctcaccttgggatrggcccttgcagatgacaataaaggtattttggcacataaaaaaactgctcagcacaccttgtatttgtatttcctttgacgtgaaccatggccatccagtaggccacgcaacattcccactgccatgttggcttgtttttcttttgttttcttgtcaacataagcctcatgagacaacagcaggatgcaagattgtacaatgrcaccatgactctgytttctgggtgtcctctgtgggctctcagcagtgtccccgatgtggagggtcttcttaytctgtgtgtgtgccctctgctgttgaaagttgcctgtcacccatgatgctgtgctgattgagcaaactaatccataacccaccgccacgttcctcgcctacttgcttctaggcacattaaacggtcagtgcacaggtcctcatttttctcatgcttccatttccatattctcaatcaatcactgatggccagctgtcaacaggcaycatttttggtgggacctgaagatgtatatcccttgttttcagattcctcgcctctcatcatgtaaggtgatgctctgagctgggtcttaaagcttctgggcacagccccccttgagtcttcattatggcaaatctagtgcaggtgctgagaggcggtaactctttaaagggacaggatatggaaacgtggcttcatggacagtattttagtatatttctgtaaatagcacatgtgctagatagcagatttgtgtatggatatgcacccggctagggacctctttaatggtcattcatttgggagatgacctttggttcctaaactggtggacataccaaggactaaaggagtgacttgytctcagttctttgtcattcagctgctttaatattaatatgacacccgttttgggcttgaaaagttttccttctgctgagaaatgatgatggtgacaatgatgacaatgacgatgacccttggttggagcaatgtagtctaaatgtggttgcatcatcttctttcttcctttgccttcctcccttgctctttttctgcccctcatgccggctccttcctcccacatcaccccacatttttttttctttctcctcaccatcaagaaatgttccagaatgccattattcttcgtcaccacggtcaggtatatcatcctaagggcagagggtgaaggtgcgtaattagtgtttcaccagactgagcatcatcctcggtgcaggggagaatggctggtatttatgagtgaatggcagcgttttgacaggatgatgaataaatatgctgggcccagaggactccaggtgataagcatttctttgtggtctggtaagtgatagyacccattgcttaatttctctaaaatctgcatttgtcaattttgtatttttttatttgaaaggtatttgcttaaataaataggccatataaatctagctcccaatgtccattttcaaatgatttccagcaaggaagatggaattaccacgaggaacctgttctcttatgtttctgcttagatggctgggtctataccagggtttatttaaatgaacacaggaaatgccattcacctttaccatgaatgggaatctttgcctgtgactctatcgtgtgaattagcagagcttggctattattcccctacttcggtagatactggctgtacagaagggaaccccagtttcaatgagtacctatgtgctgggcacttagctggtttttacacacatacttcatttgaagggaaggaattgactgaaaagaattctccattccaacttcccaagtcagttgccatttggccctgataaagctgtactttctcacttgttccttatttaaaatagagaaaagtgcatcaagctcttgttaatctgtcaggccttcctaagatgtctgaagaagttagtttggtgaacatgggcttcagggtcagactgcttgtgttccattcttgatcctatcacttccttgctgcgggaactctggaaagtcacttaacctctctgagcaagcttccatttttccaggtgaaaacgggagtttagcctagtccccacttgataagatggttgtggaaagtattgtgcgtcatggacctaaagtacctaggagattggcctggatgtcgttttctcataaagttgactatggctattggtggtactagtatgnnnnnnnnnnnnnnnnnnnngagcagtacatgggggtatacagagtgcaggcctcagaactgcagaacatctgcacaatctccagcaagctaacctctgtggacatcgtattcctcatctataaaagggagacttcaatcttatttaatggcaaaagtcacaattacttttgtaccaacgtaatagaattaagtaaaataaggctagacatgctggctcatacctttaatcccagcactttgcgaggccaaggtgggcagattacttgagcccaggtgttggagaccagcctgagcaccatggcaaaaccccatcgctaccaaaaaaaaaaaaaaaaaaaattttagtcgggtgtaatggcacacctgtagtcccatctactcgggaggctgaggtgggaagtttgaacctgggaagtcaaggctacagtgagctgtgatcctgtctctacacctcagtctgggtggcagagcaagaccctgtctcaaaaaaaaaaaaaaaaaaaaaaaagtaaaataawgcatgggaagtcccttatacagtttgtgatatgggtacacactcagtgaaatggccattaatactgctgttcttaactctgaaarcagagtgggccatttgaatgctcactttgatattttttaaaggaaaaatttgaggcattgacacatgccttttgcttactygcttggattggtttgatcaactttgttgcggtctaatttatgtawaataaattgcatccatttaaatatacaattcaatgagttttgacagatgcacatgcccatgaaaccaacacgaaaataaaaaaaawagaacatttacgtcacctcaaaaagatttcaaatgccacttctgtggtgtatgactctgagtccagacagcctcagctccaggaaaaccctggtctgttttctgtcactattgatgaatttgcattttctagaattttagataagtgaagttttctagtacttgttctgcatctggtttctttcattccacataatkaccttgggatgtacccatactgctgcctgtatcagtggcttactcattgtcattggtgagtagtactccattgtgtggagaaatcacattgttttaaaaatacctaattacctgctgatagacatttgggttcttcccagtttttagctgttgtaaatggatactaatgtgaacgaagccaccgtgaatattgatgcactagtctttgtgtggacatatatctgttttatcttgggggataatactctggagtggaatgggcagggtggtccgtatagggctatgtataactttttaagaggttggcaaatacttccctaaagtggtcatcccattttacattcttgccaacagtgtttaaggatccacttcctctacatccttaataatacttgatattatcggtcttctaaattttctgtttgggtacatagtggtattttgttgtatatatttttttaattgtgaaatatgtgactatgatgagtaatgattttgaacatgaaaactatgcttattgctcatatctatgttattttattatttactttttttgagatggagtctcgttctgttgcccagtctggagagcagtggtgtgatcttggtttactgcaacctctgcctactgggttcaagcgattttcctgcctcagtctcttgagtagctggtgttacagaagcctgctaccatgcctggctaatttttgtgttgttttatttttattttatttttttagcagagacagggtttcaccatgttgaccaggctggtttcaactcctgacctcaggtgatctgcctgcctcggcctcccaaagtgctgggattacaggtgtgagccacagcgcccggtggtcatatctctttcttgggtttttgtgggggttggggtaataggtttattgagatataattcatataccacacagtttcatttttagtgtattgacaggtgtgcagtcatcgtcacaatcaagccatagcttcttttaaactttgtcttccttctctttctaattatctccttcccccgccccctccattctctttccatcctttaaatgtcagtgtcccccacaattctgttgttgaccctttctccctctggccaatrctccttcccctgtagatcatacccattcccaagatttcagtcatcaaatccattccaatatgactcctgtatccatatgtccagttccaagtatctgtccatggtgttggtcccakgttattcgcacctcatatgtctttggcacagcactcttgacagctcataaagtcacgctgttacccccacaatgtccccccacatatcattgctatccctcctcgacacccacacctcytgcatgttcctgagcttcttaggcgtgttgcatcttcctgaccttcccagtccgaagcccaaggagatacttgataaatattcgtctaataaataaatgaacttgtgttctccatattccttgaaaatatgcttcacttttatctttttaagaaattaattgcattactatcttattaaaggtcaagaaaaataattcatatcactcactattcatgagactgctaaatagttgccctggcaatttctgattataattttagaaatatttctaacctctggccttttttcttatctctacttaaagcttttctggaaggaattcattttccactttccttaatgttccttaaatgttstacatatcttaaaagtggattcctcataaaacaatatggactatggtcttattctstttaacggtatgaaagctcgcctgaaaggccaagagtaagattcttttaaaatcatgcccaagttttaaaggaatataaaactttctctttaaaaatatacctttctgctttcatcccytaacccacaaagctcaagtctagtttaattcaaacttggaaatagttcttttattattgctccctgcaatgggaacagagctgaggctcctaaggtctagagtcaacatgaaaatacctttgcttctgggccatagctgtgtttcttcttaacaaggcagaagccyagaagagacttcatgtactgtgactgtaataaagagggttgtaagtagagaagctggaatttgaaaggttacgtacaagtcaagctgcctctgtaatgtcacttatatccaggaaagagtggcaaagaaccatcccagcagatagcttgagggtgggaagggggataggttgttgataatatggaataggagraaaaagatcatagagccaaagagctcgatacatatactgatgcggtgtttattttattttagttttttgagacagggtctctgtcgctcaggctggattragtgcagtgaatcttggctcactgtagcttytgcctcttgagctcaggcaatcctcctgcctcagccccaccagtagctgggactagaggcacatgccactacacccagttaattactacattttctgtagagacgggctttccccatgttgcccaggctggtctctaactcctgagctcaagagatccacccgcctctgcctcccaaagtgctaggattacaggtgtcagccacagtgccatgccctgatgtgatgcttaaattcagaaattgggaaggagggtcaggtagctataagcaaaayacaagagaaatataagagaaagaaagacttgtatctgttgttagtgagtttttgtggtgrtgatacattaatggaggcaacagagggtcagaaatcagggaaatcagggtggaaaatagcccagcagaggggaaaagaggaagtctgaacgagggccacattgcagatagaggcyggtgtactggtctgctcaggctgccataacaaaataccacaggctggatgacttgaacaacaaaaatacattttctcatagttgtggagcctagaattccaaggtcaaggtgccggcacagttgatgtcttctgaggtctccctcgtctgcttgcagacagccgccttcccaccgtgttctcacgtgacctagccgctgtgtgcatgcatccctggtttcttttcctgtgttcagatgtcctcttctttgaaggacaccactcagattgcaataggacctgccctgatagcctcattttttacataatcacctctttataggccgtacctccaaatacagtcacattctgaggtagtaggggttaggtcttcagcatatgaattttggggaaacagaatccagctaacaacagttggggatgaggctataacgaataccactgcctaatgtttgcacggggatatcatgcttttcagagaccatctgcatccttatctcacttaatccttgccccaccctttagaagaagccaggaggaggtcctagtcagctgatgtgagattacatggccctgactgtcttgcctggtgctgcaggccaccttcacagccttgccataccttttcccatttatccatggattggtatgagccctaatggtgcacccttccgacaatccttcatccttcccagacgtttcatcagccaagtgaaatttgcaattgtttcagtgattgaaattatgcttggagtgcaggtgtcatggatgaaacagcaatgccttgcggtgacaaattcagtgtagaaataattttagcaagcccagtgattggaaaacaatgactcaactttaagctatattgattttgtatttctgggctcagcttttgactcagtctcattccccagaaataatccctgttaacatttcggtttgtgttatggaagtgttttctcttctatgaattagctaatgcccataccatacatatgcctgcatttgtacactcttaagccaaataacatcgtactgtgtattattctctagtagcctgctttttattgaacttaatgataaatggcaaacatttgaccatgtcacttaagtttcttaccgtgatctccaacagctaggcaatattctgtcatatgggtttaccatacttttctcaatccacaatctcatcagagtcccaatagttgcctgatatgtctccatcagttgtgaggtatgtttcaaatgatttattactagaaattcttagcgagctgaagtttgtaaattttctcaagctactttattgatatataacacagatacataaactttgcccattcaaaatgtacaattcagtgctttcagtatattcagagagttttgcagctgtcaccacagtcaagtttagaatattttcattttcccaaaaagaaacccttgactggcatccttttccccacttccttttctctccactcccaacctctctcccagctccaggtaaccactcatctactttctgtctctatatagatttgcctattctagacttttcatataaataaatcagatactgtgtggccctttgtgtctygatccttacacttagcatcatgttttcaagggtcattcatgttgtagcatgtatcagtacttctttttttagggctgagtaatattccatttacggatatgccacatttcatctatgcattcagttcayggacatgtgggttgtttccacattttggctattgtgcataatgcttccaggtacacttgtctacacatttttgtgtggatataggttttccttttttggggtatgctcctaagagtgcaatttctggatcacgkggaactccttgtttaaccttttgaggagccaccagattgttctccacagcagccacacccatctacattctaaccagcagtgtaggaaggttccgatttctccatatcttcaccagcactcgctgtcatttttctttttagtcttgtcattttattgggtatgaagcggtattgcattgtgattttgatttggattttcttgatggcttaggatattgaacatctcttcatatgattattggatggatgatttttttcagcggttatcaggtcacacctgtaatcatgcccacctcattttcttacagtgcagtgtgtgcttttaggcacataccaagagcttacagagatccttctggttcagaggaaagattcacatccccaacaaacactgctccccgattacaatatagagaggctaaattatagtccatatcacttttcctttaaatccctttacttttttgtgctacaagagtttcagaataataattcygcagaaaaaagtactgattgtccagcagttgtgtcaggtagaaaactgggatgcccgactgcattggtttagccagaactgtggccatgaaaccttgcctggcccccagggatggggtgaggggggatatcatatatgctttaggtggggcagaggggtggtctgcccctgtgcaggcaggaatgttcaggaagcaggctgcctctgtttctactctaaatatttaacattcacggatggcatggatcctgactaagcggagcagatgctggctctatattgcacatagctcctgaatatcagccctgcttggctatgcatgtgttttttgttagtttttgagacagagtctcggtctcttgcccaggctggaatgcagtggcacgatgttggctcactgcaaaccctgcctcccaggttcaagygattctcctctcccagcctcccgagtctctgggattacagacgtgyatcaccaggcccagctaatttttatatttttactcgagacgtagtttcrccatgttggccaggctggtctcaaactcgtgaccttaggtgatatgcgcccctcagcctcccaaagtgctgggattataggcatgagccaccacgcccagcagtatgtttgtttttcttcaaacctagatcaagagtcaaacactcaaatgtttggtgggagcagttgatgatccagagctttggagtcagcgagacagtagagagtggtggagatggtggcgcacaagagggtcagtgccccatctcaaggaacagctgcacctcrgcctaygcgattgtgaaaatgtgagcatatgcaggccagaccttggcttctctgtcttcatttttcacaggagccagaagtttggatgtgcaatgtgaaatctcacaaattaaacatgttacataactgtattttgtttcctatctctgctgtaataaattttctcawtgttagtgacttakaaccacacaaaagttacactttacagttttggaggtcagtggtccaaaataggtctcagtgggctaaaatcgatgtgtcagcaggacaccatttytttctgtaggttctagaagagaacccacttccttgctgtttccagcttccagggactgcccaaatcctttggctcatggccccttcctctatcttcaaagccagggatggctgctcaagtccttctcaaactgccctgttcctggttctctctcttctkcttctgcttttaaggaaccttgtaacttcagggagtctaccctgataatctgsgataatctgcctrtttgaaggtcagccaattagcaatcttaatgccatctacaaccttaattaccatttgctatgtaacatatttatagatatcagggattagttcatgaacatmttggggtagagggcattccacatacagcagtacctataatgtatatgcttcttaaagaatgcatgagtctttattttatgtccttggagtgtatagcagagttagatagatctttctggattggcggttgattgaatattggctgtacaaagaaactggttaggagtatagagaaaagatcaatcatagcactagcttatagtttattttattctttaatgattttttaaaaatatttctctcacttacttgaaaagcagtcttagaaattaactggaatgggtaatttattygtctttcttcttttgtaaaataatggcagtttgtaactcagatttttgtatgaggaataaataaaatactgtctgttttcctttgatctttctatttgtggtccagccagccagctaactatgcattcctttttctgccttttcatcataacacctatcttagcaactcttcattgctgctttgcaaagaggatttgagattgtttatgtaggggcccgtgtataatacctcaagagaaaaagacacagatgaggctattrggattaagggaaaatcaagtaaatcgagaggtaaagcactgtgcagaaatattggccagaagctatgaacagttgccacagctgggctgaagagttacctgtgagccttccaggggtgtaagccaagagaaagacagttcaccaaatctatcgattaatagaaatcatccagcagcagtgccactgtaagatgttcaatacgtagcacctttctgtcccttctcctctagccagttgggacaggattagcaagccaaagactttctgaaataatccttagctatattcttggtattcaccaaggaatttaccaatatgcaaagacttggggataattagtattatctttgccattacctgcagtaatattatgaagattagagatgtaactctgtcctgaagaactgcagtctgtggctcaccttggagaagaacttaagaacttattgaagtgagcaggctcacctgcctttgctcagagccacatcacctgcaggcaggatctgcaaggtcagcagttagcgtcaagttgcacagcctgggcttgggtggcgttcgctttacccttgcccttgatgtggtgccgagttgtcaggattctcgtaaaattcctgggtgatggcttcttctgttctctttatttccttaactgaacatctgtctaattgttcacctccatcgctttmgtgctttcctcatgctttctctctttccagacaataaactttattttcttcataagaattcagtctacgcaagggtattaggcagcttgtttgcaccttttaattgctggatgttttccagaaaggctgtttgcagtagttccagtgggttcatctgtgaatcaggaaagacaatgcagctttgtgttttggtttttatcagttaccttctgtttgtaaacatctgtttggaaacgtttgctggtgcccaccccagcacccccccacccctgccagaaataaagggattaatctctttttgcttggcatagggagaagacagtgtctgctgatgtgcttaacttttttttttttttggtcaggtgtgtaggtatgtgactgaaacccatagactttgcacatattgtcaaatgactttccagagggactcaggcactttatttaattaatgccaatgaagcccgttaatccgctcattactgcagtttaattttgatgctggtttttgatgatgtattgaaaacttgtataaactggcaattacaactggaaaacatttctagtttagaagagacccttatttttcatatgcttaggaatatccagcaagccacttttaaaggctttttatcacattttattcttaagctttctgaattccttattatattttgcctgataaatagttggattttgttttttggttcaatgtaagaatattcttaaactaggtaaactgttttaattgtttgtcattatgttctctcattctgttaaattttgttttctatttttcatgtttttgggtttttctagatggcctgtctttaacacttcttgatatttttgattaaattttcatatatcatcaaaaatagagatgacagccaggggtggtggtgcatgcctataatcccaacacttttggaggccaaggtgaggagaccacctgaggtcaggaattcaagactactgggcaacatggtgaagctctstctatcctaaaaatgcaaaaattagccgggagtggtggtgcatgtctgtagtcacagctacttgggaggctgaggcaggcgaactgcttgaacctgggaggtggaggttgcagtgagctgagatggagccactgcactccagcctrggtcacagagggagactctgtctcaaaagaaaagaaaagtagagaggatagtataatgaggttcctgtctgccagtcactctatagtaactattaggaaacccctttttttctctgaagtcattgctcctgtgtgtgtgtgkctgtatataaaaaaaagtatgtatacatayacgtatatgtatgtgtatagataaaaatgcatgtatggtgctgggcgcagtggctcacgcytgtaatcccagcactttgggaggctgaggcgggcgaatcacgaggtcaggagatcgagaccatcctggctaacacggygaaaccgtgtctctactaaaagtacaaaaaattagcctggcgtggtggcgggcacctgtagtcccagctactcgggaggctgagaccsaagaattacttgatgaaacatggcagacgacatagaccagcagcaaactaccaacactgtggaggaccycctggatcttaggctcagcccagaggagcgaatttgtgtgaaaatgagaaacgaccgagagcttcgaggcagattacatacttatgatcaacatttaaatatgatcttgggagacgtggaagaaactgtgactactatagaaattgatgaggaaacatatgaagagacatatgaatcaacaaaacagaatattccagtgttctttctccggggagatggcattttcctggttscccctccactgagagttggctgaaacaaagaatttgtcmtgtayggaaaacaggagactttgtacagtggcctctctaaaggtgcaagatattcaaaagagaaacccgcatacatttggatattaagaaataattctggggattcttccactcctgaaatgagttgatttgcagataattcacaacttcttaagctaaatggtattttcgtttttctcaagctcttccaataaatatgaccaccaagatttttttttcctaaaaaaaaaaaaaaaaaaaaaagaagaatcgmttgaacccgggaggtggagcagtgagccaaggtcatgccactgcactccagcttgggcracagagcgagactctgtctcaaaataaataaataaaaatgcatatatgtatatttgtgtgaatcatatacacatatataaaatatatgtatcatatacatatatatcacatttctttttctagtgtgtgtgtaccttgatttatgtctcacatattcaaaataactcaacttgtttaaaataagagcacaacctatttaagtagtaaagattcaaagccttcttctaaaatgcttaactttcctgtggatttgtggacccgtgggaaaatctcagtccccaggcaggaaggaaggagatatgacacatctctagtttgttgtaagtcgcctaccctagacctcatctccagtgctctgaatgtggagaggtaggtgcagggcagtgggatagagaggtgcactttgaaagactatcacatggaaacaaaagttccggctgggcacggtggctcacgcctgtaatccaagcactttgggaggccaaggcgagtggatcacgaggtcagcagttgaagaccagcctggccagcatggtgaaaccccgtctctactaaaaatagaaaaaattagccgggcatagtrgcatgagcctgtaatcccagcgactcgggaggctgargcaggagaatttctkgaacctgggaggtggaggttgaagtgagctgagatggcaccattgcactccagcctggcagacagagtgagactccatctcaaaaaacaaacaaaaaaaagttccaatacacaatatgttatatgagatcttcacccaatcaaggattaaatggccaattcctaaatgatgcctacctttttatggccatgtatacctttgcctcartactactggcatttgctgacatccatttatcaagatacagggatggatttctagaaggcccaggcaggggtgctggccaggagacaccaggcatagaccttcctttctcagagccttcgtggcccctagtttgaatctttgagtcactgcagtaaagttcctgatgtttgasagtactccttatgaagggagtcatatgagttgctagctgggttctctggatggtggtgtcatgccaacatgggagccactagcacaaagaacatgctaggttctgttgagacctgactttgggaatagcataggtacttayctttctcagcaccacacaaacacactccagaatgcaaaggaacctgcactgtgccatcttgcttctccctgcatagccacttctctttccagtggtgtttgtattttggttcattcaatcaatgaatgattgattgaatcaaccacttggtcccttcaatctgtaaccttcctgcaacactgtctttgtgatgttatcataaccttgatttttgagggatagaattgggcataatcagagaaaacgtggtctgggacacatttgtgggctattctatgctaaacatttccatatcattaatgttcaacacagctttgtggtgttggagataggattatcattgttaggatggttattatcaatactagctgtgattattgatcacttccacatgccaggcacagtgctgggtgctacatatttattacctaatttatagcttgctgcactcttgctgggtatgtgtaattattcccatttcacccgatccctgggagtttggtgaattaatcacccagcatccaaatagctaaccrgtagcagagctgggattcaaactcagttaggctgacttctgtgcctgttttcttgcctaagcggtggacgcattgagtaggagaaggccagttattcctctttgtcactgatacaactggggacctgttgccggagatgtggagctgtgcattagggctgggtagaacacacataatgaaccatatgcacgagaactttttcatctttctgcatacacttggaactagttctttgttattgtaaaagcatcatgcaccaggtaaaatgtttaataacacagagaaatctaattgtcaagtatcttctcaacacacattaatcaacaattctcmtatcgaargataacctcttgtatttacaaaaaaaagaagaaaaagtgctgtcatcagtaaattcattcatgtatgttatacactyacatacaaaaygtatctatttgattaaattagaactctgctaatgaattactttccttgattgcacagtaataaagtcaatgttgtaaatataataattatagccaagtgcagtggcttacacctgtaatcccggcactttgggaggctgaggtgggcagatcacttgaggtcaggagtttgagaccagcctggccaacatggtgaaaccctgtctctactaaaaatacaaaaattakctgggtgtggtggcacatgcctgtaatcccagctactcaggaagctgaggactgagaatcgcttgaacctgggaagtggagtwtgcagtgagccgagatagttctactgcactccagcctgagcaacagagcaagactccgtgtcaaaaaataaataatatatgtgtgtgtgtgtgtatgtacatgaattatatacaaatgagggaaaatatacaaatgagttgaatatatacaaatgagggaaaaattgttccttgtgtcaggaacaattactgtgaattttgtgtagcttttcctgactttttaaaattcaaatatatttcataaagttgaaatcacactgtggtctttttttttttttttttttttttaaccaaacatatagtggccatgtttctatgtcaatacatactgtttggcagtacagttgtactgacttgacattatagcttcataacttagtaaattaatcccttattgctgggcacagattctgttttccattttttcagtcatgagcaacgttgctggtttacctggggctaaataagaagtttaaatgcaaatagataattcttgagaaagcttcttccctgtatatactctttctgcagcagtgtctgagtgtctgtaccttcctataccttcaccatatcatgtatttgtcattttatagtgagttgtattacttgctaggtgagctggtatctcctttgataacacaaagaaggcctgggtttgcttggcaatttgttccaatattcttttcagttttaaataagttttgaacaaaaagttttagcattttacataaaaacctctaaagctctcaggctaattagtaatgtagcatatacaaattaagtttttttctgctgtgcttaattcttattaacacactaatcatgagagcccccaaattgctgtaaggagcacatttagaaaacatataaaggatcgatagttggtacttaagaaatcgttgaaacaccttttcttttttaatctatcttagagctgaaagataaaaagacttaaaatgagttagaatatgagtttttcagcatcttatagcttatgagttaaagcaagatttaaaaaatacatttaacatactaaatatttcaaaagctacagagataccgtaacatttaaaaaaataaattttcattgtggaaatcaactgccacaaaaacacaaccttttacgagacaacgtgatgtrcatgagaagccctgatgttgagaagctcataattcggtgtgagaaacacacaaggcatgatgccattcccatctgggatgaacagggaagacttcctgggagaggtgactatggacttaattttgctttgacacagcaaaaacatgaggaatgaattttgtgacttggaagattgttagttttctgtggagggaacaacactcatcttgcaaatttgccttcactattcaatcattagaaaataattttaaatgagcttagcagttctcagaattttggatttcaggaaacaaactttttaaaaacaaaacaaaaaggaggataccaatttaagcttgtcaaaaagattttcccccaaaagaaaaacacattaaaaacaacgacaaaaatcaacaaaaactaacactrttcccccatcaacaatcaatattactttctaaaagcaagggcgttttgacaccagatattgtgaggacatccacctgctctaagggacagccatttcactggtgttctgtcaatttttattttgaactaattttagactcacatagaagttggagaagtaggctgggcaccagtggctcatgcctgtaatcccagcactttgggaggccgaagcgggctgatcccttgaggccaggagttcaagaccagcctggtcaaatagtgaaatcctgtctctactaaaaatacaaaaattagcctggcatggcagcgcacacctgtaatcccagatacttgggaggctgagacatgagaatcacttgaagctgggagctggaggctgcagtgagccaagcggagtgccactgcactccagtctgggcgacagagtgagactctgtctcaaaaaaaaaaaaaaaaaaaaaaaagttgcagaaatagcaatatttaactatacttgttactcaaatttcaccactaaagcagtgtcatctttttattccaggatctagtccaggatgccacattatatttaattgttgtatctccttggtgcctttagtacttttttttttgagacacggtctcactctgtcacccaggctggagcacagtggtacaatcatgggttactgcaacctccacctcctaggctcaagcgatcctcccacctcagtctcctgagtacctgggactatacgcatgcaccaccatgcctggctaatttttgcatttgttttatcaaggcagggtttcatcatgttgcacaggctggttttgagctcctgggctcaagaaatctgcttacctcggcttcccaaagtgctgggattacagacatgagccactgcacctggcttggagcattcagtctttgatagttgcttacttatttccttctttctgatcttgagaccttgatttgtccagtattttctcatcattagctgagtgtaagcattttttggcaagaacattataaaaatgatgtggtrtctttcttagtatattatctcaggtagaacataatgttgatctgtctcatccctggtaatgttaaccttgatcacttggttaaggtgatgtctgctgagtttttccaatgtaatgttattaatttttcctttgaaattcataattatttgaagggagatgttttgagatgatgctggcagcccygttttccttaaactttcacatgctgactttctattgttggatcttgcctgcagcagtgtttaccatgatgcttggctagtggtgactatgtatttcccttactctttttatagtcagtaattggaattcttctgaagaaagagctatcccttctcccccatttctttcttttcttttctttttgttgagacaaagtttcactcttgtcgcccaggctggagtgtaatggtgcgatatcggctccctgcaacctctgcctcccgtgttcaggcgattctcccgtctcagcctcccaaggagctgggattacaggtccatgccaccatgcccagctaatttttatatttttagtagagatggggtttcaccactttgaccaggctggtctcaaactcctcttctctggtgatcctcccacctcggactcccaaaagtgctgggattacaggtgtgagctacagcgcctggcccctcccccgtttatttctgattcaattactttatattagcgtagattcacaggtatttcctttttttttttttttttgatttattaatacctccatttattctgttgctgaaaccattccagctttttctggttggcttctatgaaggacgctattttaatggggtgatttttttcttctcactacattcttgctcactccccactttttatgtccggtggccataggctggtgagaacttgattttgaacagttgaaggtctgctgttagggacgtgctaatctagggaattgtactgaactcgtgggagcatgttagtatcagatgtgtgccttgtccgtcttgcttgtaggaagaacaagagacgagacacagcaaggtgatgatgggtatgtgaagcaggataaagaaaaaaacaggacaggcattacaggcttaagyctgtaatcccagcactttggaaggccaatgcgggtggatcacctgatgataggagttcaagaccagcctcaccaacatggtgaaaccctatccctattaaaaatacaaaaattaacaggcgtggtggcgggcatctgttgttccaggtactcgggaggctgaggcagcagaattgcctgaactcgggaggtggaggtagcagtgagctgagatggcaccactgcactccagcctgggcaatggagcaagactctatctaccmcccaccctgcaaaaaaagaaaagaaaggaaaaaaaatcytggtgcttgtaggagaggcatttatttcttttaggactggacggggcttggagggtttccaggaaacagcctcaacctaaaaatagtagacacagttcatgaagaacttactatgtgtccagtagataaatataccacaagcattatcttctttaatcatctcacaatcttatgaaggagatactaatattttgcttgcaaagatgagggaagtgagtttccgaagttgctaartgcgtaaaggaggtggtggtgtcagaatgttatcctgctcagatggttgcatgggacagtgtccagaggaaggcctctgattccttccccagcattaggcaatattcaagtcttcagttccatgtgtaggggagaagactttccttctgctccctaatgacagtggtacccacacccgtattccaccataaaatcttttttattcagtattaggaaaaaagaaacatctttccgtccagtggtcactgtgtgtgtatgtgtttgtgtgtgtgtgtgtgtatgtgtctgtgtgttcaccgtgctgtgtgaattgtggctttaaatgtattcctgtcaattccatatatttttaaaatgttgcttttagagtatgtgcaagtttggggcatttttgagggcttttttttttgacggggtcttaatatgtcacccaggctgtagtgcagtggcgcgatgacagcccactccagccccaaactcccaagctccagtgattttccttcctcagaccccaaagtagctgggaccacaggtgcacaccaccacttccagctgattatttaaaaaaaattttgtagtgacagtgtcttgctgtgyttcccaggctgttcttgwactcctgggctcaactgatcttcccagcttggcctcccaaagtgctgggaatacaggtgtgagccactgtcccaggccagttttaactcacaatgatttcataagaaatccacatctgagagtcccagaaggtaagatattcccctttcttctaaatatacttgaccaccaccattcaggttcttctattaaccytcctatatttgccaaccctcaacctgttagaaacaagaawtgggactctggagtagatgttagcaacatmatgagctcaaacccctccagcttacagcggagacagtgaggtcctstaggatgaggttggagagcaggaacttgcccgagrtcatgtgcagagttcgaggcagggcctggatgggaagcccagcatggagaccccaggccgtctctccgccatcttgttgtgatgcttccggaagaatgcctgtcactcttgctgacatccgactgaccaagtgggcaagaggaattcttcaaaacaatttaataaatgcttacattttctcttggccccgtgccacatccccccactcagtcttgttttcaaggttgaaggttccttcagagctagtgaccttgcccttcctggcctgtggatgtcgctctctatccgtaaccctcctttccagcgaccctgtttgcagcaaagactataattttattttgggtttggatatactgattacattttagcttctggtatattttcttacctgtcacagccattaaatttattttaatagttactctactctcctgatagccactaaagggggaattggatattgtctatcaattggttggtctctgaactaaggctgtatctaattacaaggcattgtatcggttctgatttattaaccatttacttggctttggagaaggcagcatttttagtagtactgttgagcctgcatgtagcttttccaggagggcagggtgcctggatatctgatcttacagttattactttgtgtcatatataattttgttttctccctgcaacaaataaatctttgggactccggaagaaaaaaaaatgggaaagaaaaaaaaaatttgtggttacagtataataaaaataaactgtttgtcgtgactgcagctgacatttatcagcctgtttgtgggtgatctttctctctctctataatacagaacataatttgtcactttgtaaatacattccagtctaaatccctgccagcatctgttagtgtttgaaggattaatgtgctaccctgtgtatgtctgcacttccagggaacagtgtagcatctgattacagatcttgggagagcaggagggaacaaggtgttttctgtgctttttcctacatgcagtcgttttggcctttttctgatttttcttgtctttatcccattctgtctaggtacctggaatttcattctttacaaagatgttcctggtccccaacctttcttctgtctgtgatagtcacagctgaagtcatagtattttctgtgtactatgggttgagctgtgggtaattctttggggccggttagacttgggttcaaattctttctccaactagtttatgagcttaagttatgtgatttccatttcttcacttgcaaaatgaagatgctaatacctacttcttgaagatgctgaggttgagggaagaaataaatgttaatgcaaagtgcccagtttagtgcctgccaagagtaactggtgggtctgtgtcaccttctgacatkatcagtgtgattgtctccaacgcatcyatggaagtgaaaccgttggaggaagctaatgccgtgagccagctgttggttatgtttttgttttgtttttcttttttacttgctggatagtgggttctgtttattgagaaatatttacatccgtctaawtcaggtgcttgctagggttcttggcacacagagcatcccaccaataaactgtggttcccaacaaggcttgcaactgaatctgggcaacaatgaacatgacttcaataatgacaaaaagattcagattcctgctggaaggtccatatgtgctgtccccagtaggattctggaattccctgaatcatagtgttgcttgtaattctttccacattatgaagtggctctatagactgcctaccaccttgtatctactgctgtcgtttagattaggaacagattgccagatgtggaagaaatagcctcattagtaacttttctgtaagcaatctccttatttcttkttttttgttcttttgttttttgtgtgtgcttctgcgtgcacctcctctatggctccccccaccaaatttctgtgtcttcatttgcaactctcttttctccagtaaagaggaaagtgtatagttctcctttccttacagaaacattattttgttattgttgtttgggtttgggtttctgaagtataaatgcatatgaactggacagaagkattatgcccatgtgccaggtggccaagatggggcttgtgatttgaagcttcttttcctagattcaggaaagtatcactggttaatcagggaatacatctttcggcccattgkaaaatgtctgttcttagcaccctaaatgcccaggtattagcatacttgggaaatgtctagaaacccctatttcaatttactgaccatttttggtaaattcctagagatgccaaaatgcatttcaaaaagctttcatgttcaagaagacttgtggaatgatagaaaacatttaacgctgttatgtacgaagtgaaatactgttaaacttttagattatttaatagaagacacattttacaaggcaaagtgtttagatatgctccctcctatgcctatccacacatccttaactcttcacgttgtttgagactgttaggctgtttttttattgtatatttcatcaaatagtgggtgataaaacaacagacactctaaggaatggcatgacattctcctttcttctcctgcattcattggaacctgaatgtagtattaattataagactgttagacttcaggggactacmctcttattctaaaatagtggtcaactaactgtgcccttcagacagaattcctgcccagcacctggctttgtaattaaagttttactggaacagaggaataccagttaatttatatctcgtctgttgccacttttgctttcatgctattaaagctgagtatttgggagatacttgaaaaatctaaaatgcttmctatctggccctttagagaaaaggttttccaatctctgttctagaggattcgtggtcatttggaaagaaaagtatgttaagacaaaatgagcaggtggttggattagtattttctttctacacatatagaaactgttcctatcatacctgactcagttttcaaactkgcttaatccaaagcctggggggtggatgtaggagagaagttgaaattagctggggttttttttttgtatcacaaaagttacattttttttttttttttttttttttaagacgtagtcttgctctgttgcccaggctggagtgcagtggtgtgatttcggctcacagcaagctctgcctcccaggtttacgccattctcctgcctcagcctcctaagtagctggtactacaggtgcctgccaccacgcccggctaattttttatatttttagtagagacagggtttcaccatgttagccactttggtctcaatctmctgacctcgtgattcaactgcctcgccctcccaaagtgctgggattacaggcgtgagccaccgcacccagccgaaaagttataattttaatggtctaaatcaaatttgttcaacctgcagcctgtgggcacatgtggcccaggacagctttgcagcccaacacaaatgtataaacttgcttaaaacatgatgagatattttttgccattttttttcaactcatcagctatcattagggttagtgtattaataytttatgcacagcccaagataattctttgtccagtgtcacccagggaagccaaaagattggacaccctgggaataaaacagaaaaaaggtgtaaaaggcttcgagttcatggacagaacaacatttttgtaagtaaagtatttacggatgtggcccctttgtaatctcctgggctcagggataatttccaggctggggagaaggttgtgtcatggagacagcagtactgttttggaaggagaattgacttgtcacaatggacggagaactaccatcccatttgggccaacctcttttttttttttctttttgtttcgagatggagtctcgctctgtcaccaggctggagtgcagtggtgcaatctcagctcactgcaacctctgcctcccgagttcaagctattcttctgtctcagcctcctgagtagctgtgattacaggtgcgtgacaccacaccccgctaatttttgtatttttagtggagacgggatttcaccatgttggtcaggctggtgtcaaactcctgatcttaggtgatctgcctgcctcagcctcccaaagtgctgggattacaggtgtgagcctctgtgcccggcttctgccagcttctcattatgatttttgagcagatttcgctgctttttcggcctttgttgtgtttataaactagaagtaattatgtcaactttgtaagggctcagtagcgtagaataaggccatgtctgtaatctccccttctgtgaacagaggttatgttctcaaaagccttcaattaacatgagtggaatggattttctaaatttatatggaggagaaagttgtaggtcctatatgagtgatgacaggtgatacttaagttaactggaacatatggcccttagccacaatttccccacatgcccttctgggggatgctttgtagacctgatatcccagaaaggagtgtggactcataaagtcactgctgtcctttggttttcctgatgtaccaaatgtagtaaggcctcttttcaatgtggtaaaagctctgggccaccccataaggctgcaagcgctagaagctcttcccatagagaacatctatatcctcaamccaaggagaaaaaggaagctgctgttcataaatattgaagaggcagggagagcttgcactgaggccagggtgtattaacatgcatgccatcgtgaagtggcttctaatggacatttgtaaggtggtgtcccctcccttcccctcccccctctaatgctgcctgggttgctctttgcaacacgtgcagtctgcaacttagctggcttttagcaaaattacccatcgcgattcatttgtcccattgggccatgggataggtgactacagagccagattcgaatgtggccctgtgccggtgcccaaaccagcaggctgcacgtatgcactgacagaatggtacatcccaccactgctctgtgtctgtgtgcgactgtcagctgctctctactgctcctcatagacttcctgtctgcctttttctgcatttctcagtctccccatctccccttcttatctaayccccttccttcctctctcaactcttccttcctctatcctttttctttcccttttttttttaactattcttctttagagtttgttttctcattgaacttgtgatgtacacattaaaggaaaactcattaatgtggaaaattaggagcatcatagctaatgtatgctcagggcttactgtgtgctagacattattctgagtttacacagtgatgtcagatttctcctctgtcacagtaagttccaaaagatagtgaagaatattgcagtgaaaacactgaaactcacatatttcatactcaggggtatcttttaagtgtgaagcaagagaaaaaaacgtggaaaaaaaaagactcaggaaatgctttccatttagctttcttgactaagttagtggaagacttattccagattataaagagaagaaccaaaataaagagtttaagaatgaaggggtatgcagcaactggtagggtcgagtctcctcaggcacaacatgcaaccaaggaggggcagctcactcggcctgcgctggccacacaagtgcacctgccacagtattgaggggctggactgatttctcattaatgtctgggcaaaactcaaagaggcaaacattttcattacatactgttatccatcctattgtgggaccaatttctccagaaaggtctctctcggtgggaggattaataaacaccatcagaaatccaattaaacccaattgttaaaatccaacaaatacgttgcttgtggatacagttgtgtatagtaatgtgtatggtgatggcctatcatataggaatgatagaggcagcacagtgctgtaatggaaaccataagggcacgcacaatggctcatgcctgtaatcccagcactttgggaggcmgaggcgggaggatcacataagaccaggagtttgagaccagcctggccaacatggtgaaaccccatctctactaaaactacaaaaatagccaggtgtcctggtgcatgtctgtaatyccagctacctgggaggctgaagcatcagaatcgcttcagcttgggagctggagcttgcagccagccaagatcacaccactgctctctatcctgggagacagagcaagactgtctccaaaaaaaaaaaaaaaaaaaaaaagggcatggatctagatgccagacaatctgggtgcatatctttgctccaaaagcaaagattgtaaactgtctttacaatctggggcaagttagctaatctctgcttcagtttgctccttagcaagatgggatgatattaccacttacctcagagagttgttaaatgggtaaattcatatgtaagtgttcttagagcagagttcagtacatagtaagtactgtgtaagaattggccatcattaatattattcattggataaatatcaaattcaaaataccgtttacattgggaaagggaaaaaggagagaaatatatgagagacgtatgctgggggtatctacgatgttttctttttgatttttttatgtcattttaaatgtttctattcttctgttctgttcttaaagtatgcctgtaattattaggatataattaaggattctgtcttatttattttttaatcttcttactgtgtctatcttttgtctttctccatattctgggagaaacatctaagtttccattccttataactgattatttttcttgggatcaattctggtcttcaccatctgccaatgtgagttttagtttctctataaacttttaaactttaaactttttttcttttttttttgggggggggggcaatccattcttaacccccttccagtttttctcagcctattcttgtttgtttttgttttctatttctgtttcattgagatgcatacaaaatggaagatggccaacatttctaaaaattttgtttcctgacatagagaacgtttagaggtcaggttgctctgagactgtgttgtgatgtcttttttttttttttttttttacttgtttgtcctttcttttattatctcttgctgttatcctcacttttttctttgctgttcttcatcctttaattagcattcaaactaatcgttattagagtgtgtaacatgatctttgacatacctaggtaattttacttaagtatatgagttatgttgatacgcacagttcctcagcatgaatgtcattgttttgcaaattttagctgaaggtgacatcactgtactaaaattttcttgtgcatccacttcctagctatgactctctacagatggatataacttttttaagatgaaaaccatttattttcaatttctagtttaactgcctcacagtaaaaaagtgtactttttgtgatggcaggaatttgaagtatgttgaaactgcctttgtgatctggctcatggttaacttcaataacgtatgaaaagaatccatatttttatgtgtagtgttctgtagctcttttagttggtttatactcttttaatggtctgttgaccattttatctaaatattccattttgtcttttacttatttctattataaatggttaatctcttctactaagattgttaaatccatctttttgtttatggctgtgttatttggcacatgcaagttcatgattgttatatattcttgcttaattatttttccctttatgcatcatccatttttatctttagtgtttagtgttttttatttttattttgcctaaaattttatttttatgttaatatttgctatactagctattctgctttcaaaatgttcctgatgtttttctttatctttatcatttatcttttatctttaacatttttatatttctctcttttaatcatgtgtgttaggtaggcaaggatagctgctaggacaaaatattttctgatgttttaatagcttaacacaatggtaatttatttccagcttatgtaacagtgcttattgggcgctcagttgaggctggaaatagacatgtgagtgttttatggactaggccttgaagaagtgtacctcccttagatttatattccactggccaactctaagtctcacggctatgcctaattgtgaaggagactgggcaatgaatctagttgagtgccctgcaaactaaggcacagggatttttgtgaacagctggtagtctccattacagttctcacatctggacaacaagtaccttttgctcccttattctcacacagagaacatattcacttttcttccaaaggcagagtctcaaaatcccatttaattctttgattctgtgcaaattctagggtctccttcatgcttagatatggttccttatggtcctgtgggtttcagaaaggcagcccattcatgccgtctacccccctgctgctctatataatagaaggtggagtagagacagaatatcagtagcaaaatctccattttcaaaagaaaagaatgagaaacatgttgctccatgacagtcaatgatagaatcacgctggggaggtaaagaaccttgtagtaagagagcattctttatccaggtctgaaatctgctctctggagggaagtgccctgtccattatcctccatggtcccatctgaactggatctagagaagggttactctccttagggraattagcagctgtcagcccacttcctgctggtgcatggttgaggctcygtttttttgtttttagcagttataggcttttaaggtcagattaatctttatttaatttcttaataatcttataggattcagatgtatttgtttcccattaattcatgagtagtggccacaccagtctttcctagacttgaatctcaagttgctttatttttctaatttgttatcatcatgcctctctttcagcacagtagcagctactatgaggctatttggaataatgagcttggtttgaaaagtagcatcattaatctgatatatgctactgggctgaattatttgaattcataatgggctattgtctctcaaagacttttgcaggcttattttatgctttttggactccagaatcaattgactttttcaactctgtaatgtcctaactttcatttctgcttgcacactggacaatgctttttttcaggaacacatctctttcttgtaatatctttgyaaaagcagcgtggagcagccagcacacaatgmcattttagctcttccctagagcttcagactcaataggtactagatctaccttatgagttatggcagagcacaattttaccaaaagtctttcagtgtaaagacacagatccacatgggtgtctctgattgacagttggctttgtctatttggtgagtaggatatccaagctcatttcatttagtggctgtattgtcccctaggaacttattataacttaacgtttatctcatggaaggttgaagtatggggaacccaattcatatgagaaatagcccaggagttacattctcttctgctcagtgaccattagtggaaatgtaaatatctcacctcaatgcagtgtgggttaggaaatgtggctttctgtctagtcaacctctttttcctatgctgtggaaagaggagaagtattctgagggacagctagttctatctgcagtgtatcttttttaaacagcatagaactattttttttttttaattctagtcttggtttctgcctttcaatgtgtgaatttaagttcatgtttcttttgatgactgataaatttgaaataatttctgtatttcattgtgttttcttcactaccaagtttttcttatttttaaacttttctgagcatatatatgtatattttttgagacagagtctcagtgtcacccaggctggaatgcagtggcttgatctcggctcactgcaaactctgcctcctgagttcaagcaatcctcccacctcagcctcccaagtagctgcattaaatacgtgtgccaccaggcccggccaatttttgtatttttagtagagatggaatttcaccatgttggccaggctggtcttgaactcctgacctcaagtggtctgcccgccttggcctcccacagtgtggggattataggcgtgagccattatgcctggccaccaggcatattttggaattgatagaatttctttttatctgagttactccatacatcattttttctccctgttgctcatttggaagctaatgattctttcctccctttcttcctttctgtctttctctgttttcctctctccctgttagtcttgaaagtcttacgtacatgtttaaattttttcttagagtatcaagttatttaatgtctatcattctaatcaacaaagccagaccatgcatgatttaatggatcagtgaaatccttccccccataaaacaaacttcacttgttagtgttgttttagttgcttcttaaattcattttcagtataatttatttggtcctgtagctactccaaatgacgcacaaaatttggctaaactgatgactctttttgtgtttatggtgttttgagtcctcaactttttctgtcttgaatttttttttttttttttttttttttaaggcagagtttctgtctgtcgcccaggctggagtgcagtggcgcgatcttggctcactgcaagctccgcctcctcggttcatgccattctcctgcctcagcctcccgagtagctggaactacaggtgcccgccaccaggcctggctaattttttttgtattattagtagagatggggtttcaccgtgttagccaggatggtcttgatctcctgwccttgtggtycgtctgcctcggcctcccaaagtgctaagattacaggcacgagtctccgcacccggccctgtttttgcatttttagtagagacgggttttcaccaggttggccagcctggtctcaaactgttgaccttaggtgatctgcctacctcsgcctcccaaagtgctgggataacaggcgtgagcmactgcgcctgtctacattttctgtctttactggtattatggygggaacccataaaccactgcgaggcagataccattttaagcaggaaaccttatttttttcygaagcacatttaaaaatattttccagtttatctattaaacatcctcctttgcttctggagatcctctgaaagatttatctctttcgattcatctgtaaagtaaaaataaccgtcgtcgtcatttctcaagcgtgacgatactgttacacgtttactgcatattstgcataccaagcacatatccgtcacaygcagtgtggccaacttccgagaggccggcattcagccaaacagcctgaagaaccaggagaaatgcctgagtttccaaatggcttatggtaagttgttgctgccactatgagtagcctacttgcatttctayttaatggcttttccccatatttgatggtatgttaaacagtcaatcattcattttctaaattaaagcctgtcctgaaaacgtgctcagtgctattgactgtgcatcaggtattagagacacagatatgaaactgtactttttaatttacgataaatgtcagtgtgaattattggttgttttgcttttctttcatagtctccgtaggcttcttgggaatggaaattggtataacctttttggaggaccctcagtaaaaagctatcaaaatttaaaatgtgggtatctcttgacctagtgagtctacttccaggaattcatcttaaagaaaaaaattatagtttcctaagtatttgtattgcagcattgctttcagtggccaacaaaacaaaacaaaacaaaattggaaacaacataaaataatattaccggagaaacaatgagtaacatgtataggattttttttttttttttttgacggagtcttgctctgttgcccaggctccagtgcagtggygtgatgttggctcactgcaactccgcatcctggtttcaagtggttcttctgcctcagccttccaattagcggggactaccagcgcatgtcaccatgcctggctaatttttgtatttttgtagagatggggtttcaccatcatggccaggctgttctcgaactcctgacctcaagtgatccacccgcttcagcctcccaaagtgctgggattacaggcatgagccaccacgcccagccgcttctcgtagatactacccaggaattttcacagtaacttcaaggaagagattgttctgtaatttctgtttttactgataaggaagctcacgcttagagaatgtaagtaaaaagttcacaaagctagtgaagtatgtgggggcggtttttaatgaatgattgaacattctttagtggaactacaatactatgtttttaggaaaagttgcacgatgtttttacatgggtagaaaatatactctggaaggatttgaaccaggctgtccctgttcttatcttggggcagtaggactttggggcacgttttcactttatatgttatcaacttctgtattatttgtaatacaatgaaccagttttatttttgcaactaacagtaagtataaatagctgatgaccacttggggtgaaccgaagtgcctatgacaaaccacacgcaggcatcctcgggactattgaggccagataatcctttgttatgggggctgttctgttcgttgtaagatattgagtagcatccctgacctctgccccctggatgccagttcactttccaacaagttgcaacaagcagaaatgtctgtagayattagcagatgtctgctagcagttagaatggcctctggttgagaatcagagcagactctgctcacactgggctatcagggtatagttctctccctcccaacagctggaactgagaccatctccctccatttgaggatcattccgatttcccaagtccaccgtgtggaatgtaaaatcctttgaaccagaacagacaaatcttgtttttgtctttttattgaatttaaccactattgacttgcgacttgcggcaatcaccagatcccagatctctgtgtttggagctacacgtcyttctgaatcgaggaggtggggcactgatttttcttttatcactgacttccccgaagtgggaagttccagtgcttaacaagtttcattaagaacacagctattaaatattcagaatatacagactgttgctgttgagaatgtaattatgcagtaaattagctgatgtccagtacgttgccttttaagcagatctttgatgtatgcagtacttgcataagatatagggcatgtttattaagagtcttcaactgtgtataaaactagagcagtcaaaagtaatggtgtctgctgaaggattctttatcatatgaatttacctttagtcatctattatttatttcagctattttatatgccattataataaatattatgacagagaaagcttttacgcttcaacttattgtactcctctttacttgcctgcaatccttcaggaaaatgtaaccacgctttacctatagttaacgtaaatcatcacttacattagaatgaaaaattcactatgaaaaaaagctcttacttcaatagcaaggcataaatgcacaatcatgttgactgccaacctcctgtgtcattcactgtccttccttaaactgtttttaagctgcaaagtgaatatattgcatagagggaaataggaaggttttggattattttcgctctcttattagtttctggcaggataagcattttttatccggattgcaaaatattgccaattactgtctaagcatttttaatagttttgctttccatggcacgcaactcatatactaaattaaataagctgttatctggtgcaatttctccttgaatagactcagaattacctatagatattgacacggttattttataaattgagttccagcaacacaaggcaaaaattttggcctgtatgtaatgaaggaagagttgtcatcattttcttattagggatgtttgtgtattttggcagggggaggtaggaaggggacctgatggagggccctggagtgaaggttgatgctggatggttgatttgaaggttaggaatggcaaactcagcctctgttcttcaagaatccccctgcgtccccccgccctgccccctgcccaaaaaaaaggaaatccagggctttgctagggatcatttttggtgtggttctgtattttaaaatgtggaatcatctccaaaagtgtttgtttattaaaagcaaagtgataaaatgtgtcaagtcagtgaagagactctcaaactcccctttcctgcgaatcctatcagaaagaacatttatgagggcatacttttcatctttaggcttggcaaagatgggtcaaactccccatcagactggcacatggtgctgtttcaggtttgactaagagagaaaagaatcactagtcaatgaaagcaactgtgtccccatgcattttccagtgaagatgcgatcacccattgccaccgttaccattgcttaaataatattagaggaattagtgttatgaagtcccacatatgatattgatgaattattaaaccagttgagttagatttctattgtagttcagtgaataatgtcatgtcaatactgtgctcaacgccagtgtctcttgctgttgtaaatgtgacagctcctatttaaggttttagaacataaaatcaggactgagagtatgtaaagcggaagggtgagagacatcagcataatgcaattaaggcccattggattagaatttgcaggatgccattagcaataagctctgagtgtagattattgccgtgcttamattttctccttcagyggtaacacttctcttgtaaattctaactgggtaaaataaatatgatataaaacagacacaaataagaatatatagatgatgttaatttcttcagagcttcccggtgttacgtcttcaagaatatgaygacaggggaacagcccagtgtggcagtcatgtgacgacatgagcattggaaccagccacatctcagttggcaacacgtatctgtgtcttactagcttggccactgtcacgtcactcagcctctgttttctmatctgtaaaatggggaaaattatagatgcttcagaagatatttgctatcactattaaatgaaaacaagcatgtcatcagtgcttattatttttgttgcttttatgatcaataaatacatgcaaattagagctttttaaatgagattctggaaataagtttttccgtatgtgtaagggaggggtagatacactgccatccaatcagcatcaatgggtaccttgaagtgagatcacaaaatagctaattccctgtaaacagcaacccttctctctgcagttgcacatgagtagtcccccagttaaaagagaatttcctccagatacaatggaggccacgttcaacacagccatctagtgtacctgggcttcttccacctccagccactgtaccgacgtgttcctttatttcacccacatagtgatgatgcttccaacacagcataacaaagagctgctgctttgtgctgctagatttgccaaaagtctgtgccagggattcttttgttggaggtaagtggagaacgcaaggcccacatgcacaagatgggagtattttgaagcatgctccgtaagacccaacatgtgggcagcagaccaactacttgggttcactatggcgagaaatgggataggagagcgaactcactgataccctcccagctaattcctaggcaatctgcaattaacaatgattgtaaagtaataatttgtggttttgaaaactaggtttgatcactggaattattcctgtcctatgttctaaaggcctgttgccttgagatgttttttctcctcccattattggtaagcataatgtaggcatgagacgttgcctttgaagtgtcggaaggatggagaggagaaaagaaaacggagattgaatctggaaaacgcattcatctttagaggcagtgttaatgartacatgaatttagtcctgtaaatgttttctcccttatttgggacwtggtgtattgaaggtgtctgttaactgtgctaccaatgagtgcccctgtatccgagggaaactggagaagtgtacttgggctaccgggttaccaagagcaggacagcatgaggcagttacagatctgatggtttttcttggtctttgtctcagctgccatgagggcttctaaggggcaaggagggttgggggatgagaggacaggtacatagtgtggacataatggaatatggaatagcaattgaaatcttgcgttgggctgaatcatggctttgcagttattatcttgatgcggctgtgcatgagccttttgaacctcagcttctccatctgtgaaataggtggataatgactgcaccctgcgaagatgctatagggataaataactgctgtggggcaaggactgaaatggttgttgttttgagatggcttttatcattgggccagtgacgacccattcagccctatcagtgaagagtgaagcactgcactctttaaggatagggctgaatggtttatcacccattcagcggtgaccaccacatcttatgcattgtgatgatcacgatgataaaacaatacataatcacaatataaggatctagagttatgaactactgatcaggtatcatgttctgctccaactgctttagatacattgcctgacttcccgatagggcaggtgctgttattactcccacttcacagaggagcaaactaaatatacaagaagcagtaacttgcccagccccaaaccaccccctgaaaaaagaaaacaagggagacccacagttattaatatgcattattattggaaaacaatggtcatcacattttagcagtggccttcaaaataatgataatagcatatattgagagcccattgtgtggcttgtaccttatattcactctatctaatcttcactctaaccatagaaggcaatactattatgctcattcataattaaggcaattgaagcccagayccttccagtagctttcctgaagtcaagttgccagtgcattggacatactrggctgtagttccagggcagcctggctctggtgtctttgctgcaatgacaatatctccccatttctctgtttaaataccacacactccccatatggtttctttggtttcaggcagtatcgcatcagagtcacatatggctaatttatagtcataaaatgatattagagatcactgttgcataacaacaagaaacccctttgattccacacttacagactcttgagtcactaacacaggtttcagtatatataaagaatagatgaagaagacttagtgtattaaggtggcagtgaactgtgctactgatgagtgccactatattcaagggaaatgggagacatgcacctgggttgtttgattatgaccttctggctgagccctggatgttgggagcaagtgggcttctgagctacatagaagttgcctgatgcttcacatgtgggatgccacctgtgtggctctgttttaaaatgatgggtagtagagtctgtatacataatttaaaatacattaacatttctgttttgcctgagataagcttgtactggtgtgatcagaaggaagaatgaggatttggggaaggaaaattttgagagccattttacagcatttcaagattcagtgatctcagaacctcttttggttaaacaagcatgggargatggatgattggatggatggatgaatggataggtaggtgggaagataaatggatagacatataggtaggaaggaatgagggatatatggaaggctagcagtttattttacggtggtgggatttttttcttttccttttttactcagacagtcttgttctgttgcccaggctggagtgcagtggcacgatcatgtctcacggcagcctcgactttccaggttcaagtgatcttcctgccgcagcctcctgtgtagcaggtgcatgctgctatgcccagccagttatattttagatgcttttttatatggcccatattcatatgtctttgtgacttttttttataatggatgtgagtgtgaagtaggagttggcctgaaacaagcccagagaggtagacagggaccaagtcatggactgagttagttgttgttgttcctcactttctgtttttatttctcctctttctggacacatagcacgttgcaccttctagaagctaggcacagccacatgactttgtcaaggaaatgtgagcagaagcaacaccagtcactattaagtggaagtctttgagatgccacgtgtaactcaccacattgccttccacatgccgtagaggctggcagtgttacagacaacagaggctccatccacctggtccctgagtggccacggtgagctgggcccactgacctacaatgagtgtgaagtgtgagcaagtcataattctgggttattctaattaatggagatttgggggttgttccttactgaagcacatcctgattgatgcagaggatcttgtgagycatgctaaggaattcagcccacgtcttactgaccactctgacgtactaaagggttggttttgccaatgaagagagcaggctctgactgaacgaggcctgaacttttcatgttctagatggcatgtgctaattctaacacttcttaatgaaagtcatggtttgcttggtggtgatggaacagttctatgtcttgaatgtggtgatggttatatgaatacatacacatgataaaatgtcttagaattatgcacaaaggtacagcaaagaaaataaacgcatctcaagttgtgttagttccttctcacactgctatataaacatacctgagactgtgtaatttataaagaaagcaggtttaattggctcattgttctgtgttcatgttctgcttctggataggccttaggaaacttccaatcatggcgaagaggaagcaggcaaatcttagcaggagcaggaggacgaatagggggaggtgatatgctcttgtaaacaagcagatcttaggcatactggatcacgagacagcactagggggatggcactaagctgtttttaaccagccccatgatccaatcacctcccaccaggccccacctccagtattggggattacaatttaatatgagatttgggtagggacacagagccaaaccacatcaggtgacatcccagtaatgactgtggtctagtaaattgtgttgtgttgatgttgattttcaggttttgccattgtattgtatgtatgtaagatgtatatatgggggaagctggatgatgggtatagggtgttctctgtaccagtttggccatgttttgtgaatctataattagtttcaaataaaagttaacaaccagaagatcacgagstaaaccaataaagtgaattatggtcagttgcagattcactgccagacctgggaggaaatctcaccttggcagatsgagtctcttgtcctcgcctaacaatcagcagttcacctctcgaaaaggggttccgtttgcaatctgtcagccactaccttcttatttagagcatgtcccactacaaacatttctataaagttactaagtttgttagacaattagaattgcaaacccccaacacacacataaacacatatgcacaccctaatttaaaggctgcattttccatcccctggacttactgtattgcctccagtttctctccatttctcaggattggtagcagaaatgggaaacctgatacctagggcaagagaattgcctgaataacagtatgtggacttgaatcactatccccaggagcctagtaacccacagcttgtggattagtctgttgaactacttgatggcttgtgacccctttttcccttagaggtatatgttctgattttcttcttattgatagtggcagctctgtgctttattttgaagggaagcaggggaaccaaaagaaaacttagcagttgtaagttacttacagagaagactgggctagttggctgtgctatcatttttgttgaaatactgctttggggtcgccatctgggaatgytcttcctgttttatgggggaaatacatacatgcgtttttataatatgtagcctgcatatcccttggggtttccactgggggcttggctgagcagagcaatttctttaccaccccctccacagcataatgaatggctgcctttcctcttgtgatacattcacatttctgtaagattctgcacgtggcagtgagtgtcatgctccaagtaaaacgaggcagggaccagaggacttaggatgaggatgaaaggtcactttgtttgctgactctgaatgtcaggtagttgtgtttatgaggcatcagcgtctctgtggggtattgaaacatttacactttgaaaatatttttaatcatcagataaatatcagttactcagacagcttatgagggttctgctcctcatctggaggtacacacctttcacggggtgtgacttcaccacatgccttcaatattcttggtggcagttgccctctttataggggggatgtggcgtcaccttatagcagaccctctagctctgttatttcctgaacgtaggaaactaacaacccacgtgtgggcgttttccccttttcctagatcaggttcatgtttctcctcctcgttccaaaatctgcacactttggcatctgccactgttacccaagaccaggaatttaaatctgtgtttgccagtttgcctccaccactgatgtgctgttggggtttggggacataatttcatcactttctaccacctttccttaaaactaggcttcgtgccaggtgcggtggctcacgcctgtaatcctagcactttcggaggccggggtgggtggatcccaaggtcaagagattgagaccatcctggccaacatggtgaaaccccgtctgtactgaaaatacaaaaataagctgggtgtgttggcacgcacctgtagtcccagctagtcgggaggctgaggcaggagaatcgcttgagcccaggaagtggaggttgcagtgagccaagatggtgccactgcacttcagcctgggcgacagagtgagactccatctaaacacacacacacacacacacacacacacacacacacacaaaagcacagggctttgttagcaggcatgacttggattctttaggatccttccctcagtaatctggtctgatgtggccttcagggaggatctttggacatcattgccatccatctgtccactgtgctggactataacccacccagactaccatttattgccaagtggcatcgggacaagagttttacacaagaaacatcttctctgctagttaaattaattagataatttgtcttccagacaggatgttaggaacttatgaacatgtatcgttacaaacctatgagtagatgactaatattcatcttttacagataaggaaactgaggctcaacagtgttaaatggtccagaatgagtgtgttttctagctgtcactgcctgatgtttactgctcaaagcttaggacttggattagagcccaggacttggcagccaagataaaccagstgcaattacgctgaacatctcagcccagctcctgtccatccctgaacaggacacttagggtagaggatgttctcagcagtgccatttgcatcccccttcatagccttacaggtatcatgttatcctccttaatcttacttaagcatcacagtctagactagaattcccaagtcaaccgtttgttttacgggactcttcttatttgaataggcaggtggccctgtgttcttggcttttttgtcctttcaaggagctaggtctaagaagtgatagtatttaatctcgcactccgaagcgcacccagatttaaaagttgggagtggcccatacacagaaggctagtgggaggggcaacccggagatttgtccttgcagaatgatgccatgaagaacatggccaatggaacaccattgcttcaaatcccgacctctccagttctcctggtttcttgttaggcgggaacttgggcttctttatcagtgactggggtcagttcttgtactcaacttcctatctctgtgatctcttgtaagatgctgcattgtcaaatggagaaaacattgtctttgagttgttaggagccttgagtgagatggtatgcaaatgtccagcccgtggcaggccctaagtacacagtagccattattaccattattattcctatcaccagcatgtattccacctgttgatagagttttctgggtttactaagccagggtgttgcctttgggatcgaggtccgtcagaatccattggtataaacgagtctttctgcttttgtactttctataaaggagttgtctttgatttttgatgcaggtttaatggagatatttcagaacctggatggcagcttttgaaattaagatattgtccattgcatctttccatgatcgaggcgttgtcgtgcattcccctccttacagcgttttaggatgcagattgagaggagataacgttagcccgaagcgcctttgcagcctcttttgcgcggctgaaacacagcacaacccacccccccgccccaccccccagcctgtaggtttagcagaatcccagcctcacatcctccccgaacttggcagtaaaagccctgttcttccattcattccgatgatttatattctctctgggcrtcttatattaaacaggggaattccgacatgttccataacacatttactgtaacttgataccatgaactacacttgctgttatttatcatttctttttattttctctcattgcagcataaagccaaggtagaarcaatgaccctggacctcgctctgctccgtagcgtgcagcattttgctgaagcattcaaggccaagaatgtgtgagtgttccagtggagggttatagatcataatttyttgctattgtaatatctttatcagatgaacacaattgggagaatgcaaggctgttgtgttgtcttggcgtccaaacaggaggctcatttatattggccctgttaaggtgaaccgtattttcttgactcacagtcaccttcattatgagatgtgtcatcaatctaataacagcttcccacataccaaaagagaagacactattaaagcactagtaaaagtggctaataaaagcttggcaatagtaagatgcatcctgattataagattttttgtagtgcatttcagaatggagtaagagtatatttaaattgcattcaggaacaagtaaactcagttatccagtatggcagggaggttgacaatccaagcacccaaaagacctctagtttctaaagccttcgatgatttgatgtggtacatggatgtggttccaaaaaacatggactcacattccttttatttattttttttcatccttttcagtctttcaaaattccagttggagaaagccttagttagggcctagcatattttgatcctatcatatgctagcatccctttctaacagagaaggttgtaggagaaagggagagaagcggaagggggtggggagacagagagacagacaggaggcctcaaaccctgaaacactgagctaaggaaagtgatcatggcaagctacactaattacaatactttgtttccaagtgtttatttttactcatatttagggcaggcaatcctggtttctcgttgaacatagaggtttgaatttcattaataaataacttcatttattttttttcagtgacttgattcaaacatgaggattaagttaataatagcacaggttgtgcgaaggataagataattacacaagaggcaccagaaccactgaatgtggagagctctcataaatgacaagctgcctttgggttaggctctgttgggaacattagttctgcagtgttgcaagcagatgaaggatgtgagggaagggatcttaaaccagatattcaaatggccctgtggggagctgacaccacactgctgtctagtgtccaattctccttgcatggctgtgtcacccaggttggaacgtagtgcacaatctcgccttaatgcaacgtcccactgcgggcccaagtgattttcctgtcccagcctcctgagtagctgggactacagatgcctgccaccatggcctgctaatttttgtatttttagtagacatagggtttcaccatattggtcagactggtctcaaactcctggcctcaggtgatccacccgcctcagcctctgaaaatgctgggattacacacatgaaccactgcgcccagccgctctactttattagatttaaaaagtttgctctcagctgggtgcagtggcttatgccwgtaatcccagcagtttgggaggccaaggcggggagggtcatgaggtcaagagatcaagaccatcctggccaacattgtgaaaccccatctctactaaagatacaaaaaattagctgggtgtagtggtgcacacctctagtcctagctacttgggaggctgaggcaggaaaatcgcttgaacctgggaggcagaggttgcagtgagccaagatggcaccactgcactccagcctggcgacagattgagactccgtctcaaaaaaaaaaaaaaaaaaaaaaaagtttgtactcagcctggcgtggtggctcacgcctgtaatcccagcactttgtgaggccgaggtgggcggatcacctgaagtcaggagttcgagaccagcctgggcaacaaggtaaaaccccgtctctactaaaaatgcaaaattaactgggcggggaggcacatgcctgaaatcccaactacttgggaggctgaggcaggagaatggcttgaacccgggaggtggaggttgcagtgagctgagactgaaccagtgcactccagcccgggtgacaagagcaaaactctgtctcaaaaaaaaaaaaaaaaaattgactcaggctcttgctggagtatgtcagtgtcccaagtcattgaggtctacattagagtcagtcttagtgagagttgcaacatcgcctaagcgcagaccccaagctggcttgtaggaacagtgagataacatcccccagccagccagatctgagagagccctcctgtgtgtgtcctttgcagcgcttggctgttagtagcttccaccctttgccagaactatcaagaggcacctcaacaggctgcaacactagcattcaagacatttgttcgctgatttgcttcgtcattcatttatccaccggttccttcacttcacacacatttcaggagcacctctaaagccccagacattcttctgggctctgagaagagagtggtggccctggaagccacagtaaccgcacacaagctgtcacctcagttgtcagctattatggatggctgactcctcaaactcatctgtctgtggttgtttgggagggaatgataatgacaagaacagcagcggagtcagcagctcatttactgagggcttatgggccatacgtggaaaatattttgcatgtacgttttgattcaattctcaaagcagtccttgggagtagatgctattaatatctctactatacagataaggaaagtgaggctagagaggatatataatttatccaaggcatgtggaatgtgggtagaggggccgatttagcctcttcacggctccaacttgaccaccgtactatactgtgtttcattttagtttattttttatttattttttgagacagggtctcgctgtgttgcccaggctgaagtgcagtggtgcaatctctgttcattgcaacctctggccttgggttcaagcgattctcatgcctcatcctccagagtagctgggattacaggtgcaggttaccacacacagctaatttttgtattttctgtagagatgaggtttcaccatgttggccaggctagtcaactcctgacctcaagtgatctctccaccttggcctcccaaactgctggaattacaggcgtgagccaccctgcccgaccctttcattttaaatgtgatagaaacagactcagagaatgtgagtgactttcgcagggtcacttagcaggttggtgacgggcatggggtttcactccagtctgcctcttgttcttttcctcatagcatgtgagatctcacaattcactgccgctgaataactttgtccagttcctctgtcagaatgtgttggaagtgagcagctttgctgaagagagccaactgttacataataggatcatcttccacgtcttaactggaccattagtttttaaccattaagtagttgggaaatcatcaagttcaagtgccttttgtaatcaccaagctcaaaaccttggaggaaactctcacccattttgccctaatcccagattttagcacaggactttggaattttagaaagtacttctaggttgagaaacaagggtgattttccatatagagacctctgtagcacaaccctctttgtatgtgtcccatgagagtacaggattttacatggcttagagaaatactgtggtggtgaaaatatgcataaaaaagcgagagattttacttttgaaatgctgccaaagtgaaatctctyttggataggcagatgacagtttagtacttgcaggtctttcgattctgacaactgtcagaagtgaatttaagtgctggtgactaggctgccagagaaacacatgtaactctattcttatcaccccccatcttcagacattaaaattttcttgtgtgtaaaacataatgacaaatgaaagaaaggctgccagttcagaaccaatctcttttcacgctgttgcattgaggagaggaaaaaatcccttaaatttgaattccatgtggatgctcttatttaatatgccgtttcaaagcctgtatgygatcaagccagagtattatcaggctctgagttcctgtgtgtattcccttggtccatgctccatctcaagtgtttctccacactgggataggcagcatattgtgtagtcttagagcagaaaaggtagaaacagattcttagtacaaacactggtgagaaaagcagcatattgtactgtggaaccacccgccgtctgccttctgtgggagatggggatcagcctcttcctggatctcttctttttattcgggtgctgggaggtgaggctgcaaaggaggctgttgtagagggagccctcctaaccatgattatgtaaacaatagctgctaggcaacttgttgtttgttttatgcaaggcagtgtgctaagcacttacatacatgtattctgtctgtagtttgttataagagtcctgcacacttaaccatgattatccctactttgcaaattacaaggttgcagtgcagagagcctaagacactttctcaacttgagcaagtaggagatccagaatttgaacccaaatctctctgaatccaaaacgactttttgttactttgcacacttcagtcataggaatttcagtgtggatttctgtattggttatgtattgccgagtaagaaatgactctggccaggcacggtggctcacacatgtaatcccagcacctggggaggccgcagtgggtggattgcttgaggccaggagtttgagaacagcctggccaacatggcaaaaccccgtctgtactaaaaatacaaaaattagccgggcatggtgatgcatacctgaagtcccagctactcaggaggctgaggcatgagaattgcttgagctctggggtgggcagaggttgcagtgagccgagatcatgcctgggggacagtgagactctgtctcaaacaaattactccaaaatttagtggctaaaaaacaacataaaacaagaaacatttctgttgtgcctcctcttttcctccctccctctttctcatagttaatttgtttgaatcaggattcaaataaggtcgatgcatttttaatctataggttttgtctcctttttttttttttccttaaaaaaatttcttttaatgcaacagatttaagggaccagggtgttctctagagcaggggtccatgacctctaggccacaaaccaatagcggagccgtggcctgttataaattgggtggcatggcagggagtgagtggtgggcaagcataggaagctgcgtctgtgcttagagccgctctctgtcactctcattagtgcctcaggtcctccccctgtcagatcagcaacagcattagtctcataggaccgtgatccctattgtgagccacacatgcaagggatctaggctgcatgctccttasgaaaatctaatgcctgatgatctgtcactgcctcccatcaccttcaagatgggatygtctagttstaggaaaacaagctcagggctcccaccgattgtacattatggtgagttggataactatttcattatatattacaacgtaataataatagaaataaagtgcacaataaatgtcatgtgcttgaatcgtcccaaagccacccccactcctttgagtctatggaaaaattgtcttccagaaaaccacttgctggtgccaaaaaaatttggaaacctctgctctagagatttctgcagtctgtactttggtgattgcatctctgtggtgtcttttaacatactcttctgtctcctgagtttcctgtgaaagggtagataactcaagagactcaatcaacttcgtgtttaatgttttcgtaagaatacttcagaggcagtggtgtaatcgtccaagagtacacacaggcctgatygccaaagccagttttcttcaggcccagcacgtcctgacctcctcactcctctgcccactctctgtttactcactccsattttcattcattgattctgttattctccactaagttttctgggtggtcagcccaggaagcctcagcctgcttccagatagttctcctcagagttagcggtagcagcggtcgtcggccagtgtgtctcgggtcaaattattttgggcattactggaaagttccaaaccaaagcctgtggtaagttccacccaaactggcttgtgagggatatttttgtttaaactgcattcctggagaggagccagacttcctactgcctggcagcagtggtgtccataggagtatgaagagctgggaccctttctaatcactcagaccaaatattggggttttctgaaatggactgagaaataacagtatgtttttatgaggctttgcacattttccttcctagcagtagctgcttagtctactgaaaagtgcatattttgaacagggcctagaagagttaacagctcctagagagaggtgctctgtaatactttttcttcttcaaaaaatggtttatggctgggcgcaatggttcatgcctataatcccagcgcttttgggaggccaaggtgagaggattgcttaagcccagaaacgtgagaccagcctgggcaacgtagtgagacgctgtctctgtattacaaaattttttaaaaaacggtttgtaggtccttaagtccctgataaaatagagaactgaattgcaatcctggaacttaaaaagttggtgacgacacctgagatatttattacttagattgcagttactggtcagcttgtataatactgaccaagggttttgattcttcctggaattgataggaaattcatattaaaataattacccaagtccaaacatttttagaactgcatttttgatcatggatttttatgtctcttctgaactttctgtcaccggtataatttaaagaaattatacttaagctttgtctcacttagaagataatatagaacagtggtgtttttttaattaaaaaaaargttaaaatracggttttgtatccttgctttacttcttaaacatatgggaggaaaaaaaatctttaacaagtttatttattttcattttctgctaaattactttcagaacttgaatctactaatcccagatataatattcttggattcatattccaaattttgctgtctcaaatccatctagggaagtgggtgggctataaattataaataaattccaaattttgtgggatgaattaccctgaagaccaacgtgtaaattacatattaatctttctttttctccctagctcggttttaagaataatgttttagccaacatatctgcattactcttggctcaayatgagaaatccatttttggtttgcctaacagaagatcatgttgctttgcttctctacacagtatgaaaacccaaagaaaagaaaaacagaggcagttttttgctctaatgaatgctctaaatctagctcttaattatgattttttaaggaaaattttgaaaagtctacaagttaaatttttttttctatcccatacattttccatcctaaggcattgaaaaagcacactgtgaaatacttagtgtatctagaaacatcagggaagaatgcttccctcctaagcaaaattttgccttctgaaactttttcagcattcagtctttttatataatacttagaaaaatatttctgaaatagatcatacactctcttcccaaaaacatcaaagtatgaccgtaaagggcagaggtaggtaaacttcttgtaaggggccagagagtgaatatttgagaattttcagactattaagatctctgttgcaactgcttgcttttgccgtggtagcctgaaagcagccgtagatagtatggaaatggatgatcatggcagtgttgcaataaaactttacaaaacagacaatgggccagattggccaggggccatagtatgctacccctgggcaacaacctgtatgccctggagtagtgtaaagaacgtgggtgttgggggtcaactgacgcttccagctctaccacttactggctgtgtggctttgggcaaactactgaaaatctctcagcgtcactttccaagtgtgtgtaatgtgtattttcacagtgctttgcaggttgttgattattgaaaatagccataatgcatgaaattaccagacacatctcactttatggagcctggggctattggtaatatgcatttctttctcatcttgatcgtaaaatgatcttagaaaggtttctgagaatwtatagagtttaagacagcaataagacaactaattaattaaacaggaaaaggggatgttgtgctcagagaggaagtgtgggtctcataagggctttcacaatcgtttgagaggacacgtgtgatgtctcatgcctgttatcccagcactttgggaggccaaggcaggcaggttgcttgagttccggagtttgagaccagcctcggtaatttggcaaaaccttgtctctacaaaaattacagaaattagttgggtgtggtggtgcacacctgtagtcccagctgcttgggaggctgacgagtaaggatcacttgagccagcatggtggaggctgccatgatcatgctactgcactccagcctgggcarcagagccagaacctgtcttgtaaagaaaaggaaaaagagagagaagggcagaaagaaagaagggaaggaagaaaggaaaattgggcccaggaatgatctttacaatgcctgacaaccaagagaagaagggaaatgagcttcacattgcctgcaagctctarggtgacaagagccaagagaaattattgttactgtagtgatgttccactgaggatcataaagtactttattactctactgagtatggttttttgttttgttttttctttttctttttcttttttgctattcttttgttattcttgatttatgctgatggaaagccatggacccaaggatgcttcacagttttctttcggagtaaatgcttagattccattttctttgacatgactatgtctgttcctcttgattttaggcatctttttcagatgagttgccataaaagcagcctgctctggataagtgaggtayagcaggacacactgcaaatactaggaatccttaagtacagtggaaccccagagcactctacctgctttctttctcacctccttaaaaactttttttgcccwcacctcatcatttattcagcagtcacaacagtgccaagaacttggctagagattggaaataaagcttatgccttctctcatatctcctgtaccttatttctttcttacagtagttgtgatgcttagcagttttttgataactttttataatgccaaccttcaaaaacctgcccctggtggagagaataattattacatcaattaggggtcacttagcatgacatttgtcggaaaaaaaaaagttagtgagcctttttgccatattaaaagtcatcactgccaagacataaatgaaaatgtgttcgaattaaccacaccaatgttcacaaaataaacatttttgatttcccaacagaatcctaggtttaactatcactatcatctttcatgaaatcaaagtcatatatgtaaattgaacacaactttcccttccatagagagtaaaaaccacgctttggagggtagatacaattaccccagggttgtcttttcccactcctcacaatcccaccagtgcacatgcaaggtgatgtccttcctttagctatagcaaataatgttaattattgttggtgttaaataatgattatgtaaagcactagactagacattcgtcggcaaagtttttctgcaaagaatcagatagtaaatatttttgctctyatcagccagacagtctctgcggcaaccattcaagcattgttgaatacattgttgagtgttacatgagactattgtaatataaaagtagcctgggacaacacataaataactgggtgtggctgtgtcctaataaaactttatttacaaagaacaggaagtggcttggatttggtatctggcctggcagctgtggtttactactccttrgacggtggcccagagaccctttaaatgaaattcaktttactagcaccctttttcatcatgagaaatatattctgtttttcttaraaaatgggttatgttaggtctggtcaaggtaaataagtgttgagagtcgatgttgtgtgcatagttaatttcaattctttgaagaarctcccccatgatatttcacggctgagagaagaggaaagagtttaagtggaacagtgtgctttgctgagctttggaaatattaccatatagggaagcaggtcaataagacaactaagtgctgtttcaataacgaagatactgaagcgctaattggagtatggaaccatataatgatgataataattgctaatatttatcagctatttatcatgtgtcatgtacagctaagcacttacataccatcccattttatccttataatgackctaagagtgggttaaaaaatggcagaagaatggcagtgtttaatggttcagcctggtgcaatgattaaccacattttacagactaagaaattaagaacctcaaccaagttcatgctagctggtacgcagtaaggctagaacttcgtccaaaatctcttcttctgttgagctcagcttgcatagtagcttggagaatcagaaagatctgtctcatttgggaaatataccatgtaaaaaacattgtttctaaaggagatttgtcccatgagtaaaatagatgatggacagccactgcctagtgggacaattagaaaggtcagttcaaggttggaggagatgcttctttcagccaattttcctttttctcaggatcacctcaggtgatccgcccacctcaacctcccaaactgctgggattataggcgtgagccaccgctcctggcctttcagccaattttctatcaccaaagggaaatcgttttgctggaatatgtgtaaaggaggttaaagtcagaagagattctcgtccgctcagttaaggtactcagactattttccaaccaatcaagagggtgctgcttcatggagttcgtttaagctgaagcggcagctgktgactgtcatttgcatcatctttatacatttactgtgaatgtcactgtccatttccactttctttctacttgtcttcaaattgatgcttatcaagtagacagaagaagaccaaggggtcgttttgctatttatacctccaaattgatggcgtgatcactctcaagtgcaaacccagccctgacactgtcctgtttggcaatgtcctgctatctgacctgcaaatagctacacttcctgctgtggcccacccaggcctctgggatctgatcccttctcccatgtcacctgtggccatgtcttccccaacccaggcttctctgctccgctgcttatgttctggatcctgactctgagcctttgcttgtgtggctcctctcccacttgtccatcatcatgtcagttatgtaagcatagattccaaagtgacaatgagggtagttaggatggcaagaggagaaaaaccaagctggattcatggattgcttgtgtcacgtcctctacagagcctcccttctacctgctcttacccgggcaccacagttgatgagttattttttggaccatcagcaacacacccaatcattgtacatggaatacttyggggatgcttttttctatattgattttacttcattaaactgagctccagaggagcagaaactttggctaatacatcttggtcttagcttgtaatatctgtgctacaacttattaagatggtgacgctggcaaattccttaatctttctaattcttaatttcatcagcaaagatgggaaaggatactaacaccactctgggttgttgagaggattcaataactgaatatttataaagcgtagtacctgatacttaataaaaaagtgaattttaacctgtgtcatcattgtcatcgtctttatcatcctttgcaattattacatttactgccttctagtacaaggaaggggatgggtggctggctggctaggtggatagaaggatggaagaggtaagtacaaggaaggggatgagtggctggctggctagatggatagaaagatggaacaggtaagtataaggaaggggataggtggctggctggctagatggatggaaggggtggaaggggatgcaagaggtaagtacaaggaaggggatgggtggctggctggctagatggatagaaggttggaagacaggaaggatggaacggaagaagagggaagaacaaaaatggaaacacatagtactgttaggtgaactgaacttctaaggtgccgattctcagtgatagaatcttgagttgatacctccttgggtggcatggagcctatacctttgtagatcttgggaaacaacttctaaarkaatcatagttgtatgtaatcgtarktacaacaatarttattttaggcacataacccaaaggttttcttacaaggaatctatgaaccttaagagtgagggcttctgttaagagtaagggcttccctggagtggacatggatcatgggactgagccagcttggcattgttgggttgaacagggagcgacacctctcagcccagtctatcaagcctgctctttgacctgcagtgagaccacccacgcagacatcaatgcagcaaatccccggcgtcagggtttcaacatttggttactctcagagaactctcgatttatataagacttggaaaaagggtttgagtttctgtggtttacaattatatttcccaacttggcccatgaatccagcttggtttttctcctcttagcatcctaaccaccctcattgtcactttggaatctacacttacataattgacatgttgagaagctgtgctaaaaccacactgaaatcacattttaataacatgggaaccatcttttcccagtaaattgttgagaagctaattcttgtcagcctaaaaacttgaatatacatttgaataaatcagcggtgctacaccgtggcagcctgctgaaaatccccaaggaagattatatttttagttgagctacttgtcactgcactgtgtttttaatattgtgagtcctttcttgtcttcatttttgaagaatctattgcataccttgtcattcagaaaaacataaacgggacctctcaattagcggtaaagttcgtcagtttaacttttaagcttaaactcctgttatagttcggtcacttactcgtcatcaaaaagatatttgagctgatattatgcaataatttataaccaaaaacaggaggaaaaggtctctgtttgtctcagaagtacaagttatgcataaggtgacaaattacacagctttgggaaatgggtcttaatggaatgcaccaggctaatagaaaagcagtgcctcgatttcccacctcagatctgaaaactcctgagagactgacagggcggttccccagcttggctgtgtgaggaatcagctgggaatcgaacactgcagtctggctgtcacccccaggattctaatgtaattgttctgcattgtggatcgatggatggatggatgaatggctggacagaaggaagacttggaaaaaatctttgagtttctgtggtttacaattttatttcccaacttggcccatgaatccagcttggtttttctcctcttaccatcctaaggagggagggagggaggaaaagggggaaggaagcaggtagaaagggaacagggaagggaggactggaggaaggaaagcagggatcattctggagtgtacactgggcatttgattttaaagcaaatccaagagatcattaaatttgtatcaatgaatacactgttacccctcaatcaacactacaattcatatatcagaatagcactttgttacttgtttctgagatagggctggctctgtcacccagactggtgtgcagtggcacgatcacagctcactatggcctcagccaccagggttcaagtgatccttccactcagcctcctgagtagttgggactacatgcctgcaccatcatgcctggctaatttttatttttgtagagacgaggtctccttgtgttgtccaggctggtctcaaacttctggaatcaagtgatcctcctgcccctgcctcccaaaatactgggattacaggcatgagccatgtccagctgccttgtttttttctttgaagagaatgatagaccttccataggaaaaatgttaaatatgtgtgtgcagaaataaagatttcaaatatttttgcaagatattttttctaataccacttttttctacattttccataatttagtgaagatagtaaattaacaaagtggaaaagactgaatattttaagaaaagccaagtttaaaaattttgaacctaatatttcttaaagtagctaaaattcagatattgagaataaattcaacttgacatggcaaaattctaataggctgaaataatgttttggtctagaactatgtagctttgtgtagcccatcaattgtctaaaaaaagagtaacctattttgatgaaactcgctgtatcttgtaacctgtatcctgtcttggtattgtgggagtatatatgatttaggggaaagagtctggagagaccttaagtctgctttagggaaagggtgaggaaccccactgaaggctacttaacgcattttgagaatgtcagtaaagatttctcagagcccagggattttttttttaattgagacataatttacatacaatacaattccttttttcttttttttgagacggagtcttgctctgtcgcccaggctggagtgtgatggtgtgatcttggctcactgcaacctctgcctcctgggttcaagtgattctcctgcctcagcctactgagtagctgggattacaggtgtgcgccaccacgcttggctaatttttgtatttttagtagacacggggtttcaccatgttggttaagctggtctcaaactcctgacctctagatccgcctgcctctgtaatcccaaagtgctgggattacaggcgtgagcccctatgcccagccaaaattcattattttaagctgtacaattgagtgatttttattacgttcacaaagttacgttaccattaccacttttgaattgcagaacaatttcatcactccaaaaagaaatctcataacaattagcagttattttccatcgctacttcctccagtcccaaggcaatcagcagtctgctttctatctcyacctgtttgcctattctggacatttcatatgagtggagttagataatacatggccttttgtgactggctttcacttagcataatgttctagaggttcatttatgttattgcaaaaatcagtacttcatttctttttatggctgaaaaaaattccattatgtagatgtgccatatttgtttatctggttgtcagtcggatatttctgttgttcctactttttggctactgtaaaagatgctgctatgaacattattgtgattattataccttatttgtaaacatcatgggtggggggttgcagtaaacatgttggaaagtagggttggaggtccgtagaaattgggggcttcagcacttcccccaagctcaacaccaaccccctttctgagcccctcttgaaggagagttccctgggacgtgcctggtattggtacaatcagtcaggaagcatttttcctggggagaaacttacaagtccacgatcaaagccaacaagagacaaggtgttacatgactcattttyggtttaagaagtgacaggctgattctaagttgggttcaattattttgttaaagcgttttgcttatttgacttctcctgacctcggaaataattctaaccaatcagtgctggctcccattggccctggggtctggttgctttacagctggtgacagggggaccactccactaccacatgtgaattaatcctcaactccagagccaagtgccattctccagcaaggttgtatttcttcattagctattcccagggcccagaaagtcccagaggatgtcagagtacattaatttttatcataacatggaatctttcaggtctgaatggcagcacacggctgtcaggggcttctgaactctattacagctccatatatctctaggcaaaacagaggaaagagtcgtcattggcaagggagatgtacaaaatgcatgagatgttttattttttgagtgacttgaccacgtgcttaagcacattccccaaacaatttttttcttattgtttgtaagttgtaagttgtaaattcacctctgccaccacctattaaagcccactccctgcattaaaactgtataaagtgtatttaaataaactctctttgcatgatgtgaatgaaatcgtcatctggtacttaaaactattctataaagttattaaaaaattaatgttcccttcccatgatttttctgcagaatttatgcatccatgatactgcagaagttcataaataatggcttgtattgctgctttagtattgctttatgcctacgaaatataatgttaatttgtagcaatgctaatgtgttttcaggaaggctctttgtttattgcctttattttccccacttaccaagtgggtaaaatgctttgagggttgcattttatgtattcaggaggcccaggtattattttaatagaagcactattgacaaataccagtcatcccccctgtgccaggccctggatgaggcactgcttcgcatgggggctccccagattgtcccacaaggaaagcatagtcaaagacaaagttttcagttgtaagagtaaatgtgttctgcctaggcattgtcaagtaatttactgccagctctagcccttcactcaagtttcctggatacttttgacttcttagccatggatgtgtttgaaggctgcatggaccttcacttacttgcactgcaggtcagcctaattgcatgagctctgtggaccacagagcagggttttccaaagttcaccaagacaaatattgtattatcttaacatatattcattttttaaaactgaaaatcagaagagcaactccacctagcagaagtcttttgcaaagggcgaggcgaggctaaaaagtatagaagagttcgtttccagtgcaattttataaacacagatggtccttaaattaagcaaatggtacctaaatgactgtgttgtggataatggtaacagagggagggactcgggggttttttaaaaagtactgattgtatgcagtgttttaaacagataactgtgatcttagtgtgatgaaagatgctgggagatttcaccagtggtatcttattatttttcggggattttgtaattcaacaaaattctgttgtatgccaagcataaccctaggtgtgagagcacaaggtgacttcagataccacctctatccttcaggggtttggggcccattattatgacttaatccattttgggcgtgagaagctgagggtcacagaaagaaccaattccctctttaaataatgccaccccaaccctcctcatctgccaggtctttcccttcttctatttgtatgaataatagtcactttctcttgtggagttcgctaaattctactttggcctatcaaatttctttcatatcacaactaaatttcttaaggacgggactatggttcatttgtcagacgaacaaatgggaatttgccaagagacacttgggttaatttacgtcttttccatccaagggcactatgttgaagtgaggctagtaggtcatgagtgtggttgaagttactttttcttactttcccgaccagcccccatccttactgcacttaaagttgattgtccattttattaaatgtccccaggaagccagaacacagggcagtaaagtgctgaatgcaaagggcaggagaaaaatggaaacaaccagaactgtaacaccaaggaatgagacctgcatgtcagatatcatgcccattgcactaagtgccattggggcacaattatcaaatggatgcattttccctagaaaaccatcttggagagcatgtggatgtacttctattttacatttccccctatttacaatcaatgagattgagattttgttgctgggactgctgatgatgggatgggaaaatataatcaaggtaatggacatgaggcaaaaatttaaggaaatgacaaaaacaagagtatttccattttcagttaagtgtatgtactgatgttctggaattcactataagaagttgcaaatggtgcatgaaatgaaaaattcctggtggtctccaggggacacagccggtgctgtgctccactctgggtaactgttttggattattttctctattccaactgaaataaaaaaaaattaattaaatgtggctaggttatcttgacagcagaatccattsccagttaattattattttaatacttgatggtgtctgtcaaattgtcgacatgtgacggtcctttcaaatttaaaggaatagctgatggtcactggccacccaagctgatactgattttatatgttgatgtttctcattttatttgctctttccttgaatatttattcaggacattctctaccagacatattgagtaagggcaacagaaacaatacataagtatcttataaatgtggaaaacaatgtatatgtgttttttatctctcaatgattggtgggtaccatatccccaaagtagaatgagcatttgagaaaacaggaaatatcctcttttaggcaccatctctgtcaaggctgatgctgggctttttatatattttctctaattcttgtggctgtcaaacaaggtgggcattatcattccctttataggggacacagctgtggctcagaggggtttattcactttcctgagggccacacacataatgagaggcagacacaggtgacgaagtgagttttccctgtcacgccatcttatctgtcacatacctctctgacatgctaaaattgcactaaacaaaagaattctcttatgcacatatcatgcaaaagatattctttaactggggatcatgtttctcattccatcaatagaatgactaacattttctgagggtgtctcacgtgaaagtaaatcgctcatgtttgttctttttaaaagatgcccttcgtattgtgtatcttgcagtcttgctttctcaaacttaagccaactatatcgtcatttttgcaaaatcactgcgtcagtttactattatttaatgtttattgctaccaattttaagaaatcctttataggactatttgtgaaattgattttgtgaggatgatgatataatttccattacattacagcatataaatataaatatawatatatatatatatatatatatatatatatatatatawatwtatattttattatttttttttgagacggagtcttgctctgtcaccaggctggagtgcagtggtgcaatctcggctcactgtaacctccgccgcccgggttcaagcgattcccctgccttagcctcctgagtagctgggactacaggcatgtgctaccacacccagctaattttttgtattttagtagagatggtttcaccatgttggcgaggatggtctcagtctcctgacctcgtgatccgcctgccttggccttccaaagtgctgggatatacattttttttttttttttgagagatggagtgtcactctgttgccgaggctggagtgtagtggcgcartctcggctcactgcaacctcctcctccggggttcaagcgattctcctgcctcagcctccccagtagctgggattacagtcgtgtgccaccacgcctggttagtttttgtatttttagtagagatgggtttcactgtgttggctaaggtggtctcaaactcatgacctcaagtkatccgcccgcttcagcctcccaaagtgctgggattacaggcgtcagccactgtgcccggccggatagaaataatttttataaactccttggatgctacctaaaatcatcttgttttgctagtggcacatgctgcattttgggcagctgtggccttggtggattgctgaagtagatttgaccttacctggactgaggcagctgttgaagggaattgctgtgttcagtgtatactgccatccatgatttcatgaaaccagctctagctatttaagcaggggtcaaacttagaattctacattatttttttcccttttctgggaggaaagacagttgaacaccagcaaagactaagaagtttcttagaagactgtgggtccttgggccctttctattgaatttcagagtatttccaaatactatgaagtcttgcagcttagttgagaaatgccccagatggtgtgacattctgcttccaggagggattggaaagtatttccttttacataacattccactcagctcattcctttgctgtgtctgaaattgaatcccccaaagccacaattatcttaacattcagaagagtgtttatttaatctgcaaaatcttgcctcacttttggggagcatgttaacaatttcacttacaaatcttctgtgtaactcaaccccatggtggtgtctactgctgctcctagactctttaaagcacctttctcatctcaggtttgaaatgatatgtctcattcttgggttccttgagtcgtaatgggtttgtcttgtctccacagcataaatgactctttcttgatcaactagaaccacatcaacttcttccctccagcttcagtgatatattgtgaaacatggctattcaacgtcctgtagaccaaatgccataagaaaaatagcattgattcaaacgtatccatccagatacctaaaaaagttttacttcttaccacatcttgagtctgggcaaacacgcacttcctatggacattgattactgtctactgtagagataacatttgcacatacagattatggcacatggtagaaagtgttaagtaatgtaggaatggacatatcccaagcaaaattggaagccaagtcccctgtccctgctcaagttggtatgactggtgtatggtgccttaatgggtacttaaagtccaggtgagagtggcaggaggcagccaaatgcctaggtagataggagcyggtccctgttgaaaccccacttccaagttgaagacagtttaaagactgaaagccaagctacaagttaaatcctcggaccagattgagaacttgtcttcttacttggtgcactcttctgattgatccccacctttcacctattttacatattcctgcccttccctaactggtttcctatgctgtcatgcccacctttgagtgttgccttcactttaaccttctgtgcatgctcacaaagtaattagcatgtaycctccattctgagttaatataaggccccagacccagccacatggggcaactttactgccttcaggtaggggaaccacccccaccacattccctctccactgagagttttccttttagttaataaattcggctccactcactctccattgtctgcatgcctaattcttcctggttgtgagacaagcagttggacctagctgagctaaggagcagaaagactgtatcacagggaacttgtgtaacagcttgatctcctgtcctacgtagctatctattggtaagaagttgaaggaacttgtgtcattccgttgtgcctgtcgtcttgaccttgtaaaaggtcttgggtaagcatgcaagaagttttgaagagggagatacagctaatttgcagatraaragcaagggaagaattcctggagaaaggaagagtttcctgagtcacctttgggaggtaggaagggtttgacatgtaggctgggcatctgggaacgagtgagggattctgtgagccccatctyagtggaccactcaaggaaggtgggtaagccctgggtataagtgtgtaagcagggaacagaaagtactgtgatttaaaatatgttaatttttctactgtacagatgagagccagcttggagatgggctgtagctcaagyatcttacctacctctgatttcttaatgccacgttataaggctgctgcttatagctcttgaagtcactccaaaaacagatgagtgagaccctgttgctaaagtcccactgggtgtagattattcacagatgtatacacagtggctcactccaggtaggatgtgatcagtgcttttagaaatacagaaagtcctattggtttaaaaaaaatttttttttgtaatgaattgagttttaaagctagcactgtacaataaaagggtgaatttcactatgaattatgacaaacacagtcatagagctgccatcatcactgtcaagatacagaacagtgccatcaccccccaaatgtcctctgtgccttactgtagtcatacctgctcctgacacctagcccctgggaaccattgatcttttttctgtccctagttgtttgtcttctctgcaatgttacataaacagaaatattctgggtgtcgcttttggagtttggattccttcccatagcataatgcatgcagtatttgtctgtttctgctaaattacccccaagacctagcgacttaaaacagcaaacatacactatctcactctgttagttttccattgctgttgtaataaattaccacaaacttatgtgcttaaaacccaaagctattatctgacagctctgtaggttaaagatttgtcatggttctcattgggctaaaattaaggtgtcggtatggctctgctgctttctagagactccagggagaatatttttccttgccttttccagcttctaaaggtcacccacaacatcttcaaaaccagcactgttgcatctctgaccttagccctgtagtcccatttccctctagccacaatcgggaaaggatctcaggactgttgtgatgacactgtgcttacctagattatctagcatgagctccctgtctcaaggtgatagagtttgcatgtttttctcctgcacatgccatgttgaaacataatccctagtgttggcggtgggtgtgctgggaggtatttggatcatgggggtggaaccctcatgcatgacttacggccatccctttggtgataagtgagttcacatgatatctggcaccttccttcctctgttgctcttgccctcaccatgttagctgcctactccccttttgccttccgccatgactgtaagcctcctgaggcctcaccggaagccaagcacatgcttcttgtagagtctgcagaatcggagccaattaaatctcttttcattataaattatccagcctcagttacttctttattgcagtgcaagaatagcttaacacacaaggtcttacccttgatcacggtctgcagcatgtcttttaccatgtaaggtaatatgttcagtggctgtgggggttaggatgtggacttctttgggggacttttatttttcccagttactatttttgtgactcaggaatttagggacagtttggctggttgtttctggctcagggtctttcttgggctgcaatcaagatgtcagctgggggctgggcatggtggctcactcctgttatcacagcactttgggaggtcgaggtgagtggaccatttgaggttaggagtttgagaccaacctggccaacatggtgaaacgccatactaaaagtacaaaaattagttgggcatggtggcacatgcatgtaatcccagttagttggggggctaaggctggagaacagcttcaaaacaggaggcggaggttgtggtcaactgagatcacaccactgcactccagcctgggtgaaagagcaaggccccacctcaaaaaaaaaaaaaaaaaaaaaaagttagctggggccaaggtcatctcaagtcttgactatgaaaggacctaacatcatgcatggctgttggcagaggtcacttcctcatgagcattaaactgaaagctataattcctgactattgaccagaggcgaacctcagttccctgccatgtgggcctcttcatggggcagttgataacacagcagttagcttccattggattgagtaagcaagagagcaagaacaggagtgatacagaagccagcatctttttgtaaaccaatctcagaagaattgtccatgattttttctatattctgttagttagaaacaaattcctaggtctcacccacccttgaggtgaggggattacacaaaagtatgaaaaccaggaagcagggagcattgggagtcatttggaccctgcctaggacagtgcgtttgagatccatgttattctatccattagtagtagtttgcttctttttaatgttgagtaatatgccattgtgtgtttatatattgctaatggattttaaagagggctaatcaacgtgttgattagagggaaattttcttcagtgaaataatatttgagcaaaaccttgaagaacaattaggaatttgacagagggaatggcacgaataaagacccagacttaatcaagtgaggggcgtactcatccatggggcagtggatgattcacctgcctggagcttaaggagaagggggtgtagttgtggctgttgctcagaaggacctgaatgtcaggatgcatttgtgtttaatttagcagacatttaggaaccattaaaagtttttgagaatgggtaggtaagattagaatagtattttaataagtttaactaggctttaaccagtattcataaaaagtcaagtgggagaatgtagaggtgacaagaccaggtgtgggctattgcagtgactacacctaaaaggaacagagctagaaacatggagtgacatgaagtcattgtcttaggttggtgatcctagcagctgagcctgggatggggattcttgttcctatgatcgattaggggactgttcccagaggagagcggagagggaagcaggctttggtttctactggaaatctgtttccgcccgattccatggggagctctggagaaggaattgtatcaccgagttggtcctccttgtcaacagagcatgtgtgtgggggtgatgacttcccagatgtgagggtgccctccagcaatggacagttatctggaggagttcatgctccagaggtagtgcctacctctgtggagaagtaggggatggcacggtattttaggggttcctaatgagcctagagatactgacattgaccagtcatggagactaaaggagaagatgggatagcacattgttttcctaagtatttgtaatcaggtgactggtttgcaaatatcagccattacagaaataaagggtatcaggacggggaggagatgtgaggagagaagatgaagagtttagatttaggcatgttgaccctgaatttgtgggaaggtatccaggaagataagactgacaggtgggaatgagattctggaacttggaaagaatatagtggctagagctaagggtttgaagtcttcatggcgattttgttcggagtcatggatttggaagaaactgctgcagggaagattttagagatggaatgaaaagagattggtgatggaacaatgggcaaaagaggaagggttggaggagacaaaaaatggagtggtagtggcattgggaggtccaagagtggatggtatcacagaagccaagacaggaaagtgagccagaagtgagggaggagcaggatcctctgcaacagggcagtctagtcttagcagagaggaggttgctgratttattgattgagaagccactcctcgccaggcagttttgagaggttctggatggtgatagaatggaattcattcagctgatgatgagaagtagatttgggtcagggaaggagactgaatggagatgaatatttcaaaactatagaccataaatgggaagagagagacgagtgcaacctgcctaggtcaagtgaatgtccttttttctcttcccagcccttgtcttttttaccctctttgttttctgcatttctttccttctgttctgatttttccttacctgatggtcagaaagatctgattgagctgacgcgtagcaagaatgagccagtggagaggaaaatgtaaccacctaatgggttctcctttcctgctagctggacagagctgatttatcaagacgggggtactgcaaatagagaaagaatttaatccacacagagccagctgtatgggaaaccagagttgtactactcaaatcaatctccccgagaattcagggatcggagtctttaaggagaaatgtggtggatagggagccagtgagtgatctgggagtgctgattgtctcacgtgtccatgtgaagagaccaccaaacagggtttgtgtgaacaacaaggctgtttatttcacctgggtgcaggtgggctgagtctgaaaaaggagtcagcaaagggtgatgggattgtcattagttcttagaggttttggcataggcggtagagttaggagcaatgtttttggggcagcgggtggatctcacaaagtacattctcaagggtggggagaattacaaagaaccttcttaaaggtggtggagattacaaagtacgttgatcagttaggtagggacagaagcaaatcacaatgggggaatgtcatcagttaaggctattttcacttcttttgtggatcttcagttgcttcaggccatctggatgcatacgagcaggtcactggggatatgatggcttagcctgggctcagaggcctgacactgatttgttggcttgaagatgaaatcacagggaatcaaaggtgccctcctgtgctgactcagttcctgggtgggggccaaaggactggttggcaggtctgcatggggccaccgtgttgtcagaaatgcaaaaatctggctggtgcaatggcttacccctgtaatcccagtactttgggaggctgaggttgtcaggcctctgagcccaagctgagccgtcataacccctgtgacctgcacatatacatccagatggcctgaagcaactgaagaactacaaaagaagtgaaatagccagttcttgccttaactgatgacattccatcagtgtgatttgttcctgccccaccctaactgatcagttgaccttgtgacattcctcttcctgaggcagtgagtctcaggagctcccccaccgagcaccttgtgacccccgcccctgcctgcaagacaaaaccccctttaactgtaattttccactacccacccaaatcctgtaaaactgccctacacctatttccctttgctgacccctttttcaaactccgtctgcctgcactcaggtgattaaaaagctttattgctcacacaaagcctgtttggtggtctcttcacatggacacgtgtaacagaggtgggcagatcacttgaggtcaggagttcaagaccagcctggccaacgtggtgaaaccctgcatctactaaaaatacaaaaattagctgggcatggtgctgtgcacctgtaatcccagctactcaggaggttgaggcacgaggatcacttaaacccaggaggaggagattgcagtgagccaattgcgccactgcactccagcctgcaatgcagagtgaaactgtcttaaaacaaacaaacaaacaaaaagcaaaaatctgaaaagacatctcaaaagccaatcttaggttctacaacagtgatgttatctgcatgaataattgagaaagttgcaaatcttgtgacctgaggaataacggctggtaattatttaaaactcaagcccctctcatcctaacgtggtggcctttcattcattttacaggaacagtttagttttgggggaaagctgttatttaaactataaacgaaatttctcccaaagttagcttggcccatgcccaggaatgaccaaagacagctaaccagttaccggaaacgggtcccaatctagaccccaagagagagttgttggatcttgggcaagaaagaatttggggtgagtctataaaattaaagtaactttataaagaaagtaaaagaataaaagaatggctactccataggcagagcagcaactttggctgttggactaaggatatttatagttaattattgattagctataatatattttaatataatatatataattataatacaatattatatataatatatattttatgtaactataaacaaggggtagattactcatgagttttcacggaaaggggtaggcagttcccggaagtgagggttcttcccctttttagaccatatagggtaacttcttgatgttgccatggcatgtgtacactgtcatggtgctggtgggagtgtctcttagcgtgctaatggattcatattagggtataatgagtagtaaggatgaccaaatgtcgttgccatctttgttttggtgggttttggccggcttctttactgcaacctattttatcagcaaggtctttatgacctgtatcttgtgctgacctcctatgttatcctgtaacttagaatgcctgacctcgtgggaatgcagcccagtaggtctcaatcttattttacccagcccctattcaaaatggagtcactctggtttgaatgcttctgacaaacctctgagactaaggacaagatggagtctgttaggttagttttaatttcctcagttattatttcacaaagggggtttcagaaagatagaaaatgctagaaagagacggggtagtcagtggtagggatcttgaggggttaaaaaagggaaggagctggtccctttgcagtaggaagtgccacctcactccactcttgccagaaagcctggctctgtcataaggaatcttggcccattgtcactctcattgatgacaacccccgcccccaccactaccaccttaactactgaggggatgtcctctggcccagaaggaatgcattggctctagttgaaggggttgctggtttgtaaatagcatccccacagtcagcagacacagagaatgccatggggccactcatcagaaaggtggaggggctttatctgtgggtagatgagagccatgtagaacctgcatgctgccttccattggaatctcaggctctaaacaaggaggacaaccttttctgcccttaatcacctctcacagatgagaatccacccaagaagaagaaaaaaaatcagccccttaaaatgctgactagtaacatcagtttttggaaggatactatttttgtttccattctgtctttatagtttgaacttttccttttsatagtctgtaaatattcatcatctcagagccttttgaattgcaatggcttttagtcaaaactgagcgcaatgtgccatttgaataataagaacctcattaaagtgaggcaaaagtaattcttttccttttgtacaagccaattaagtgtctttacaattaaaacaaagtcaagcactttatagtttcatattccacaagcctgtttttaattaatagaggtgacaagttttaggtacaggatacatattttgcctctggagttgtgcaattaacattaatgaagggtattaaaatttggtgagagaggaaagggttttcccaggtcctctgtgggttcttgcctccaggcctgtctttggtagcaagttccttggtttgctgaggtttgcattttcttgagagaatgtacaggcaagaataaaagtaactagaagagacattgttgttattgagaagtatgaagttaaaattcccaatgtccaggcctgtcttaaaattaggtaaacactgcagaaactatctttgaggaatttaattttgtcttgtggataaaagtgaaggataaagaggagaaataacaattatctaagctggcaggccagcaagatactggggctttacttctcacaaccatgggaggagtatatttagtttacaggggaggacacagattcacaggggtgaactaactggccatgagtcaggtaaggaaaataacatggctgagctacagtttctctaagaagttggttctgtccatttcagggagcttatgtaagacagaaggtattgtgcagtagccttgaagtcaggtgaccctttgggggtgtgtgtgtgtttgcttctttatattagcttttttttcattttgagacagggtgttgctcttcctcagttgcccaggctggagatcagtggggtgattacagctcactgcagccacaacctcccaggttcaagagatcctcccacctcagcttcccaagtagctgagactacaggtgcatgccactggctatttttatttttttctttttagttttgagtttttaattttttgtagagatgaggtcttgctatgttgtccaggttggtcttgaacccctgagtccaaaagatgctgctgtcttggcctcccactgtgctgagattacaggcatgagccaccatatctggcctatgttagctatttctgaaacttcatttctgtctgtaaatggcaatcataatatatgtcacgtagggttcttaaatacaaaaagctcttaaaaagtgcctaacccatagttagtactcaaaaaaggaaaaaaaagtattaatagccctggaaaagtgagcaaaatatttcagatgcaacctgaaaggagttcaaatgtaagtctctcttcactttgcccatctttccctcttccccgcaaggtttttagcagtggtcctgtcttactacaatatatgaattatccctgctacaaattagtagattctgctttgatttgaagcagagtctaatgagtgttacaggtaggctcggtgcttcaaaggatttctgcctatctcttcacagagtagctgggctattgagggactgtgtattgacaattgtagtgggcaccctatgtggaaaacaggtgttgtcaaataactgcaactgaccccaaccacaccatgacttttcaggttttaggtaggggatgggtgggaaaacagatgaggcaacagaatgaattattccttaataagatccagattaccgagtgataataagatttgcatgaatacttcaaacaacaacagtgattaaatacgtttttctagttaaaaaattaatgagtgctttccagcaagcgcttaaagaattaatactggccgggaacggtggctcacgcctgtaatcccaacactttgggaggctgaggtgggtggatcacgaggtcaggaggtcaagaccatcctggctaacatggtgaaaccccgtctctactaaaaatacaaaaacaagattagtggggcgtggtggcgggcacctgtaggcccagctacttgggaggctgaggcaggagaatggcgtgaacccgggaggtggagcttgcagtgagccgagattgcaccactgcactccagcctgggcaggagacagagtaagactccatctcagaaaaaaaaaaaaagaattaatatcaattttccacaaactcttttaaaaaaacagaagaggaggaaacactttccatctgacactgtgaagccactattactctgacaacagaggcagacaaagatatcacaagaaaaggaaactttaggtcactttcacttataaatagagatgcaacaattttgtacaaaatgctagcaagccaaatgcagccacatatacaaagaattgtatattatgactaagtggaatttatccaaacaattcacggttggttttatattaaaaaatcagtcaatataatataacataatagtagaataaaagatcctctcaatacatacataaaaacatgttttaaaaaggtccagcacgctttcttgatgaaaacttttagtaaacttggaacaaagtggcattttctcaactcaataaagggcatctgcaaaaaacccacaaatgacatcataattaatgctgaaagattgagtaccgtccccttaggatcaagaaataagacaaggatattcactctcatcactttaatattctactagaaatcctagctagggaaattgggcaaaaaacaaaaaagcaaaagaatggaaaaaaaagatccagattgaaaagaagtaaaactatctttatttgcaaatgaaatcaccttatctgtagaaaatcctagaaaggtacttaaaaaatattaaaatgaacaggttcagccaggataaaagtaggataaaagtttaatatgcgtaagtcaattgtatttctatatactagcaatgaaggcatcccatgttcatgtatcagaagatttaatattgtatagctgaccaaactctgcaaattgtgtacaaatttagtgcaatctctattaaaatttcagttgacttttttacagaaattgaaaagctgatcctacattttgtatatgaatgcaaaggaacctgaataaccaaaacaagcttgaaaaagaagagtgttggagggcttccatttctcaatttcaaaactttctataaatccttagtaataaagacagtgtcatattggcataagaatagatnnnnnnnnnnnnnnnnnnnntatagataataaaatagacttgagagtccagaaatgaatccatgcatattgtgaattgattttcagcaaggatgccaagacaattcaaaatagtcttttcaacagtgatgctagaaccactggatagccccatgcaaaagaatgagattagatcacacttgcataaactacacagcaaaaaatagcaaaaaaaaaaaaaaaaaaaaaaaaagggtcagagacttaaatgtaagagctaaaactatacaactcttagaagcaaacataggggtatatttttctgattttggcttagacaatgatttcttggatacaaccctgacagcacaagtgacaaaagaaaaaaagatatccagaatgatccagaatgaaaagtgtttgtgctgcaaatgataccatcacgaaagtgtacagatgacctacagaatgggggaaatacttacaaattaaatattaaataagggatttgtatctagaataaagamcttttacaattcaataatgaaaactcatttaaaaaatgagcataaratctaaatagatattcctccaaatatgatacacaaattgccaatgaatacataaaagatgttcaatctcattagggaaatgcaaatgaaagccacaatgagattccacttattgctaggatggctaaaataaaaaagtcagataacaaatacttacaaacacatggagagatgaaagttcaaatacagtcctggcggaaatgtaaaattgtatggccaaactggaaaacagtttggccattattcaaaaagttaaacattgaattaccatatgacccaataatcccactcctagatgtatcttgaagagaaatgaaaacatgcrtttccatagcatcttacaaatgaatgtacatagtagtgatattcctaatagccaataaatggaaacaatccaaatatccatcattggtgaatggataaacaaagcgtggtatattcatataatggaatattatttgcccattaaaaagaaatggattactgatatatgctacaacatggatgaaccctgcaaacatcatgccaagggacagaagccagtcacaaaagactacgtattgtatggttccatttagtatataaaatgtccggaataggcgaatctataggacagaaagtacactgatggtgttttgggaataagagtgtaggtrgatagagggtggctagtgattgctaatttttttttttttttttgagttaaaaaagtgctataawattagaatgtagttatggttgtacaattatttgagtatactaaaacagctgtacagtatacataggtagattttatggtatgtgcattatatttcagtaaagttctttaataaattagytaatgcttattgtagaaaagttggaaaataccaaaaaccataaacaggaaataggaaaaaaagtaatcctgactgtatatctggaaatcttttcgtggggtatggggtatgaatcacacatattaattttaatttcctgctttttcaattaaattgagaaagtttgggaacctctggcttaatcattatttatccacttctctgttgttggatgttagattgcttctagttcatatgtaattttataattttagttgacatgtcattatggattcttgggcataaacgtttatatgaattttgaatattaggaaataatcttggaagctatattagttttctaaagctattataacaaattaccacagatggagtgcctcaaaacaacagaattttactctcttacagtttcagagaccaaacatctgaaatcaagtggtttgcagcgttggctccttctggaggctggaaggagcatctgttccatgcctttctcctagcttcccatgactgccagccacccttggaatttcttggcttttatcttagtcagtctaatctctgcctctgtctttccatctccttctctgtgggtgttccttctccccttctgttttgtaaggataggcctgtcattggatttaaggcccaccttaatccaagatgatctcattttaagatgtgggacttaatcacatttgcgaagaccctttttccaaataaggtcgcattcacagatccctaccattcaactcactatggaagcaatgggatgggaggtaccattcaactcacagattcctaccattcaacccactataaagcagtggcatatgaaaaggatgggaggttgctatgggaatggtctgccccagatgcaggtaaaatggggaagcattttatatagaatggaaaaacaacagtaaagctggctaaaacttgatctgctttttacagtcatgtgctgacaattctaaacattatcaatgataaaatacttctccctcatgatattaactgtgcaatttttgctgcccctgctacatacatgctttattgcttggaaacaggattacttggtgaaataatgtgaatctttcaattctcatgatacatgttttcaacttaatatccagggtgcaggaatatatattcccaccaactttatacaagataatacaaatataatagtatgaataaatatgctaatttgatagaaaatattttaatatttactactagtgtagttggacgtgttaaatattgcaatggttatttgtaatctacctttataaaatttctaatgtctgccactgtttctgttagactcttaagaagatacgtgtttgtctcatagatttgtaagaactctttatatactaaaaatatggggcttctatatgattgcatatattcgtcacttttgttccactgttttagagagcagaagattttaatttctataaagatttttatgtttccctttattgcatgccaatgtttgttttttaaaaacttgtacgtcttaggctgcgatgtgaaaagtgtcttttttttgatttggaaacagagtcttgctctgatgcctgtagtggtatgatcatagctcattgcagcccttgaactcctgggctcaagtaatcctcctatctcagcctccgaagtagctgggactacagccacacaccaccacacctggctcactttcgggtggttgttgttgagatggggtcttgctgtgttgctcaggctggttttgaatactgggctcaagtgattatcctgccttagcctcccaaagtgctggaatttcagaggtgagccactgtgcccagcctcctgttttttttacatgtatatatatatatatatatatatatatatatatatatatatatatacacacacacacacacacatatatatatacacacacacatatatatatacacacacatatatatacacatatatacacatatatatacacacatatatatatacacacacacatatatatacacacacatatatatacacacacatatatatatatacatatacacacacacacacacacacacacacacacacacatatattttttttttcttttagatggagtgtctctctgttgcccaggctggggtgcagtgacatgatctctgctcactacaacctctgcctcctgggttcaagtgattctcctgccttagcctcccaagtagctgggattacaggcgtgtgccaccacgctgggctaacttttgtatttttagtagagatgggggtttcaccatgttggtcaggctggtcttgaacttctgacctcgtgatttgcctgcctcagcctcccaaagtgctgagattacaggcgtgagccgccatgccygcccttatttttatatatcttccataacctttctatctctttctttctctttctctgtttctgtgtgtgtctgtgtctgataataaaatacattaaattttattttataacataaatgttttataaggtcggtagatttgtttatgattttaatggctgcatagtattctatcatatggatatattctaaatgtaataattcctcaatggtatatttagtttactttatatttgctgctttagtttgtcacaaacactgtggatagccttgtatatatttattttgttgtatagttcttattggtacagtatgatttttcacaagtatacaattactttctgagaatttagctttttgattcacgtgaaagccttacttgtattgttaacaattttgttacgtttgtgaggcctaggcagaaggattgcttgagaccaggaactcaagaccaccttgaccaccttgggcaacatagggggagcccatctctacaaaaataaaaaataagaaataaaatagccatgcatggtggtgtgcccctgtagtcccagttactcgggaggctaaggtggaaggatcgtctgagcctgggagtttgagactgcagtgagttatgaccacaccactgcactccagcctggatgacagagaaagatcttgtcaaaaaaaaaaaaaaattaaatatatacaaaataagggagaatactatgacaggcttccacttacctatctttaggcttctttataaaatgttcatttaatctgatctctataagaaattctgtatccttaaacaacatgtgcctttctctttagacagagcgattacccccttgctatgttttattagcagctagcaagtgctgnnnnnnnnnnnnnnnnnnnnataccaccacacctggctaattttttttgtgttttgacagagatggggtttcaccatgttggtcaggctggtctcaaactcctgacctaaaatggtccacctgccttggcctcccaaagtgctgggattacaggcgtgagcccccgcgcctggccctgtgtcagcctttttaacagcataatttttcctttattagtcataactactttaagggctattttgatttacagacaaagtgagacttggatgaattaagaaagaattaatcaggtggttgaacctgagttccaactagggtgacaactcttcgcagattgcctgctgctgtcctggttttcacactgaaagttccgtatcctaataagcctctcatcctcagcaacggaggacagttgcccactcaaagccttgtgacattctagrgtatcctatttctacatggtgggaatctagaaracggagaaagaatttctcattcccgaaggagcatggattatccttggttgtagtgtttatgtccacatcacgtggattcccraaggagcatggattatccttggttgtagtgtttatgtccacatcacatggnatattttatttttcaggcctcttcatgtgcttgtgtgcaacgcagcaacttttgctstaccctggagtctcaccaaagatggcctggagaccacctttcaagtgaatcatctggggcacttctaccttgtccagctcctccaggatgttttgtgccgctcagctcctgcccgtgtcattgtggtctcctcagagtcccatcggtgggtttgaattgcatatttgttcacttatcccctttctcataccagctaatattcccccaaggctstcattctgaaaataattttcattagtcctgcttgagacatgtgggtggactcagcttggctcacttaatttttccaggtcttttttgttcgcctgtgattgtgggggactgtttagaaggactttctagagcaaggaagattgtttttacgactatacttcaagctcctcattgattttgcttagagatggaataataattgatgaaatctgaatggcatgacctttattgatttgtaattcaacaacttcaacatcttaccaagaagaatgtgcagttattctagcaggagaaacaatgcaattagagcctgcgagatgaaatcmaattgttttataatgagaaattagggaattcgaggcagacattagctgtgtaattgtggaaagggaagaactgtagttagagcatattagaaatctggccgtgcctcttttggttaaaatttcaattaaaacatcagatggcacttttttcctattgccattaggagaatattcaattgactgaaaaggacatttgaaaatttcctcgtattttcagcatatttgtttctagagttggagaaacaactatttgtctagagagaagtactctgaaaagacaaaggccttgctgggtgaggctggatttaatacatgttagggagatttctctttcacgtttgcttggtgtgtgtttggcggggggaacttacactcttagcaaagtagctagaaaaaaaaataacgtgcaaggggcctattttttcctccttcttctccgtcttaagtcctgaaatgttttagtgacccagaatgaagcttatttttttaatcatacttccataaaatgtaacccctgggacttggaagagagagaccagccaagggttagcttgaaccctttatcactcccaaacacaggggcttatggtataagtgacacactgcagatagatttacttttgccattttaaatttatgatggctgaaatgaaaggtaaatgccagtaataatcctcccccgtgttaaaagacatgaaacatctagtaattaggtggtaacaaaatctggacagccttatctttgcaaatcacaccaggtttgtgaaggaaagtggagtggccctgttaaggggcgagggaggctactgtgggggcaggcagcagagagagctccagaaataaatctgccagccccagtcatccaccagatgtggagggcaccacgggatatgtttaaatgagctggtatttaatgggagattatgtcgaattgtcagctgctcactctccttgtaaatctgtatctcaaatggtatttcgtgtgacgtctttgttctttgcttaactacggtgtaattcatgcctacttcagagatccaaatctcagcatcatttaaaagattagtttgaaaggaagggacttgggctcttgaattagacctatgttagtttatagggaggccttcctgaaatgtgttgtcaggcttgctcctgtgtgatggctggcactggttttatgctttccaattattctttgcacatcgttatttattattactgttattattatttgacatggagtcttgatctgttaccaggctgcagtgcagtggcatgatctcggctcaccacaacttcagactcccagggttaagcgattctcctgcctcagccttccaagtagctgggaccacaggcgcttgccaccacacctggctaatttttgtatttttagtagagacggggtttcaccatgttggccaggatggtctcgatctcttgaccttgtgatccgcctgccttggcttctcacagtgctgtgattacaggcgtgagccaccacgcccggcctctttgcacattatttaagggtgttttaacaaaatggcaatttccccaggctggcttgtgtattaccttygcattgcatcccttggctcccatgagtgagcgtggtgacttggtgygtaggtggtacgtgaagacasttgstcactacccaagaactcagggccctaaaccatgctgtaaaatgcaagtgctgatatctaattacctccatcaaccttggcagaatctcttcgttggagttaagaccccctgttaggggaaaaaagaaagtcctatgtttgcagaaaatattatactagactgctccaaggcaaaatatttattagccttcctgtgtcttcactgtgttttagttacttatctggaatctgagcaactgaattgagtttctgcatacctaaaatacatcatagtgaaatgagaagttgacttctttgctgtgaaaaaatttcagataacaattaaagtagaatgaaaagagcagagtgctggttgaacaaccctcaatggctgcagctgcatggagtgccaaattgccctcccccaccccacacacaaaatcacacatacacgcacgcacgcacacacacacacacggagtttctcagcttctgtgtagacagaatccagcctaattattttaggcgggaattttaaaaatcctcaataaaattgggcttggtagcacatgcctgtaatcctatctagtaagaggctgaggtgggaggatggcttgagcccaggagtttgaggttgcggtaagcgttgatcatgccactgcattccagcctgggtgacagagtgagaccccatctctaaaataaaaattaaaaattgtttaaaaaaaatgcagtataggccaggcacagtgtctcacgcctgtaatcccagcactcaagagttcgagatcagcctagccagcatggcgaaaccccatctctactaaaaatacaaaaattagccaggtgtggtggtgcacgcctgtaatcccagctatttgggaggctgaggcaggagaattgcttgaacttgggaggtggagattgcagtgagtggagattgcaccagtgcactccagcctgggtgacagagcaagaccctgtttcagaaaacaaaaacccaaaaagcaaaacccccacagtatatatagaaatacaagatttgtgrggggcgggggtccccctacaaagcaagtgttactgtccacagagcaaatgtcaatattttaatgtactagtaagggaaaattctattaagacataattgtttggctttgtcagtttgtcaacttgaaaatagagtcagcagcatctraagagttgttttactacctctggagctgagaggtgaacatagtcgtttttcaggaagccgtttctggctcagacagatmagaagctggcccacccttgccacttcctggaggactgtcagtgctagctaatgagactgtaaaagtggactatctgcccaggagacagygaggaaggaaatcaggggtcacccttayagsgaagggctctttgcagagagagtgcctgatacgtagcagctggtacttctccatcttgaaactgtccttcctggttttgtctaatttgtcatcatgggattcttttgacttgtttctagattagggatcaagaagaaatgactttctcctcttagacatttaattcacttagtgttccctagtcatgacatacttctgtgttatccttaaatactgaaacagggaccttattcttaacagtagaaaatcactgtgtatgatgatagtgtatacctgtaataccagctactcaggaagctgaggcaggaggatcccttgagctcaggagttgagattagcatgggcaacaaagcaagaccttgtctctaaaagaataagcagaaaccaaaagccctaaacatgaggaaattccacatgtaaacattaatggaaaacatagaagagttgaacctagtggtaaattttacctttagagcaatgcttgaaacaagggaaactgtcaaattctcatcatgggatttgtgttcctttgttttttttattaaggacttggtccttggattggaattccaaacccatgaccaaactgtaatcatctaattctgtattgagtccttactatgtgtcaggcactgtagtaagcaacactcaagaatcttacagtctactttccaagaattcacagtctagttttggaatcaggtgatcaattgacttacagtctggtatggtgatgacagaggagcaatgtacagatagaacagaaggatggcacagtgagccttttcaccaatcttggaaggccagtaatgtcagtgaacactaggaatggtgtcatggcctgggtcctgaagagtggatacttaatgtccatggaggcatgcatttttatctgccttgcatggcttctttcattctctccctgacttccacccaaaaaatcaccatgatatccagctgtggaagagttcattatggagagcttcctggaagaagtagtccctgaactgggttgggctaaacaaatatgccaagaagggtttctggaagcagttgacaaaagatgagtagagagagggagggggtggtgctatatttattccatacctttcagatactctctaaatccttgtccctgttgtctatgccatgtaggtagagttttcaagtcatgtcccataccttggatcattggattctcaactcagtagcacctttgtgtgacacctcttctgtaataccttattatgttgaaataaagttagcaaataacataacttacatgcacaaatatattttcaattcgatatgatagctttactgtaatgaaagaaaaaataactgaaacaaaatggcgtgtgtttcaacatgtaaatgcttgggccaggctacaggaaagatggggatgtatgtatccgtggatgaatcaccttgaatggactctcataaaaaagcccaccattaccaggtgtgtggtattgcagactccagcaccaccaaccttgagtgaagcctgactatattagtctgttctcatgctgctaagaaagacatacccgagaccgggtaatttataaaggaaacaggtttaatgggctcacagttacacatggctggggaggcctcacaatcatggcggaagatgaaggaagggcaaagggatgtcttacatgacatcaggcaacagagtatgtgcaggggaattctcatttataaaaccatcagatttcgtgagacttattcactaccatgagaacagtatgggagaaagcacccccatgattcacttatctccacctggctctgcccttgacacatgggggttattacaattcagtgtgagatttgggtggggacacagccgaaccgtatcagtcaccctccaaaaatcacacaaaatctgaaagtgcttttattcattctacatgtaaatagttgttgcactacccacctggaaattcagtggatgtttctaggctcagataattatccacaggcttttcatctccatgagtgtccactggggcattcttcattgagcaatacatcatgtgcattgcaagacatctgccatccctgctaccatcaccagcagtcatcacgacaaccagaagaaggccgtcatatattttcaaattgcctgctgagttccattgccttagacaattaagcttggaagtcagactcttcctgtggtttgggtactagaaaaaaggcagccaacaattcgtttcaaggtctcatttctgtatccttgatgacgtttctggccatcagctttgttgatgactttagagcagctatgtcatttaacactagaaattggatgtcaccgagtcctgtggaagggatatttaatttccattaaaacatgaatttcattctgcccttgccatgcttttcttggtcttagcccaacctgagctgctgatattaaggaatrataggataattccataattttcattttaccttttgctttttgttttccatagcagttatctagaggattcccattatgcttcttcattacccggtgcccagaatgaacttatagaagcagaatatgaggggtcctttgacaaacatgagactgtttagaaaattccttttgtttgctgtgatccattttgtaagggaagtcactataatgttgttatttaagagaaagagacaaacggaaagaaacaaacagctggtgtttaacgactccgtcagacccaattataaagcatcaactagttacgttgatttgtgtacatccatgccatgggtatacttaaaaacattagattttgccagaactcatcttggctttgtttacatttttcttttaaacgtataagactattgatggtacctcaccaaggttataacccctttataatcattaatttttaatctagaaaagagtcttggagacaacaagactcatctataatttcttggatgctcaaatgaaaatatacaggactcaagcattagctaaaataatccaggaaagccctgtcaaaggttaggaatgtgatatctttctgtttccaaaagcagcagccctttattcaagacacttttctgtttaatttaattatctttgaacttcctgttgaaggttttgaaaaatatatgttagagggtggggagagagttcagtatgtcaggactgctacatttatgagtgtgggtctttattgaagtctctctttgtagccaatccttttttttttttttaatttttaaattttaaattcttacttttagatatgggggtctcactctgttgcccaggctagagttcagtggcacaatcatagctcactgcaacgttgacctcccaggctgaagcgatcctcctgcctcagccccccaagtagctgggaccacaggcatgtgccaaaatactcaactaattgtttattttttgtagacatggtgtctccctatgttgcctaagctggtcttgaactcctacactcaagcaatcctcccgcctcagcttcctaaagtgctgggattagaggcatgagccaccagacatgacctgtgtttatattgttaaatcaccattgtcaatcttgaaaggagactttgttttgatgtatgtaagattgagtttttactcatctctacatagtttcctcagattgcttttttttttttttgagaccgagtctagctctgtcacccaggctggagtgcagtggcacaatctttgctcactgcaacctctgcctcccatgtttcagtgattctcttgcttcagattcccgtgtacaggcatgccaccacacctggctaatttttgtatttttagtagagatggcattttgccatgttggccaggctggtcttgaactcccgacctcaggtgatccactcgtctaagactcccaaagtgctcggattacagatgtgagccactgcacccagcattccttagatttccaataaaaataaaaagctgtgtgggaagtcagaacttggttgcttcatgtcatatttcctatttttaagatttacagatattaacgactccttgggaaaastggacttcagtygcctctctscaacaaaaaacgactattgggcgatgctggcttataacaggtcsaagctctgcaacatcctcttctccaacgagctgcaccgtcgcctctccccacrcggggtcacgtcgaacgcagtgcatcctggaaatatgatgtactccaacattcatcgcagctggtgggtgtacacactgctgtttaccttggcgaggcctttcaccaagtccatggtaagagaacagcttctggcgccgcaaacaccttgggtcytagagaaacctgcacacttgtgtstccacctttttacctcttgcgggcatgagtctggtctcagtaatmacattgtccagcccatcataaagggctcttgaacacattttcatcaactttaggttaagtctgtttgggtaaatgcgtcttggagggctgggtagaagatgtgggtttcagtatcatgttaagtatggctgaaagtccttatggaaatggtgatttttttgtttgtttggttttgttttttttggggttttttattcagaaactttgaaaatctattttgttgaatggagcacttgaaaactgctgttttgtgtcagtaggtaaacaacaaacattggtgactactgaattttcagcagatgtgattcctttgtttcacagaaaawctgtatctkwtgttctaaatttttttcttctaatgggtataatcctctgttggagagtcctttgatagctaggagtgtgttttcttctttactttcccaaagacaattttggatgaatcatggtactgtggttacatttggaagtgtttacaaaggtgataagatgtttttatagtttggtgttcatttatcgaccatattaagaaccttcttctatgaaatgsttttagtaggaagtaytttgaatgaagaaagcgtattttccacaatatatttggtagattatttttcaaaaccaaaggacttcaaaaatgtcttcctattagtggacaccagtattccagttacccaaacttaaaatctacttgacagaaatcacccttttcccaaacacatttgccttttagcgatatcacaggccttcacagttggacctaggatattaataaaacaaagcaaaacaacaacaaaagaagaactattgcaggcctattatcctccagctgatctcacgaccttggaaactgtctgctgccttctcttacactcattcccacctgccacccttaaccttcgtatttggggatgacttttttttttttttttttttttttttttttgagacggagtctcgctctgtcgcccaggctggagtgcagtggcgggatctcggctcactgcaagctccgcctcccgggttcacgccattctcctgcctcagcctcccaagtagctgggactacaggcgcccaccactatgcccggctaattttttgtatttttagtagagacggggtttcaccgttttagccgggatggtctcaatctcctgacctcgtgatccgcccgcctcggcctcccaaagtgctgggattacaggcgtgagccaccgcgcccggcctggggatgacttttaaaaccacatcaaaagtcttttgaagtgcttaggaggaggtaagtaagtatatcttttattctaatcacccaagtggtttttaggcagagtaaacagacatattccaagagtcgaatacttaggatcagtggcagtgaagtgaaaggacctacggagaatggtgttccatgccgcagggtgggattgatctctaggaagtaaatgaatgaaacttacctgtaggtggatcacagggttttgaaatctccccatcactttgctcccgatgactgcataagcgcagcctcttcatgaaagtttctttgaccatggttatgcctcatactttgttgtgtccttcagtttacatgaaaagaaggaatatggatctgaactgggtgccagtgccatttaaatgaggcatttaggaatggggagaggagagaggtggattcttccttattttctgctggcccagtgccttccgctttaacaagcccagtcaaccatcatttgtaatctttgggtcttgagtcatctcacttgtatttgatcattgatgtgttttaaggagctcggttcagtggcatcagagagttcgttttctccttcttccataaggtccctaatcagaggaacgggatgggaaagctttagagatgagtctgtgactatggaatttggtgaggggtgatataaccatcctgccatttgttgtagactcgaatggatgaggagtcattgatagaaaatagtggaaactgttattctgtggcctgatcccattgcttagggactctgtgccagggcatgtgggaaaagaaggaaggcaagttctgctaaaatataaagtcagggtaaacatttttatttattggagaagagttgattattatctaatatttaatataatatgcttaataaagtcagacttgaaagttggctggttggacctaacgggagtatctctaaaaaataccagcaaattaagttggatcggtgactgtatcatgatatcggagtgttagctgttttgggagtacgtgtgctcaggacttgggctgagtggaaaaccagagtatggggttagaaatggaggcagarggactaccatgtcggggaggatgcacaatgaattggacgaaggttgcaactcagtgagcaccgtacctgtagtgtgtcttagtaatagcagatgcccaacctccatgcctaactcctttgcctaccccaccagtgtgcagcagcctctgccgcaccctactgcagtctctcctatttccctggcaggagagctcagagactacttgtgaacaggcctcaatgcctatagcaaggcaaggcttgggagaaacaaatgtcctctgggagcagccttgggtaaaagattaactgcgcactgagctttagatccctgagtgagaaagctgtgggaaaatgagtgtgtagctcatgagagggtttggagaaaagtggtgacatcgcaaaaatcccaggttttgttgaagttgtctgtggaggggcactcatagaaagggcactggacgtgagcatttcccttgtagttgagatgggatttgacatgacttcctggtggtggcaagacaagaaagtggcaacctgggacagtggacctcacagctctcctgctaatggtgctgatggctaagctcagctcttacccttgaccactggaacaacttagacatgtcaccagctttctgascctgtctcattacgatgaaaattgtgatacaggttagtgtaaggaccgacaataatgcatataacatcaataatgatggatatagaatttctgcagttattataatctggctctccagtatggtagtcgtgggccacatgtggctattgagttctaaaaatgtggctaatagaactgaggaagtgaattttcaatttgattccatgtttgttaattcgaactgaaaaacaccacgtgtgccaagtggctgccatactggagagcgtggtcaaatgacatgcctagctcagtgcctttcgcatgggaggtatgcagtacttcctgccacgatggctgttactcttgtcgttgtgagcagtgccttggtcccgatgatgattctccaaaatgtaatctctgctgacagaacaagagtctgcaaattgggagtctggaaagggaagakaagggctttgtccctggccccaaagactcagggagaggtttactggccaggtagaaagggcgtccaggtgaagggaccctggttcagtgatctccaacctgcacgtctcatttgtgaggaagccgtagggtgtggactttycttgtttctgaccttgagtgattagaaaatagcagcttttatatgtcacaaatggactttagataagcatgaagatgacgaagactgtggaatatgtagctaagagtcttactaaaatcctctctagtgtatttatatatttaagcgtttggtagtacttttttagccatcagcgttctctatattaggttgatacagaagttattgaggtttttgccattgaaagtaatacgtcacttcatgcagaggtggaattggcgctctgagcttgcttgtcaaattcacaggcattcacttttctttcataaacatttaggactctgtatttaggagaggaatcactgtgaatgtagacctcgggttggtcattttcctagtaagatagaccagactgactggaaaagtcaccctcttgggctatcctgcrtatgtggctcggcattgcttccgtcaggataatgcatcagtttcttggacaaagggtgcatttctgctatttgaatgcagacatatttttggatataagccacgcagttgcatcccatttcttccgtaggtaaaggctgggtttctaattgtgattgagaagcttagcatagatgcaatgtccctatcaccagatggctagtgtgctctgccttgtctgccttttaccttagagagggtgcttccttctgacacgggtattgctggagtacacattctgttgcatgaggtcaggggagcaagaaatacaacccagacttgcgctcggaagccctgccttcatttcttctctgtagctggctcccttaagtattaaacagcagtattctaatatcaacgtcccttttttatttgctgtgacttgctgtgactacggtgattttagttacagtaattaggtcactcttcatggagtcgggctattttaagtgcctctttaaggaatattgttgcagatcagtaattttacaattggatgttcttgtgcaactttattaaatgtgatctgtcttttaaatgttgcccttttacagttacacatttctaattgttgctgtaaatgcattatcactttgaaattaattaatttttccattttggctgcctgcaatataataatcactaatgagaaactcacaggaatcaattctcagcacagcggcccctactggtaaagccatgtctctgcctccctcttcttcttcagatccagagaactggacaagtgtattggggcgtcctgggagggaagtgtttgtttcttcctcccttcaatttatggtgaaataaaaatcacagataaacttggaaagtgagttatttttaagtgtcgttctaaaaaagatgcaatatacttcaaatagctgcttctaaaatatgttaaaggaaactaacatttgctgagtactttctaataatgaagtcacatcatacgtgcattacatgtttattttcttgactctagagcattcttttatgcagttaaattactctaaaatgttttgcacctgcacgcattaatgtgtattgtttggtaagaactttcgagttggtgaaaaaatgtattgtattttagtatctatatttatatatacatattagtctatgggttttaattcacaaaaccaggtgttgtatctggtgcacataagggattttcaaggctaatcttgggtttttgcagttgtaaccatgtgtgatgactttagaatcctaccacacttccaaatagagatgcagattgaccattttcccagataccacgatgctttatgtatcagcatatattttcattaatttctcataatttctgttagaattaataattccaagttctacaatcttagaattattatctttattttgtaattgaaaagcacagaaacctcatgcagcgtgttcaagaaaatgatataccagccttgtaaactttcacttgctaattgcagctgcatttgctttgtccaatgcacggtaatgcccctggcatccatatctagttatgcagttatgcttcctttttaaaatgtttgacagcaccttcactgaaatgaatgctgccaccaccgccaaccccaccttttttttttccacataagctttcatttctggtaaatacatccttgccagagttcccaggtccaagccggtcctttgtggaccagtatgcagatttgaagttgagcactgtcacttgcctcttaggagtgttttgtgcaaccacatatttgtgttggcagataacagtagaaagaatatcatgtgttagggtagcaagagcttagcagatgttttagggaactgcattttcaaatcattttacattaaaaaatggcttacgtttatggaacttctgcgacgatcgggttacgtttcctgtgcccgtgtaaagccagtcatcgtgctgagttttaacggatgtgcagctaccctgctaatggatgggccggcaatgctggtcctgttgcaaagttataaattataactagaaaaagcacaagatgtcattcttctaaccttcgtgaaagccaaacggggtaattctgcccttgaataacccgctgcagggtgatttatagttgtacaatttaaaacgtaatgaaggagataatagatgttgatttgttcctgaaattagtattttagaaaaatacttctccccctttccatctttaaatacctgcagctgactacactatagatactatcaagggcaaagccccctgtttgaatgtgtattggtacattggtgtatcacatacaaggcagagggtgtataaaacaggctttctgttgcgagggggaaatatggttttcaaagtggaaatttcattgtattcttcatgaatctaaacattttgagactcctgagtgaggtttgaattttctggttgcctttctcttgccagtccagatatgttagaaaactggactctcaggacccctctgtggttggaccacactggcgctttcctgcagttgtctgtcaacagaaggacctggtagctggcttgtcctcttacaccactgaggccaccttcttgcaggaagaaacatacttcttcctgccctggattaacattaccattggttttagtagtcttacgtcattatgtccaaagcttttaagtttacagtgcttgcttagtccagtgaccaatggatgtaagtaagttggaaaagggcaaaggatttagaatcatgagggttgtattcaaactgcagcctctactcccttttagttacataattttgaaatcatttgacatttctgaggttaattttctacatcagtttagctgctttaggccgcaagttattaacacccacttaaaggtggctgaaataatagaggttttgcttcccatgtatccagagttgctgaggcagcaagggttgtgtttggctactatatgagtagctcctttgtgataatctttacttttccctcatgcttacaagatggcttctgtggtgccagccattgcatcctatttgataaggtctgaaggcacagatgggagggatgaggctcctcattgcatgcctttttcctttatcaagagacagagcattctgcttcagaactgtcctcctgagttgacttcccgtcagatcccactggttgggactgagtcatctgtttgtatcctagttataaaggagactagaaaagtgcataactggctttttgagcctctagagtggcaggcgaactctgattttgaggaaaaaggatagggtaatggtgttgacacaggcactgttgaatacgtatgtacrtattttaatagtttkctcattaatcaaatggaaatgctatcgattttataggrtcgttgtgagaagaagtgagaattgaaatgaaaggcatctagtcttccccggtccccatccacttgacccaccatacctcaagccacttctggctccatgctctttctttccttagggttttgaaacatgttcttcagcctagaatactsctcctccactcttaatttctacccatcctgcaaaactcagtctgaacagcacacgtcaaggaagcagttttggtctctcagattatatgaagctctccaatatgttctttcagaacagccagtgcctagaatactgcctgactcgtagtagcactccttatgtgttgaatgagtaaatgaagagtccctggaatttcttcttcataacattgaacacaactgcagtttgaaaacataatttctgtagttttttttttttctttttttttgagacggagtgtctctccgttgcccggattggagtgtagtggcacaatcccggctcactgcaacctccgcgcctccccagttcaagcaattctcctgcctcagcctcccaagtagctgggattacaagcactggccaccaaacccagctaatttatatatttttagtagaagcggggtttcaacatgttggccaggctggtctcaaactcctgacctcaggtgatccacctgccttggccttccaaagtgtggtgggattccaggcatgagccactgtgcctggcctgtagtttctttttcttttttcttttcttttcttttttttgagatgaagtcttgctctgtcacctaggctggaatgcagtggtgcaatcttggctcactgcagcctccgcctcccaggttcaagcgattctcctgtgtcagcctcctgagtagctgagattacaggtgtgcaccaccacgcacggctgatgtttgtatttttagtagagacgggatttcaacatgttggccaagctcgtctcaaacctgcctcagcctcccaaagtgctgggattacagatgtgagccactgcacccagcctgtagtttcttatttaatgtctgtccccccttctcttgacagtggtgtttttgccttcacactactgtatccctggtccataccgtaaatgttctgtaaatgtttgtaaatgaatacatgaaagatgaccaggtgctgaatcagtgagagtccttaatgtacttcttatcatttatccctctgaggtaggcaagggattatagtttagaatgtgtaaatacgtaaaagataaggcaaggagacctgctgagagtcacacagcaagcccccaaggtcccccaggctcatggtcaaatgacatgtaagggacgtatccagcggtgtgggtatgtttggagggaatgaatgtaaggagagagaggtgaggcacaggagagacaggatgagctttagaggtagacagctctcgggtccagccctagctctctcccattctaactcttgggcaaggttcaaaacctgattaagattcatgcataaaactgagatgttagaactacctcatgggcttgtcttgagaattaaagacgttatgaacttaaggcctctacagtgtgctagatgcttaagaaatgttaactactattgttattggcttgcagtagaaattaaagattatgaatgttcagcattcagaatatactagatactcaataaccattattgctgtcattattaacattattttccccagctttactgaggtatgagtgacaaaaatttcatatatgcgcatgagtgtgtgtgtgtgtgtgtgtgtgtgtgtgtggctgggcatggtggctcttgcctataatcctaacagttgaggaggccaagctgggaggatgacttgagcctgggagttggaggctgcagtgagctatgatggtgcccctgcactccatcctgggtgacatagtgagaccctatctctaaaggaaaaaaaaaattatatgtattcgtggtgtgaaatgtgatgttttgatattcatatgcattgtgaaatgactaccacaatcaagctaattaacacatcggtcaacttacatagctatcattttttgtgtgtggcaagaacattgaaagtctagtctcagcaattttcaagtatataatacgttattattattactatcgttaactgtattcaccatgctgtacaatagatctccagaatgtattcattctgtctaactgaaacttaggatcctttgaccactatctccccatttatcaccccctcccacttccccactaccagcccctcctgggaactgccctctactctctgcttctgtgagtttgactgctttaaattccacacaaaaagtgagatcatagagtatttgtctttctgcgcctggcttattttacgataaattgattgcttctcttcccattgtttatagatacccattctcgtaatgatggcactgtgtctgtcatagaaggcctaattctccctgttaacattgaacataaaaacctcatatgggccaggcacagtggctcatacctgaaatcccagcactttgggaggctgaggcggatgaatcacctgaggttgggagttcgagaccagcctggtcaacattgcgaaattctgtctctactaaaaagatacaaaaaaattggctggctggtcatggtggctcatgcctgtaatcccagcactttgggaggccgagccgggcgaatcacgaggtcaggagattgagaccatcctagctaacatggtgaaaccctgtctctaccaaaaatacaaaaaaattagccaggcgtggtggtggggcgcggtcgtgggtgcctgtagtcccagctactcaggaggctaaggcaggagaatggcgtgaacccgggaggtggaggttgcagtgagccaagatcgcaccactgcactccagcctgcgtgacagagcgagactccatctcaaaaaaaaaaaaaaaaaaaaaaggctgtgtgtggtgactcgtgtctattgtcccagctacttgggaggctgagacatgaaaatcacatgaacctgggaggtggaggttgcagtgagctgacatcgcatcactgcactccagcctgggtgacagagtgagactgaaaaacaaaaaaacaaaaaaaaacccaaaactatatgtgcaagcctcaggaaccactaagacagattacacaatgctcatcagaactcagcaggcttccacagtgcagattttaagccctccagttgcctgttttactggcaccaagaacacaccttagcttggaggaaacattggccactttcttgttaaaaacaaagagagggaaactagatctgcctttgtgaggctggagcacctcatcaatgtattttttctgccttgctttatagtgttttaaatccgcctcggcctttgttcctgaatgagcacccgagaaggggagaaagtgactatctggccttagtatgtgtaacaaattatttaatgaacatttaaccaagatttgcaattcccctagttttatcttcccggtttccttttcttctgtgtgcccgttggcattttggtaatgtgctgcctctttataactctttgtagctcttttattacttttcttttttcttttaagtttgtggtgccttctttgatcctcccctctttcagtttccttttctccaatttcatacttatttccagtgatttttggctgcaacgcagtttagatattggaggccagcgtgattaaaccgaggccaagagtttgtattgccccatgacgatgtttctggaatgtttcttctgtgaacagtgatttttgtataactcactggacatgttgatttttccctgtgaggtgtaaggtaatgttttcctagcaaaaacaaagagggctgaaacctggtgctcagaatcgtttggaaacggaactcctctccctcttctttttacaccaagataaagaaatactttgcaaatcagctgagcacatgttcccagctccgtgccgggctctgtggtcatgggtttccttctttatgtcttactcatctaatgtaattttagagtgtgttctctttagataattgtgtgtctctgagcaaatcacttatcctctctggtcctcagttttcttatctgtaaaatgaatcagttaaccaagaatagccatcccttgggttaatagaacagtttaacttgaaaggaaataaaaaaaggagactaacatgggcccacagacattgtatttcataaattttggatgaaaactgaacctaccatcatttattaagagaatggatattttcatgtcagaaattataggaaggatacagttatgggatgaggagcaattcttttttttttttttttgaggtggagtctcactctgtcaccaggctagagtgcagtggggcgatctcggctcactgcaaacctctgcctcccgggttcaagcaattctcctgcctcagactcccgagtagctaggactacaggcgcgtgccaccacacccggctaattttttgtattcttagtagagacgaggtttcacggtgttagccaggatggtctcgatctcctgacctcatgatccacccgcctcggcctcccaaagtgctggaattacaggcgtgagccaccgcacccggcctatgaggagcagttctttcaatggaatatatttgacttcagggagaactcactcaaatgctgctgttactgtttttccctttgttggaagtgatggggttgtacttggaatgactggcctagaaaaccctacaggtaccatttaagctccatagttcttctgtgtgtgtttcggatcccaggttccaaacctgcactaaaacttgttgctgcatctcacctaatcgtgtagtgagccaggtgagctcatctgtgaaatgcagacctttctggacgtaccacctcgtggggtgaagggaaagaaatgatacaggtgtacatcagggtataagctgtcctagagtctggattctttttatccagaagccattctttcagcctgtgcctttttgtaaataccataccccatctatttccacaaaggatttggggcattagsgagtaaagggggaatatgttctagaagaagggcgctcacctcagtaaattgatgggtgggccacaaaaatcatgtcacaagatcttgttgatgtgcatgcattcattcattcaacaaatattattgagcatctaacataagccrggtgctttgctaggkacagaakgctrtacaaggtccctgtcctcatggggaccgtatgttgggaagacagatgataggcatggaaatgaagagacaaaccactccgacttcagcccaggaaggagctttaatttgagtaattgttttcactaattcatcttcacagaaagaaataatatgatcaccttcggttagtaaacaaaacaaatasgcaaacaggtttacaggctgaggtgggctggatcacttgaggccgggagtttgaaaccagcctagctaacacggtgaaacccttctctactaaaaatacaaaaatattatctgggtgtggtggagctttcctgtagtcccagctactctagaggctgaagcatgagaatcacttgaacccaggaggtggaggttgccatgagcagagatcgtgccactgtactccagcctgggtgatggagcaaggctctgtcttggggcggggggcagggcaggggaggggggaaagaagagaaacagctttacttacgtttttgatgagcctagcctttgctgtgctttggaaaatgggctgtggaatttggctgaaatagtcaaatgcgtagctggctgtatgtggactgataactgggcttattttgcttcttttagatctggaaagactaagcgcaaaatagaaatgctaatggtattgatgtgtttttcttcctttggtgtgataaaaaggtatcagtagggatcattcataaaactagttagtaaactatcagtttaatgtacaatggtgaagaaatacatacatcatacttgagaccatgttccagagagtattttgtaacctgtgacgctcttttcaagtcttagagaggaagtatggaaagagcatgcgcttttgactgaggaggtcttgggtttaaaggtcraattttgccacttactttctccatggccttggtcaacatcctgaagtctcaggtccttgtctgcctttgctttgacacgagatgttgcctgcctcaggcggttgttgcaaggactaaaatcaggaaggcctggaaagacttggaagcatttctgtcacatcccaggaactccgtaaatgccagcaagtgttagattattgtgatgattttactactcctattattgatattataattaatattataattgttcattattaccttataaaaattacttatgatatgtttttcttactatttggtgaacatcgagtatagtaccaagtgtatacttttttttttttttttttttttttgaggtggaatctccttctgtctcccaggctggaatgcagtggcattttctcggctcactgcagcctccgcctcccaagttcaagccattctccartctcagcctcctcagtrgctgggattacaggcatgtgctactacmcccggcaaacttttatatttttagtagagacagagttttgccatgttcaccaggctggacatgaacttctgacctcaagggatccacctaccttggcctcccaaagtgctgggatgacaggtgtgagccactgccaattatatacttattttaggtgtattatgctgtgccctgtgcttttctttgttatactggaaggtcatgatggcaggatgtcttatttatgcttctctgtactctgtcctgtccagtgcctttcagaagtaaggtttttagaaaggtttgagttatttcctgttttctgaaccagacaggcagagtatttgatcttacaaaaatctggctcagttcaagttagctgtgtagctttggaacggaccctggacagatggattttctaaaattacagaggaaactagatctgtaactctgtacatttactcctgtgccagtaacaatggcaatattttaatactgwaataaattttttcttatgcatttgctataaattagtaaatctgtgtaaagctgcttattgcatcatcatgtagaatttctacatcctgcagaagtttaagaaaattgtcttccttttacagacaaggacactgaagtttagaagtgctaagtaaactgtcttagatcacttagctagcaagtgacagggatggaattgaatctgtatttatcagaggtgaaagtatatgtgtaattattcaactacacttaggtaaatatccgcatacatgcatgcctccccttagactccattgttccaaaaggtaatgacaacaaaaattagtcggaggcggaaggaaatgcaaaagtggacatttactcgagaaagaataaagaaaccatgcaggattccatttcacaaacctctacagctgttgctggggagtcagtggaggggtactggaggaaggcagactttgttctaagctacttagcagccaaggaaagcagaagaaactattattattatttattattattatgtgagttggagtctccttgtgtcatccaggctgaagtgcagtggcatagtctctgctttctacaacgtccacctcctgggtttaatcgatcctcctgcctcagcctcccaagtagctgggattacaggcacccaccactacatccagctgacttttgtatttttagtggagacagggtttcaccatactggcccagctggtcttgaactcctgacctcaagtgatctgcctgcctcagcctcccgatgtgttgggattacaggtgtgaaccactgcttctggcctagaaactattattaatagaagttctgggacaacggccctgctctcattacttgcccccaatccatgcaatgaaatactggcctgtgagtatgtggtcccttcagctcattttctgaagctgaccaaaggagcacagtaatgcataacgggggagtaaaattcctcaagacgagcaaaaaaggcagaaattaataaaactctatgtattagttatctatcactgcataacaagttacctcaatatttagcaggttaatacaatgcacattcattattttatagcctttgtagattaggaaccagccattgcttagctggaccatctgctttagagtctcacaggctgcattcaaggtgtccactgggctggggtcaacttcttaccgacaaagctggtgccccaaaagaatggggtcttatcctgttgggtgtcatgaagccaacacacaaaaccgaaagtagtgtcaagyagtacaggctttattcaatggccatggaattgagaagcaggagcatggctcacaaattcacaaatcagcttctccactaatgaggggtgrggaagttaaaatatagactttgttgttgktgctgttttaatgaagaggctggacattaaaatcaaggggaggaataatcatgtcttctcttgaaatgggcagtgaacttcccggaaccagagtgttgccttcctttttatccttttatggctgcttctgatcattgtcatggtgattgtcaactgtcytggcgctggtgagggggctgtttagcatggaaataggattataatgacacctgaggtctttttgaagtccttgggtcrgctatcttgcttctaacaaatctcagctggtctggttacagagggaactttttatcacaggtgtcctgtttcttaaagataagcagtgttattacagggtagaaattcacctatgtcaagtaggcattataccaggtaacaatctcaagactcagcagggaaggatccacttgcaagcccacgtgsttgctggtaggactcagttccttatggcccagtggattgaaggcttcctttcctgcctggtgtttggttccttgccacgtagggatctccatcatggctgctggctttatcgaagcatgtaagccaagaaggaaatagaatccattggtaaaatgaaagtcacagttctttgtaatgtaaccacggaagtgacgtcttactgcttttgccatattctttttgttagaaggaaatcactgagtctgatcgttgttaaaggggaaaggatttcacagtggtatgaatcctgagaggcaggggtgatcagggccagctaccacactctacaacttgaattttgttttagatttcagtgccttttggggaccctgctacattgtggtagatttactcacaggacttgatgatttttcttgacctgcctgaagccatagcatttattacggataagtttgtcttttcttcgttctttttctgtttgcatcctttcgtcatccttttcttccctctttctggactgagagaggcaccaaatgcacccatttaaaacatatatgcatttctgctttctgatgggaggtaagatttagtcatttaataagaaagcttatgaaaagaataaacaaactggtagataatgtatcctaaagtcaagtatttgctttcatgttgctttagtagaaggggcccttgttaatcgatggcccaaattgtctttctcaagaaatgtgtattgcagaatttggatttgagttacaaaaactagccagaaagcgtgaactttttttttttttaagccataaagcttggtaaggctagccaatcatttcaaagcctgtgtagaatatctagactatwtgtaatcctaggatttgttgttgttttgttatgattttttttaagcaggaagctwaaaaaaataaccacccgttactttgctgcttttagaaaataggtttgagattgattttgaatactaaagtatagttttcatgttataaagccaaccatgttaaaaatgtataataaagtatctaatttagcaaaattcaaatttcccctatgaaatatcaagctctttttatgcttcttcacatggcaccttgtgtagaatttgaaccactttaaacattgcatccttgagttgcatatgatgggatctcttgaatcatttacattttgaaaaaagaaagtgaaatattctttaagaagccaaagtamtccacgagaatgtatggtgtttgttcagctggatatcttatttatttgaagtactgagagagaaatcttttctgactgctcaaaacagggaataataaacagtcagagtgtccaagtaatctgagctagaaagttccttctttcagagaaaagttataaaaagtatwtttgccggatccaaaaaaaatactgtgtatsaactmctgagacctgcataatgttttcttagtattctcactctttaaaagaaaaaagaaaacctgtaaaatttgggaacttaaactttttttgatattttaatatttctaggcaggtgagtgcaataagtctgttttttgatcttagaacataacatttcttgttggctattgtgtgtgctatgtgtatgatttgtctctttgttaattctctataaatataaaagagcaagtaatgaaattaccatggctgaattctgaatattaacccagagcagatttcctctaagaaagatcataagaagatgcttaaaagaaaacattatatttcaaaagaattaggttctgaaatatacccaataatgaaaacaatacaattttcttctgctttttgtccttcctgttccaagcactgggaaggagctggcatatttcttatgtatgaaaagtagaataatatattggattcctttatccctaacccggaagagtctttcttggactgtggtttgctttcccgttatacttaagcttgtttattgcatcttccgatgtcacattatctcattgccaagctaaaggctctgttgggttcttagttgaacccagagtggaggccgatttcatccaaagccattttttttaaaattagaaattaaactcacctttggcaagtcctcctgaccagggatgggtcctcatgttagtctgtaatgtgaagatatgaaatgtatttgatacaataggagattcactgtgattttcactgaatgagtatacattctgcagaactagaagataaagataataaaacaattcacatttcttaggactaatttattttccacagtccactaccaacatggtgggatggggaggagctgagaagagcatatttggctgagtttggttgcagaaggatgcaatgtgaggtagcagaaggggctgtaagaacacaggattttgaagttgaagaaaccagcctggaatgaatcccagcccttccttttagtgacctgctggccagccacattacctccttgggctttggattttctttttcactgtaaaatggggaaagtagctcccacatctttgggctgttggtgggaggtgtgcaggacacagctgaaacctttggtgtatagtggatactaaagcaatgctagtcttcttcgtgtgctaccagttagaatgaattttrctgacatcttactggtttctgagggtatacagacacttattgtcaaagatattattgattatctgatccccaaacatatggagttacatcacagcaggtgagaaatacccttcaactcttgattctaaggaaaatccttggggagccgccatcattccttccacgaaggaatgaaattataacgtaatgtattgttggagcccttagttcaacactgtcttttttcaggycatattaatgsaatggttagcatatcaacttccttctgtttttagtgactctaatacattatattcaccttgttctctgcatgttctttctttaagtcatgttagatcccttttttggaagcaggtcaaatttgaattaataaaatgatttatgttgaagtacaggcatatcccacagaatctcttaataccaggccaaaagtaactttatcttgatctgtagttcggacatatttcttggattgtccgcactcawaaaaagagattgcgtaacaccctttgaacaaatggatatttgagaaccatcctgtcttcagatttagattttttcaatttttttttactgtcatatgattcacatgctagttactgattgctatcatgcagtctgccagcagaccagatggcagatcttttaattagatatgtttgtgtgtgtatgcatgtgtgtgtacatgtaatcacagttcatcaaggacctaataaatacttttttctctctctctctttttttttttttttttttgagacggagtcttattctgttgcccaggctggagtgcagtggcggatcttggctcattgcaacctctgactcccaggttcaagggactctcttgcctcagcctcccgagtagctgggactgtaggcatgcactaccacacctggctaattattatgtttttaatagagactaggttttaccatgttggccaggctggtatcgaattcctgacctccatgtgatcggcctgccttggcctcccgaagtgctgggattacaggcatgaaccactgtgcctagccttaataaatacgtatttatgtctttcgatctttttctgtttttctacattccgtttcccctatggctgctattgttttccagtgagctatttatatatatatatacatatttttgagagggaatcttactctgttgcccaggctaaagtaccatgtcaagattatggctcactgcagcctcatgagcctcaaccttcttggcctaagtgatcctcctctctcagcctcccgagtagtttggattacaggcacctgccttcatgcctggataattttttgtatttttgtgaagacgggtttcatcatgttggccaggctgcagctatttatatcttatatgtgtatttgtaaaaaatttattcctcagccctgtgtggtagctcacttctgtaatcctagcactttgggaggctgaggtgggaggattacctaaggtcaggagtttgataatagcctggccaatatggtgagaccctgtctgtactaaaagtacagaaattagttgggcatggtagcggtgcctgtaatcccagctgcttgggaggctgaggcaggaaaatcgtttgaacccgagaggtggaggtggcagtgagtggagatcacgccacagcacttcagcctgggcgcatgagcgagactatgtctcaaaaaaaaaaaaaaaatttcttattcagttgatttaagatggtttataaagacaacatgagctagcggtagaaatgcgaatggacgcttgtagacagtaaggactcaatacgtgggtttgttcaagttatattgtgcagacaggcatatgcagttagaaaatctgtctagggtagggagagataaaaccagctacttcagccctgctatttttatcctgaagattttttttttactctgtttatgaataaaacattttaatcagtgctgtatcaacactgatcaatttttttcatggaagtgtaatacagggtgaattccattaagtcaattaaatacttagatccagtttttaaacagtgcgaagatagttaagctcttcttttattgaaagcctttttaccaaaaccatttttttttattttatagtgaagatttcatgtatctgttttctgtacatgccaagttttacagctttttgtatcatgagttttcttttgcatcaattatttctaccaagtccaacttgtagattgggcagatctggatttcaccacacctggtttttgttgtcattgagtttttgtgatggggtgatttcagtgagaaatatatgccattaatttgatgaaaaatcagtatttatttattaactaatacccaagaaattccccagcaagcctcttccagtattctagagtttctcgtttcttgaggattggtctccgggcatactcctaatctaattgtttcccaaactttcaatgttttggatgactttggaagccttgatttctgtaggctgtagcaggacaaattctgatggacagatcaagatgttctatgttgctctaaaacagcatctctcaaacttttttggaccactatctaagttttttctgttaaaacccaatacatttatacttatgtatattcgtgtgtgtgtgtgtgtgtgtattatatgcatgtgtgtgtatttgtctgaaataaaagttttacaaaatgatacttttatctgagcagtgtcctgctgttttttttcccctaggttgtgtttttgtgtttttgtttgtttgtttgtttctttgtttgtttttgagacagaatttcacttttgttgcccaggctgcagtgcaatggcacgatctctgctgaccccaagctccgcttcccaggatcaagcgattctcctgcctcagcctcttgagtagctgggattacaggcatgcgccaccatacctggggaatttttttttgtatttttagcaaggttgttgatcaggctggtctcgaactctcaacgtcaggtgatccatcctcctcagcctcccaaagtgctgggattgcaggcttgagccaccgtgcccacctgtgttttttgttttgtttttgtgtatgtgccaatgatgacccagtttcaataccaactgttgctttcaccacccactattggtttcaccaccccgctagatcacagtctgttctttggcagtcactgccccaatactgtttgatgtgctcccctctgataaatgttcattgagtgccccacatgtcaggtactgacttaaggcatagcaaatgcaaaaatgagcaaggtgttctcttggctctatgggtgcctaccttagaaggatggagatgggaagaatgtgaaagggaggtgagatgagcagcactgggatgtgtggcttttctgtcttgaggatagatagaagaggagtcagataaagttgcagaacagagatgacgtctttactgagacttgaatgatgtgtcggaggcaaacatgttgacacaaacgagagaattttaggttctctttgtagctgtggctgggctgggacaaggacgatggacaaagttatgggggtgctaaaaacctcagtaatgaagataaatgatattctaatctaatattttaaaaaatcgaggctaggygtggtggctcatgcctgtgatyccagcattttgggaggccaaggtggacggatcaccagagttcaggagttygagaccagcctggccaaaatggtgaaatgccatctctactaaaaacmcaaaaattagctgggtgtgtggtagtgtgtgcctgtagtcccagctactctggatgctgaggcacgagaattgcttgaacctgggagtaggaggctgcagtaagctgagatcatgccactgcactccagcctgggttaacasagcaagactctgtctcaaaaaaaaaaaaaaaaaaaaaaaaawtcaaaattgatgcaaaaaatatgataacatttcaaaatttaaatcaagacaaattcaatattatagcaaaggttcaagtaatgaacatgaatttgtaatgatgcctgggggaggtgaaggttaaaaaaaaaaaaaaggccaccaaggacctcatgttaaagttgatgatgacggaagtgagcagtgatgatgagatttaaaaaactaacttttatttttacattattttaactagtatttgtgttaacattattttaatctcctgtgcacttaagggagctggcataggccggcagtggctataggccaggacctgtgctatgtagcttatctatttctcatgctgattctacttttgttactaccgaaggagcttagagggaatcagtgacgtggacaaggctatgtaactaaagggggtggaggaggattcaagccccttgcaacggactgaagtgcccaagctctaaatccctgccacccacagcctctgttggccccaggttgtgtctgarattcaraggttgtttttatagcagcaacacagtaagttgggaagagggacacatttttaacatagacaccaaaagagaggctggaaragttgaccacttaraaatgtcacgagtgtctgtgaatagtgttgggggctgagaggcaaragaagaaaatagtcctaatgttgtacaagtagcaatggaaacaaacttgttaaaaaaaatttaattttgtttatgcatgtgtgcataaacaaagcaatagaaaatatttgatatttaagattgagcacttaacaaaatactttgtctctttttggtttgctgtcttaagcaatagccttaaattcttgtcccagggatacctgatagagctaatatagaacaatattttaacataatttgaagtatttttttcttctgatgggtatgtagttcatttttataaaaaaatttaaaaattctgaatctgtggtgtttctgaaacatcctgatatattttttgttgatgactcttaacaaaggatgtaagacagattctaagaagagaaaaggtagaatatccacatgtctcagtttcataatatgtgtaaaaattatcatgcccattcattatttaaagtgctgtggctttttagtgaataccaacattaacaaaccatgttaacaygatttaaaatatgtaatgaaatttgcaatgcatcagatgatggaactatcaaattagttcacgtggcgttggctgatcacccttatgaagagttacttgcattgtttgaagagggaagatgcacatccccttgtgggctggcagcatttttgctaacactgccttaaatgatgctactggcaggatggttaatttgatgttgaaatgtcacacaatatgtgcccaccctacgatttgaatcttctgtgccgttaagggaattggcagtgttcagacagaatggtaacattctctctgatcgtgtctgtgtctgcacccttttttgttttgtttctgttgtcttcattaatagacctttcaggaaccttcctgggatctcagataacagttcttctggaacaggattatccagaggtagcaaaagctctcctgcaaatattccattgcacgactttaaataaagcagcaagaagtcttttcattcagttcagatttgctacttgttctcttggttccttcaaagtaatgactaagtacaggtctttagatagagagctgcaccaaccaggtattgcttcgtgtcttccacgtacgtcctgagaaagcgaaggtgaatttcaccaattggtaggtggaaatagaaaaactgttgattctttttttcattcaccaatcttttttttccccaaatgctaagctttatttggggaaatcttaacagccgtttttataagactctgcatttacaacatttgtgggggctgcagaggacgcacatgaaaataacatgaactggccatgtacggtggctcatgcctgtaatcccagcactttgggaggccgaggcaggtggatcacctgaggtcaggagttcgagaccagcttggccaacatggtgaaacctcatctctactaaaaatacaaaaattatagctgggcgtggtggcgggcgcctgtagtcccagctacttgggaggctgaggcaggagaatggcctgatcccgggaggcggagctttcagtgagccaagatcgccctactgcactccagcctgagcgtgagactctgactcaaaaaaaaaaaaaaaaaaattagctgggcgtagtggcaggtgcctgtaatcacagctatccrgaggctgaggcaccagaactgcctgaacctgggaggcggaggttgcagtgagccaagatggtgccactgcactccagcctgggtgacaaaaaaaaaactttacctgggcttagtaagttgcctgacttctcatcctggagttcgkatccccttgtttctagaagagaaatccctcagatgtgaaggtgtgttccatgattttgycgaacttgccctacatactgttttattatatattctgcccacttctattccctgccaattaattaattgtttcattggtatagtttttttttttttttttttgatacagggtcttactgtgttattcaggctagagtacagtggcgtgatcacagctcactgcagtcttgacctcccaggctcaagcaatcctctggcctcagcctcccaagtagctgggactattggcaatgccaccatgttcggctaatgtttttrattttttatagagacaaggtttccctatgttgcccaggctggtctggaactcctgtgctcaagccatcctcccacctcagtctcacaaagtgctgggattacaggtacaagccaccatgtcaggccattggtataccattgtttttcttaaacatttatttattttcttatatttacagcatatgtggtcatttaaaattattttatagcatataaaastaaaaagaatataaattaattttttagcattaatattagggaagataatctgacatttaaaaatacatgtctatatgtgtatacatacatagaagtatatatataaatacmagtactagtgtctgctaataggtggcgccactttttatctgtgtgtgttgggggtggaatkagcatgtagaggttggcaaaggggacaggagactgtgggatgattagtatattcttatttggcctgggagggaaaaaaartctttcatttccaacaatattcwttctctgtgtcacctcagcatttaatttacttccgtcacaaaactacttgaagttgtcccaggctagttggtcctattaattacaacctagagggattctattartaaactaatggattacagtacctaaatggaagccagcagatgactttggaaggactgatccgcaagggccttctgtgtgaagattaaatgaagcttcctttagccttctcaggtggccacagtttcccataaccttagagattatctaggccaaggctattaatttagagattaagaagccaaacccagaaaggttgaaagactgtcgtaagttcacactgaaagagagtggtgtaatgcccttttcaccaggctccaagaaatttgcctattttatgttttaacggacatggtatccccagcatttttaataaatgcccttttcttgcataagtaactggatatttccgagtggcctacaagtggagcgtgatttcatctttcatcaagagaagcagcttttcctcctcttgtatccgttttcttccttttctaactatcaaggtcatgcggtatstgccattttgcatattcttgctttgcttcatgttttccttaaactctgtgcacatgaatatttgtggtatatggcttaattgtaagcgatcaggcatcaatggctttttatgaggcaaaatctactttctrcatttgcgtgtgccattattatagattgctgatgtttgccaatggatattcttggaagtcgtcttctggtttaaatgcagttaagtatttaaaaataataccagtgacatgtttgcatttacattcagcctgaaggcctacttgatgctgcaactgaaaaattgttagactagattttattttattttaattctttttgagacagggtcttagtctgtcaccyaggctgctggagtgcagtggtgcaatcatggctcactgcagtcttgaccaccctggctcaggtgatcctcccacctcagcctcccgggtagttagggctacaggcacacgccagcacacccagctaattttttgtattatttatagagttgggtttttcaccatgttgttcaggctagtgttgaactcctgggctcaagcaatccgcccacctcggcctcccaaagtgctgggattacaggcatgagccactgtacctggactccactatgccttcccctccccttycctcccttccccaccctaaagagtctcgctcttttccccaggctggagtgcagtggcastatctgggctcactgcaacctgtgcctcccggattcaagagattcttgtgcctcagccttccaagtagctggttttgcaggcatgcaccaccacacccagctagtttttctatttttagtagagrcggagtttcaccawgttggccaggttgttctcaractactgacctctcctcggccttgcaaagtgctgggattataggtaccccgcctggctgatactttccttagttgttttcagtgtaataacctgtcttcagtctactytwtgtccttttctctcctttcctccctgaatactcaagcttccagtgcacagatttctccaaccctgaatgtgactgataccaacaccatactagctcttccacagatgcctgtttgttttgcagaacactggcctgaatgactcagacttggagcttgaaagagggagaactgatgtggcctgtggcagacgtgtccaatgacctgctgtgtccttgcttttgaagaactaaagagtagacttgaccactttttaaacatgacattcgatccacgtggcatagcaaggatgggatccacaagatggagtgatctttacgccatcctcctgaccataaatactaaaygaatactctatttcagttgagtttttagtttgctctgttacgtgaggacacatcacttgcacctcagtgtgagtttgaaagtgttttctctggagaataattytgaagaaataggccctccagatatcrgtagtgacagggstatcagtaatgttgattactaagttcttgccacaggtagaagccatgctactgcacaagtttcatacttgaagagtggacatctgacacagtgttggtggttgttgaagtgtatgactattactgtgttgctttggaagcttgatgccataacaaaagtgcagaattccatgtttgataactttctgacttgatgaaaatgaattgtggatacagatttcactatccatgaattgtggccttaactttctcatgtacttactttaaatcagagagcccacctgtccaattctagcttctcctgggcatyctgtatttgacacagcccctcccagcattctgagtcaycgtctgctgctcttgcactgtccgttttccaaatgaggaactcatcggtaaggccagaaaggaaagggagaaaaaacaaacaaacaaacaaacaaaaaataggaaaaaaagaaagagcgtatttatagatggtagagaattctgggcatgagaaacccagccaaacaagtrgaatgtgtgcataggtgggactgctgatcttgttttatgaaagaaataaaggcaagtcaaacagatcctttcgcaaggatccccatgtgtgtatgtctaacccagtgacaggtaaggcagccaggagctgctgttatttcagtgcaaagctgttttcacaatcacagacatgcacagctcaraaaccctcacaggtcacgcctgaataccttcaatgtgccccatgtaaaaatacactgcaagtcgattggacatgccctatgaattataccttatttatgatcgtcgagccctcccttttcccgtcatgctttagaattatgggctggagcagtttttaatactctatttattttaggggaggaaaatgtttttctttaaccacaacattcatgcaataccaactgctggcagtttccccagcatttaaggaaatattgttgtaagacttttatgttctgtacttcaatcagctagagccagcagtatcccaatggaaggaccctcaacagaccattttcagcattttgctacaattaaactcctctggttttagccctcaggcaatttagtacctttttacatatgcacattatgaacttttgaccagggtctagcagtcatatattagaatgctgctcttgaaggcaggcttaacaagttcctctgagtattacagttggagtcagttgtggaaaaggtaatttaagcaacttgcagcgaggccattcagaatctcagcgatgatcctaaatatctttctctcttgctcacgctcttttttttttttcttgtttcctctggaagctggtagcaggagctttcaaagtctgtgattgatcttttattcagtagctaacgagggctgtgattctattagcgcactacaaggcaagagaacagtgatttaatgaagtgtctagtgagccggccatagatttatcctgttgtcgctaatttgcagcgcacttgccagcataaaggaaactgcactcacactgctattaagcaggtatttccttagtaaattgttgtaaggtcaggtacagttatctgagcaaaagcaatgccttacctcttcagtgtctgcaaatgacagccgccgtgctgagcgctcactgaagtggaaccgggagatcagaggtccgtctccaagtcgcccttagcggaggcaggagcagatgaactgccaagtaggagtaatagagtcataattggtgattagaactggaaaggtgcaataacatcttaatacaaactggcgtatgttatagttactgtcagttgttgtaaactcgtcctgccgcctggactagttacgcttcccttgattagctctgagaaacraggcagcgggcactggggcagccacatagacaacatcyaaatttttgttgctttcctgggtcttgccctgtccttactgtttcccttgggcacgctgttcaccccttaggacatactacagtaaccttttcccaccaccgtgggaggactgtgattttgtaaatgtcytctgatctctcctctttgcaggcgcagtgacatttatgcacactggctttgaggctcattgatcttttgttttatttgcctttgctgaggcaggggcaggtctttgtttcatgtcagatccgtatcccactgcaattctgtgttactgtaggagatttggggttggcatgccagagtgaaaacgcgaaagaaaataaacaggcagcactgaggaattatacacttgagcttggcatttttcttaacgcagggctattttaggtgcactgcgcatgttggaggtgcccttgcaggtataggtaggcattgtccatccrtggtaaaaagcaatagaagaaattcttacccgatgcttaatgaattgccaggctggttaaaaaggataacccttgaaacctagggtgtccaactgctaatttatatagactggagatatttccatgcctcgcagcaaaatttttctttaaattcacagaagcagcagctatccagcattgtccarttgtgctgagtagctgtcattattgataaacatgtaactggtcatttgtattgttttgagtaggatatggcttatcaggatgcatagtagagaaaaatgagatgaggtaatgagatcacatacactgaagcatcttacgaatctggcacatagtaggttctcaataaatcttttttgattctgtgactgttagaatctgttggctgatactctgtcatctggctctcactctgctccataaaacttgggtaattctaatgcttacttcatcccagggctgatgtgtgttaggttagggtttatgatcaagtaaagagtttaaagaagtgttttatgagggagttytgtttgcaaatgatcacctggtaatttaagagggtgagctaaacttcctcmttttctagtatggacctttggggctcaggatgaggatgttcamtttgtactgctggtggagctgcctttccattaagtgagtctttctccaagggaacagaagtcttaggttgttgatctggckgtcagaacctaggacaggcaaggcagtgggctgttgtagagkagatgaagctgatcagagcacacccacaccagtgacaaccggtcaggacctgggaagggctctgacccattcatctgagagatgtggcatgaggaacactgagacctaatgcttattgcttaatattgtggacaagggactctgtgggttgtctagtactaagcagaatggaagggaaggatggaaggaagagagggagagacggagggagatggaggatgacagggagatggagggaggcaaaaagaaaaagggagaagkawagagaggaragaggggaagggaggaaggaaagaagagagagaaggaggaagagaggraagkaggcacagaggtagagaggcagggagataatggagatcctggccaaaagttaatgctccgtttctagtagtccacagaaagcaccttgaccaagtgactgaatacaaatcgtatcacaaactactaggatttcttgggtgcttaccatgtgccatatttccttgaatcttcatgacgatccttcaagggatccttgttttctaaagggtaaaggtgcaggttagaggctatgtcagaagcaagtcaggatttgaaggcagatctgtctgcttttgcccctctgtaaatccagagctgctgcctcatttcttacrttgcccccacccrtgcagcaattcttcctgggaggcctcattgttcatattcataaagggccccattcagtctcctttttggagaaatggccactgcaactctctgttctgacctggggggaaatgttagaccctcaataaggagaatcagagaaagaagaaataaaacatattactccattcccatacttctgtgaagaaatacccgagactgggtaatttataaagaraaagagatttactgaactcagtcgtttcacctggctggggaggcctcaaaattatggcagaaggcaaaggaggagcaaaggcacatcttacatggcagcagacmagaaagcgtgtgcaggggaactgccctttataaaatcaccagatctcatgagatttattcactatcaagggaacagcacaggcagatcccatggctttgactcagttacctcccactgggtccctaccatgacacatgggarttctgggaactacagttcaagatgagatttgggtggggacacagacaaattgtatcatagaatcataaaaattgctatttctaaggcagatgaataatcctggttggaaatcatactgatttagacttaaaaccattcagccttctttaccatttctgaatgtggccctgagggaggatttgtcttttgctattttctttttttaagagatggggtcttgttgtgttgcccaggccactctccaactcctaagctcaagcagtccgcctgcatcggcctcccgaagtgctgggattacaggtgtgagccaccacacccagcctgggggagggtttgttaaagaactgtctgttttatcacatgaccacaagttaaaatgttgggcaatgtccctgaatgataycttttcattagtractcacatggacccataatctctgaatttaacatgcttttcaggaatgtgttcatattttccacctataaaacctgttttagtaatttactcccttgtaaatgttccttggtatgtaaatttagcatatttccttttaattgcccaggtaaataatacccaccatcagagggcaccagtagtgtaatcaccttattttttaaaatgtattctgtgtttcatgattttttctgaataactgatctttacagtctgaattgcattctgttgggcttgacttatttttaaattaaaagagactaacacattaaacactaagaggtcacataggatattccatttatataaaatatgcagagtaggcaaattcataaagacagaatacgcatcggtggtttctggggcggcggggagtakggaaagcctgttaatgagtacawgtttctttagttttttttggttttttgttttttttttgagacggagtcttgctctgttgcccaggctggagtgcagtggcaccatctctgctcactgcaagctccgcctcccaggttaatgccattctcctgcctcagccttcctagtagctgggactataggtgcccgccaccatgcttggctaattttttgtgtttttagtagagacggggtttcatcgtgttacccaggatggtctcgatctcctgaccttttgatcagcctgccttggcctcccaaagtgctgggattacaggcgtgagccattgcacccggctattgggtacaagtttcctttggggtggtgaaactgttttggaactagaggtgatagctctacaacactgtcaatgtactaaatgacactaaattgtacactttgaaataatttatgttatgtgaatttcatctcagcaaaaagaggctaacacataaggagacatattttgatacatgtggcatattaagctgctgytgttgttttttaaatattccagctgcgtgcagtggctcacacctgtaatcccagcactttgggaggctgaggtgggtggatcacttgaggtcaggagttcgagatcagcctggccaacatggtgaaaccctgtctctactrtaaactccgtctctactataaatacaaaaattagccaggcttggcgctgggtttctgtaatcccagctacttaggaggctgagacaggagaatcacttgaacccgagaggcagaggttgcagtgagccgatatctcacctctgcactccagcgtgggcaacagagcgagactccgtctcaaaaaaaaaagcacaaaaaatttttttcttccatctgtatcacacagttgcaacgttgtagcatgggcaggaaataattgggttgtatgtaatgcccagtaaagtaaacagatcttagagagggacaccgatccctaccctgcatggggttattcacagagccatggggacactaaacgtaccttatctcttgaccatgcyattgattagttatgtgtttgcctgtgttattaataatgtatacattgaaaaatctatgtgcattatagtctttgatcttgtcatgaatttcaaagccaaagattccattttccttctttttaaaaaaaatttttcaaagaggtaggctggaagtaaatttaaaaattttcccctttctggcagagggcttttttctgatcaccacccatgttaattagatatgcatgtatgtgtatgtatgatgtatatacccatatacacwcagtctrtatatacwtgtatgcgcacatacacatattttaaggaragaattataaaatgatcaattcaagcttactatatgctagaggtgaggaatatttgaatacaagtcttatctagtagattaaaacagaaattaaagactgtagactaaggcaggatcaaaggacctcttttcattgttcttttattgtttattgacttcaaaaaagactttttagtttaaactgactgtaatgtctcttgaatggtcttttgtaaaatgactttgaaaactcggggataatgtcttcattaagtggagaaaaatcttggggaaaatataactgtaacttggctttcattagagtagaaagagataaagctttgcttaattaatgtctgttttccctctgttcagaagtataaggaaaaaggggactgaaattagtgctgataaaagcttgaattagacattatagcactgaaacttctttttcttccttacttagaatttggaagaacatacttcatacaaagctatgaagcatattggaagattttaggtgccctgtcttcctggatataaaatgactccaaactcagtgatactgatcrccctggcttcttttccacctttctcacttcattgtctttttgtgtgtttctgacatctgttgacaaatgggcaatcttggggatggggggttccactggtatattttctttactgtttaagaaagctcaaaattctctctgctcttttccaagccaccaatcaaaactgacaytttctaagtgtcctcattgccctctgggaatgttcatggcctctgggagtccaagaactacctttacactggatcttcactgcttttactattgtgtggctttctaccagttctctgctcagcttctcttttctggagacctgatatgctttgttagcttagcatgctgttctaggctgcctttcttttttttttttttttttaaacttcatggtgagcagaacactgtactccagactgtgaggccccacctgtgcagcctgctggcttctcataccagcttccttctcaccttaaccccacgtattgttgcaacggcaaaaaagagaattgcacagaggaacaccacctatcagagttcacactgagtttgcagattcatccttttgcttccagccatcccatggaatgcygttcttggaagggtcatctcatggtccattgtcggccctcttagaagagatttcaggccttcccttgtagcttgatagttacagggagtgctagggtaagtggaaaaagcacatgacttggaataaagacttagtacacatcccatgtctgatttatactaactagttcatggacctagcctasgttactgcacctgtttgagcctcagttttcctgtctgcaaaggagggatgatggtacttacctcaaagaattgtagttggatcaaatgagttggartgggatacagcaacaatctatattctgatttcagcaacactgtgcagtgtaattccatattatattayaccacatcttctgtgggtctttctttgrgggaagctaacattttaaaaggtttccctttgtaacctgtaaccccctctaccccaaaagtatattcaagagcgaaacttttggtatgacgatgtcttacatcagtagttctgaatgacttgacttagctatctttcttgagtctctcaaaagacagatggatggatagattgattttgttgtaacacctgttcagttttgctggccttactcgttttcaaatactcaaatgccattgagtcagatttcagaggcaaatggtgatacctcaggtttgaagttgcaagaagtcaccacatgcttrttatggaaatcgtcagggatatttattccctctcctgagaagcataattgagcctccaaaccacccatcaagatatccacctgtaaaatatttaagaactggtactatgaagacatttcccttatgcaatttgttttccatctaagagcagaacaaggaaaatatagctgactataagttacaaaggcasactcttaagctacaaaatacatctcttcacaggagcacttggagaagggctgaaggcaaaccaaaagtgagcaacaaggagactagtgttctgaaacagagatgacaggctccgcagtgagggtgatgatggtgttacgaattacccattcagtttaaactagacattccctggaagcatgtcatggggtgtgcagaagggcttttggataaaaggggtctagttaagagatgttaaaaaaacaaacttgaaaagcatagcaggctgccaggacatgtctgagtaccgcgcagatagtggggaatagtctatggattctgcttacaccatggacaaccaggctgggccatgggttgtgttttttttcctctcattttatagaaatgttaccaggcatattttccctgtttccctaagaagagcttcctctcagtgctagccagccacagggccaagtgacacctagaggtgatcctttggttatttgctaaacagatctaagacaaaccgatatctgtaacctgggattagatagagccaataagatgtaactgaaattctcagggattctaagacatctacattgtatgttggtacgttattgaaggtgatgctagctgctataacaaataagcacgcctgtgcacagttgctcaaagatagtagaagtttatttcttgtttatrtaagatccataatgactcttgcyaattagcaggctgctctcttccaagtggtaacccagggactcaagctcttttcatcttgtggctcagccrtctgacacatgtggcttccagcactgccctgctgttgtctgcacaaagctggtggaagaagtaggaatttgcaggaccatgtgtggagcattttaaggatgaggcctgggagtggcacaaatctttgaactccaggaggctaggaaacagagcataaccttgtgcccaggaagatgcggggcatagtacatctttgcctcacctgatgtattgtttgtttaaaatcactttggattctcatttaccttttccccctcaagatctttgtttttgactttggagataaccagaaataactaagcatgcttcsttccctctacgatttcatcctcatggggaagcaagaccccactcttttattttcatgtatgtatatatgtatgtatgcatgtatgtatgtatgtttgagacagaatcttgctctgtcgcccaggctggagtgcaatggcaccatcttgacttactgaaacctcctcstcctggattcaagccattctcctgcctcagcctcccaagtagctgggattacaggcacgccaccacacctggctaatttttgtatttttagtagagatgggggtttcaccatgtgggccaggctggtcttgaactcctgacctcaggtgatygaccyacctcggcctcccaaagtgctgggattacagtcatgagtcaccatgcccgaccagcaagaccccactgctattgtccagtgtggtaggtacctttgcctaccttctactctacaggctggaacaggtgatattgtgcctacttcacagccttcctagcaactgaggatggctgtatgacagattctagccatcaagtaaaatcagaaaccaacagcacgtttccttgaataccttttgctttctataaaatggtgtggcattgctgstattttcactcttccttcctaccctggatgctgatttgatgcttccagccttagcggtyttcttgcttctaggactgaacagggaagagggaaaagtcaaaagaatgacagaaggtcctcacgttgcagaacactgaccaatgttggcaactacaagacaatcaggcgtgattcttcatccaggatctgcttttccctgtcctgccaattcttgagctgctaataaacattctgatgcaaacatggaatacagatttcagagggattctgggtagccctcggagatgaggatgctttgcgaatgtaacaggcatctctcacctcatttgtctggtggaatgtttacaaatgctaattaagttttgcttcaaatggggaacagtcctgtgcagtgtttctaggaagttaccagcttcatcataggaagacgttctccatcgtttggatctttttcaccagcaccttttgrttgtggtggtttgggatgtgatgatctcagaactttacatcctccatgaaatctctgcagcgatagttgaatgtcttgccttttctattattgccctttttcttctgtgactttgtactgagacacatttatattagggtaatggcctcatgctatttgaaaatctttatttgggccacattggttggaagataaaaatatataagcaatagtccctgaacatcatttggcctgaactaggctagagtttctcttaatcaaaataataacgatgatttttccatgccaaggagtggtgtcrtatcatgaagtagatttatgtacacattaaataaacttttacattttaatgtaccaatttgcaatttttttttctattcaccaaaatattccagataacggttatcagtttttgattctacacatacttcaaatactattaatgcaaaatccttctttagaaatgttacctaattccaatgtttcactttattcagygaagacattcctttgattattctggttaggtgttatgatgccaatttgcccacacattttttcttaggcgcctatgcttgcagtagacagagagttgaggaaagctcaaggttaaaacaggaaaaagtaacacagtaaatacctatttttgtgcataattcaaattaaaaccccaaccacctagaagcaccaatacaaggaactggctgcatattgcattcctgtgacctgctgtcttaatgatggaatgactaacgaggatcagagggaatgtggtcagcctcttatctcataagccaaatgctgcatattccaagcctgtcaattctgaaagcccttgttcatttttaaataatgaaaaactttggggccttgttcattgtttctaaaggaagacatttagaaaatttagaatataaatttctgttagtagaaactaatttctcttgcttttctctaaagtatacttgatttgaaatatgtgccctgaagttttgctatgttgaaaaaaatgatgagccgggcacagtggctcacgcctgtaatcccagcactttggaaggccaaggcgggtggatcacctgaggtcaggagtttgagaccagcctgaccaacatgttgaaaccgtttctctactgaaaatacaaaaattagccaggaatggtggtacacagctgtagtcccagctacttgggaggctgaggcaggagaatcgcttgaacccgggaagtggaggttgcagtgagccgagatcttgccattgttctccagcctgggcgacaagagtgaaactccatctcaaaaaaaaaaaaaaaaaaaaaaaarwttatgtcatttcgttgtcacagcgtcagcagaataaatcttagatcaagatgggattactgcgccactcccttcttcccagtctgtggtttagcacgggaaaaagcaaactagggcccttgggccaaatctgatctgcagcctgtttttgtgccgcctgcaggagaacatttttaaattgctgaaaaaatatgaaaggaaaaatatttcaaggtgtgtgaaaactacatgaagtttaaacttgagtgtccttaagtaaagttttataggaacacagtgttgcttatcttttatgtaatgtttgtttgctttgagaccgagtctcactctgtcacccaggctagagtgcagtggtgcgttctctgctcactgcggcctgcatctcccacgttcaagcgattgtcctgcctcagcctcccaagtggcttggagtatagacacgtggcaccacgcctgggtaatttttgtagttttagtggagacaggatttcaccatgttggccaggctagtcttgaactcctgacctcaastgatagacccacctcagcctcccaaagtgctaggattacagacatgagccgacctttttatgtattgttgatacagtatgacaagggaagagttaactgattgcagcaggttagagcacagcatgaagagctgacaatattgaccgactggccctctcagacaaagtttgccaacacccaggtgagcagatayacttatctgtgagcagacgtgattcaggggagattgttgtccctcctttcctaagaaaatgtggaaagatgagaatgttgccaccagtgctgatatggagcgttttttttggaattgtcttaaacaagtcccaaccttgactttgcctgtgtaccctactctttactcccaggtctttgcaaggtaagctgtcaggtgttagctgaagatacggcagcccaccagtggtcccctgaatgccaacaagagtcacctctaagatgatccagctgttgcatggtgtagcatgcctagtccttgcagcacacacgctgccattcttcttcgccgttgttaccgtattaatttagggatgatgagaaagtggcctccctttccctgttaattccttggaggaacttctgttcgaaatgaatagtcttgaaatatgtcataaagttacctatcaggaccacttttacagagatttaaatgtgataataagaataaaagaaaatgaagtgacattgaggacgtcttcttttataacagctctaggtcttgcctgttaagcacgctgtaaaatgactgttacacgtttatggattgaaatggttctgctgaaattttaagtgttaacattgttcaaattttcattactaacacctctcacattgttagaaaacagtttyatgtttgacattttgatcatactaacctgggacattttatgctaaagttctcatttcatgccttaggaatcccctgcttattttgatttcagcacctttctgtaggacgccaatagcttatgtttgcacatcttaccccgatgcactctctaaaccgatcatcacagaagatattttgtagtgatgaagaaagcttaaatgtctcatttgtcagattggtttaggtagaaaataaggatttccaccccytcatcgtggttcccttttagattttcttgtttgcttttctttaaagctgctgttactcaaacgacagtccgtaaactgcactttattttttataacagctttattgagagataatttacatgctatacaattcatgcatttaaagtgtacaattcaatggctcagtctattcagagttgtgcaaccattgccacagtcagttttcttacctgaaggagaaagcctgcaccccatattttttacctcccattctccacttcaactcttccccagcctctgcgaaccgctagtctgctcttcatctccatgcgtttgtatattctggacatttctcattaatgggctcacacgatatgtggttctttgtgagtggtcctttcactttgcatgcatcatgttttcaagatactgcacctaatttttcagttccttgttttttcttacaaatacatttttcaaaatgagtaaacatatgtacaaaaatatttaatttatttaggcacgccaggtttatgagattcatctttgtagccaccaagagccactaacagtgctaacatagccaggcattctaaatgtgtttgtcaggtgcataaatctgtgactgataaaaccactgctcattacttggttcttaaactctccctcaatatagctgtagggacatgcaaaacaaaggctggctcattaataggatatgtctagagttctgctttagaaatcataatgtggacatcattgatttctctgatgctggaagctgctgctgcttcttcatctttatcttctcctccctgtgtattgagagcagggacctccttgtgctgttttgggctctccttgttcacccagattggctgcatcagcaccttcttaaaatattagtgttgctgagataggagcttttggtagatggataaactgggatttgtaaatattttgcttagtttttttcccagagttttgcagaagagaataaggtgttggtttgttataaggtggtcctttataaagtttagacctattttaataaggctgacttgggttgaagataactagagccatgacttycatcttgatggacaatgagtactcactctacttttttaktttatatttttattttagttcatttcatttaagacagcgtctgttacccaggctggagtgcagtgacatgatctcrgctcactgcaacctacaccttctgggttcaagtgattctgatgtctcagcctccccagtagctgggattacaggcatgtgccaccacaccggctaattttatgcatttttagtagagacgcgtttcaccatgttagccaggctggtcttgaactcctgaattcaaatgatctgcccacctcaacctcccaaaatgctgcgattacattttaaaactctaccttttaaaaattagaacctggacaaagaggtattaaagaatgtgtctcttattaatttattatggtaatgagaagagtttggatttggacctacctaggtttttctttcctccagctccgccaccccaactccttactcatgcttcctctgtaaaatgatcactccccagtttgacaggaattgcccctggaatcccatctggtgttctaattgttaccaaatycaggcaaatcttgcctgtgatacaggtggtgaagctactggatagaactggagcatctaactggtgtgagatggtatctcattgtggttttgatttgcatttctctgatggccagtgatgatgagcattgtttcatgtgtctgttggctgcataaatgtcttcttttgagaagtgtctgatcatatccttcgcccacttgggtsgatgaagctggaaaccatcattctcagcaaactgtygcaaggacaaaaaaccaaacaccgcatgttctcactcataggtgggaattgaacaatgagaacagttggacacaggaaggggaacatcacacaccggggcctgttgtggggtgcggggaggggagagggatagcattaggagatatacctaatgtaaatgacgagttaatgggtgcagcacaccaacacagcacatgtctacatatgtaacaaacctgcacgttgtgcacatgtaccctagaactgaaaatataataaaaaatacatattaaaaaaaaaagaactggagcatcgactttcgttttcatttcaagacccgtcccccatgaycacagaggatgaaaagtctgcttaaattataagctagctaattgcttcttcagttgaagacctaaatgagttttaaagtgaaatgcatatctctaagggctaagtagccaacacaataggcaattgagataggaaagactaatttagaaaaggttgttttgttcgtttttctttttccttccctcccttcctgatttcccatcttcttcctccctcttctctcccctctcccccttctcctttccgtccttcctccttcagttccctctttcctctttttcrcccttttatttaacattataaatacgatgggattgtgtctgcgcttttgttggtaattaaataaattatttatacatttaacacaatcttgaattaccaggtgatcatcttaggcactcaaaagcataagagcccttgaaagcaatatctaagcatagatattccatagcacgtcttacaatctaaatattgcttttagtgtaatcgaagcagcaagagtagtcacagcagttgatggactatttttcaaattgatttcaaaaatgtatttaaggggatgatcttctagtctagattacctattgatttttaatatgaaaagctcattatgtaagcagtaaccgcatataaaaacctagcaaacctttgcataaatcctttaattgaatttccagagcctgtggttctactttttttttaattaaatctatttctttttttaagtgttactgtgtaatttgcatgctgtgaagaggccctgtcccagataaagtgccattgatccttattaaacctcacctctgggcttgcttaaaactaactggaaaaattaaagtgttcatgccgcaatgcacttatagcttgtgtgataggattatggaaaaaataataaaactaatttccaggggagaatttctaatgtgagattttattttttttcaatttgataattaatagtgaaatcatatcatatatataaatcatattttagcctataaactgaaatggcaattaggaaagataatatatacttgatgtaaaaccatgttacgtgcggataatcttttagcactttaattttttaattgtagaaggagagaattatgaattcaagtcaaacacattaaatggtgggtttcatccaaaaaatctgattcttttactatgtactgtattagtggatttataatattagtgggaggaagtataaaagatatggaaaaagatattctggttatgttcgtgctaaaatgtgtgtattagaattaccaggggaaagaaaaatataaaagctgcaataggtttttctattttttaatacctaacatttgttattttaaaagcaataaaatcccctaaagaaatattcgtaatcaataagaacacaaaatatggaatatattaactgagttataaaaatgtttgtagtatagcacagaatgaaaaacacagcaagktatgtacggtttaaagtgtaatcaattttgaggttgtatacaaggatatacatgataaatacaagtagtagcatttttagtaaaggctgttayaaaatactgtatttatggcctattccattctttttatagctcattaatgtagaaaacaaacacagtgtatccatcttctcagacggtttaaaattcccttaaatgatgtttttaaatgtaaataactgagctcatttgatctggttcttccttaagccaatgttagcatgaatggccatatttaccaccccggggttccttttcagactccggaaagaaaaagcgatgataatgacgtatttccctcccttccacaaaacagggccaggtgtaacacactaagaacaaatggcttggcagcctactctcctctctcgaagctccatgcccaccttgctgttgcaccccccaccccaaggaaagccttcccacctttggaagctgcattaattcttccaggccacaagggggccgttgagttastggttcactgcactggctggcaggaaagagttttaatgcaggctccaaaggtgcttaatttcctgtggtccttatgaatatgcatacagtatgtgctcagcaatctagcagttcaaactagacagctggttctggtggtgagggttttttaaatttattttttatttatttattttttctctcccctttccttggacaagccctttctgaataagctgaatctgtagtataatttcattaactcatttccagtatttaatttggttttgatatttccatcatggccccttttctcctttgattttgtcattctgtagaagttgataatctgtattatgatcaacaaggcatattgccatgactgtaggaatcaccaatttagatatccaggcttcctaaaatataagtaagtcagatttagcattactgttttcctgaatgtaggagtatttggaaaaggaaaaaaaaataaacatacatcttggaaagcagagaaaggtgttttgttttctttctgtttggattaacatattctccatcactgtgtaacttcatccaatacgtattgaatacctactatgtgtctggcaccacttcagacagtaaggatatggatatgaatttgtatcagtcaagcyttccaggatcttattatctagagagaaagattaaaacatatgcaaataattttgatagaagcaaagacctaactcagcctgagaggaggttgggtttagagaatgctttcattgtaatgttttaaagctttttatttataactatagtttatttggactttatgatttaccaagtaactttagatgcaaatatggtagtactgtgaagattatggtttttgaatgaagtcactttgtggcatgatggtatagaataagatattttcatagtgaaaatggagataagacatgtcccattccctagaatagactgtcactgctctcgttgcctccaaggaggaaactgttataggaatgattgacatggaggttcatctgtagaatatggacagccctctacaaattgggaacaagggccaggacacgaaatatagtgacagcctctggcctgggagtctagacagtggtsaaaggcaggattcatggagttttccaagataagattcaagacccaaactatgaatgaaagccaggctgaggctggcaccaagtagaggcctccaataatgttgacccagcggggctgcattgttcactgccccctcctgggaaggaggaaccaatgacaatggagcatctaagagacaagagaaagggagtgtaaaggtgaggattccatggctttacactccagaaactcaggctagcttgttctcactgaagcagtcataccttctcgaaggcaactaggtggattacagaattgtgctgggtcctatggagtgtcagaaatagtgaagcttctggagcttcactgtccaatatggtagccacgtgtgactattaaaatrtaaattaattaaaattaaaagttcarttgctctgaaatagcagccacatttcaaatcttcwgtagccagatgtggttattggctaccwtattgggtagcaccgatatagaacatttctaccatagtagaatgctcttttggatasatctgctttaaagcattagtccccaaagtgtgaaggatgaaccamttgggttccgagagraaacattataacttctgtttatccattaaactctttcatttattattaaacatctcaacacatttattgggtggcaggtactgttttaagtgttttgcatatatttacatgtactgtcctttcaaatattctttgaaataggactattgttgtccatatttcacagatgaggaaagagatgtgctaagaaaagaggtggcagagtagggattccagctcagtagccactttcagggtcccrtacttttcaatgtaagcatattggctctcaatttaaaaatgttattttttacagatagtacacagatgcactgacacaggtaccctctccagtcytctgatggtcaggaattgtgtgcagtatgcagtacattccaaagtcaggctggccatttccccagggagagggtccatgttggaacctttgctccttgtggactttagctttgaaatgtattgtagttttgcatgtgtgcttagttggatggattgagacatcagattatgtggtctgaactaaagcaaccgtcacagaatgaacaagagacttacaaacatttgtgcaaaaagatcagtgtttggatatagttcttagaatagcaaatagtaagaaaagagcaggattggtacttcacctactcctaataaaagcccttcatcttgtgcaaagtaaacacaatcacagtttgatcagaagtggtcaatggaaaaacaaaaatctaaattagcaaagagaaatttgaaattgcatgcattatttttaaagatgaacattgctttaacctataccattcctggaggtagtagctaatagaatgatccaagtttataatttgtaaataagtagacatcttttgaggcgtatgcccttaatttttctaactgatgaaagcgtacttccatcaactcargacagttcaaagcagcttggagcctcttggattttaaaaagactctgtggcctctgtctctcttggttttcagtgctcagctgaggtctactctgtttatcctctgcctactagaaggatatcctttcaatagaggtgaaaatcctgaaataaaaggtttcataaatggggaaaaaagtcattgattgaaagagtcatggcatagatgctgaasttttgatgggaactttgcaggatgttcgtttgtttatcattagccctgggagagtcatccctcrcctcccaccaccccttaatttaaagggatttaaaatattttcaagtacatcctgatatcagcacgtggtacactgagcctagttgatggaattgtgaaaaaaaaaaagaatgttttcccaacaatttggctgtatttgccagaactgtttcaagaatgctatgacttttgctcagggcaagggaagtgtgtgtgtgtgtgtgtgtgtgtgtgtgtgtgtgtgtgtgtgtgtgcgcgcgcctgcatgtgtactgtggatgtgataagagctgtgtttgtgaaaactgtgaagacataacacatatctatgaaccttttctattaatcttcttggggctggagctttaaaataaaataaataacttttctgcagagasagaacctttccttacccaaagatttcgtaactttctcacatccttggttaaggctgagctgcctagctgtctgcatttctgataggttttgctttcatacacatttcaaggacttaagaaatctgtttctaaagaataacttagaatgtgcttgttatggtcccacctattctggggaataggtggatattatacatttatttaggtggaatggtgggtcagatggcttcatgtctttttacatcacagttccacagccctcattagtgaagcagaggttgaaggaggtcacttgctttttatcccaatgtcaaataactccataattttttttattattttttgagacagagtcttgctctkttggccaggctagagtgcagtggcgcgatcttggctcactgcaacctctgtcgattctccttcmtcggcctccgtagtagtcaggactacaggcatgcaccaccatagctggctaatttttgtatttttagttagacaccrggtttcaccatgttagccatgctggcctcgaactcctcacttcaggtgatctgactgccttggcctccgaaartgctgggatgacaggcgtgagctgccttgcctagccaaataactccattatttaagaaaaattaaccagtatttattgaatacttactgggccctgtgctaagtgctttscatgtgatttctaatttcctgaccattctatgaagtggctactataattatcctgatttcccaggcagagaaactgaggcttagagagttgaagtaatcaactgggtgttaaaaagctggtaagtggcacagcacttattggcgctaagactgtttctcaggaccttgttgtacgagagtcaacgataagacgcagaacgtatgtttcatttttcttgggaaggatctatctcactcatctgccttcctgtgtctagcaagagggccaggcacataaaatacacatggtacaatctgttaaaaggcatgaaaaagaaacagtcattcatatctgttcgtagaagtgggcgtcaagattttggggcactgagatctatgcatgttgtgggcccactttaagaaaaggagtcaaacatttagtgtggaatactggaaggggtccctagacatgaagggcctyttcaacctaccttttgttggcttcaaggttatgccatattttgcaaagtcaagttggagatggctctcgatatkcatgagtgtgttagactgcttttcttctattttttaaaaatgcacccaaatgtaaaagacacttttacstttttgatttgatgttgaaggtcatttgaaaaatactctgtctttattctttgaaatggatttactctcaagaaagttgcatgtcactttacttggaagagacgggtctcagkgaggtgtgcctccgctttcatgaaaagtctcccgtctgcagaagcattggctgacatggaagattttttttttttttaatacttttctttttgccggcatctgcgtagaatttttttttttttttttggtagtttcttaatggtctttagcaaaggaagtaagtgacrctgatcggtgaaggcagacagtaagatttataatgtatttgtgctagctgattgccaacagaaccggcctttcccagtggtgctgtacgcagactcggaaaatcaatagggattaacctttgacccccttcacatacttatactgtgggctgcatcgcttaccaatatttcatctgtttcacttagctgctgttacttactcaataatgtgtggccaatctcamaagatactaattcwttttttcaaatgcagcatcgcttgaagctgtgataaaatatcacacctttggaaatcaaggctcttctkgtttatttatttaactcacattaattagccttaatttwaaaaaaatgagaagagccagcatcatgatgcaagcattgactttgctcacaaaaacatcttgtggtcaacagtggggcttagggggcaggttttgtggctgtgacagaacacgtggcccctagtgtgtctgttgaaagatgggcccctttcaggaaaatkgcttaccttactttttagacataatttttgttttctgttaaagggtcagttatagataagtatgctcccttgcaatgaaatgaacccactttatcaaytttgaaggaatcaaaattaacttgaatacattgtctttttgcatatgtatgtagtgctttgtataaacatatgaatttgtaggagctgctcttaatgattattactgcataggctggaatagaagcaaaatttgcagtaatacttttgtacctttctctttaggccttggcatrtattaaagtactatacatttgtcttaaaaattgaaattgtagattattttcatctaagacccttttgttcacagatttttttttccaagtatacctattccccagagtttacttacagtttgctattgatccagcagctggtatttgaattggtcgatatactctgtaacttgtttaagataccctacctgagctattagtttaaataatgtattcataaattgattaatcattacagtaagacttattagctgcatttatatctgcgtgttatccacaattgacttatagtctaataatcacgtatacttaagcagaagttgggttttacgttacaatttaataattatcaaggtggcaaacggtagtatttgtgtgtagaagttgagtggatgtggggctttaaaggcaggagtctctaagcaggttgctaattttacttttcctagataaaataattctctctcccaaaatgaaatacaggaagtggaccaaattgtgtcagcctgaaagaagtgattgagtttgcggaagctgtcctgaagtcgaggttctggaagatgggtggggtggggggaagcgaatgtgaagtgccattgcatttgtctccatttctgtcccagttacatcaaggctgggaggaggtctttccactggttttccgggctgtttgtgtactacacagcctgtgtacctggcaagrcacgctctgctctgccctgmcttcygatgagctgactaacaccttatagatgargttcccttagaaccaaagatgccccatgaaactccctaggatgaatgttggaagtccttccaactgggattcccagccggaaaggaaacagttcatctgactacagggtttaggtttacatgtactttaaaaaaaaaaattaataaagtttatttttacagtaattttaagttcacagcaaaactgagtgggaagtgtagagtttcatatactccctgtcctcacacatgcacagcctcctcyagctatgcacattttcaatgaaactacatgttcattgaaaatgatcttttgggtggttgatgttcgattttggctctgtgttgggcctgcccagtgaggtccttttgactccctaaggraccctgttttgggtttcttttgaggttgaagatatttcagactctttccccctcaacttccataggaaccaaactctctttmttcctcccgtttggttggaaagttattttgcctcactgcgtgatttttctactgcaccaaytcccctttcaaacgttattccacaacatactaaattaatgtatactgtgttctttgggtaatggggaggggagcctgtctcacagcacgcatttgttcagctctgtgttgaaagagcactgcccgccgcgtgaaggacatctgctcacaagtgagcaattgtgcttctgatttggggcagcacctttgcttgaacgctggctccagatgaaagaacagattgccgcggagccgcttttccaaggatccctctccccagcatggggcttcatayattattgagagcaaacctactttccaccgccactcctggatgcacttattttgcgagccttattcagaatgtcagcatggatcacttggcracaaaggcctaaagggcaagccaggaagcttccatggatacgttatttatggtgtttaattattattgtacagatttattaaatgactctgttacctaggagtccatgtagttgctgaaaagagtttgctaactttgaatcgtagatgttttatctgaaaacaaaatttccttgtgaatgctgttaccatattcctggtgtctatgtgagggggtgtgtggtggtatgccggtaagtgttgaacaacctgctctgttggcgggarctaggggaaacaaaccctgttttgtagtatttgctgattactgtggtgtaaatactcacaccttggctgatttcaagttgcagcttggaacttggagttrgaaagagatgygtagtcccataccattttatgtatgtaaagtatttgcactatgccgactaatagacataaataacctcatgagcatagataatagtcacatctactaagattattcagaagtattgagctttgagtatgttttacctttttaatatagcttattgaatcatacatttatctactttaatacttaataatgagtgtgcccaacaactaggtcttaaagttcctgatagtttagcagtgtgctctcttaagccagtcggacctggttgttgtacactactgggtgtgtttaattgacttccagttttgttttgttttgttttgttttgttttgttttsaaacagtctcactctgtcgcccaggctggagtgtagtggtgtgatctctgctcactgcagcctctgcctcctgggtttaaggaattctctgccttagcctcccgcgtagctgggattacaggtgcatgccaccatgcccagctgatttttgtattttcagttgagataagsgtttactgtcttggccaggctggtcttgaactcctgacttcgtgatccactcgcctcggcctcccaaagtgctgggattacaggcatgagccaccgcccccgaccattgtctgtcaggtttaaattgcaccttgggttcgggtgaagttgatgatctattcctaatgcaggctcattcctaacagggcatccctgcacaattttccgctggggtgtgatgagctgcttcgcatcctgctaagtgtcctcgacagcgagcagacacatgtaccctgcttggtacatgccagatgattctgttgtagtgatattaaggacaacagtattttgccagaagctataacgagatgattctataacaacagcatggtgacatcagactatgttttgcaattttctttaatatttatgctggataaataatttatcttttttctcagttttttttcccttttctttttttttctccccatcttgaacatgttgctgtagacaggtgctaggtttccctgaatgactaaagcagagatttggttattttcytcccagaaaaagtagatgcatcagcagagttgagcccctgggcattatttccccaattccgtatcccatctactaatacaaactaatgagatctattaaggatgagtccacaagtttgaagggagtctcttaytaatgttccgtctttgcatggtgttacaacagcgggaccattttacactgagggtttgcgagaggcatggctcccctgttatgtatttgggacttactgcagatgcttcctctggttcagggtgttgaggcttcgtgctgttaatattggaaggtgggtcrtttgtactgggcatctgtcctgtatcttggagatgtttagtaacatccctgrcctctagccattagataccatctctcccagtagggataataaaaacatgtctccagatgttggcaaatgtctggccttctggggagtaaaatggcccctggttggaaactagtgttccagagctacattcttagctgcttactgcatcattgtttttagccctccttttctctggcttccaggaaccaccaatcccccaacactaggatagggcataaggcaaccttatgtcaccaaattaatgtccgcctaggcaagctggactgcagaaagaaaagcagtatttctaccctaggatcattatcccaccttccccaagcttcgaaagaggtacaggagtcctcagaaatggggcttctaaaataagtggaactgggacctcttctctctcaggctgttacttgttgtggttccagcctattttctgagctgtggagcagggagrgatctcacaggaaacttggtaatgtagattttggaggacttgaaaggttcctgctacctttggctggggatggagggaacatggaagatgggtctttgtttagaggaagctcttyatcctggtacsctrgaagttggcatagtcttagcagttagtccagatgtgaatttcaggattattctgtgartcttccaagtcctgtctcagcagtgaaataggctcagtgtagcttatgtctaggtggctgagttcattttctagtctaggtaaagggcacctcctgtaattgaattgtgtaaaacctgcacagtggtacacctgagcccttttttaggacccaagagtgctgagattggctcttcctgagattccctctttaaggataagactttctgatttttcaactggatttaccattgtggcatctgcacatgagcagactgactgctttttggccctacctggagcctgrgtcctcaggtagctgacccgagagaccgtggagctgcttgtgatatacaatgtcagtgctctgagctcattaggcgtcatctgagacagtggctgtaggggaggggaggtaggctctgagtcaagcagacctggaattttcttyatgggccattaggaactgtgtgacgctggggcatctgacttcacctttctgagtcttagtttccttacctgttgaataggtctaatgatatcattatggcagatcagtgggacgattgagtcaaataacatgcccaatgcctgtttctcagagtaggctttcagtgggccacatctgttgtcactattattttgttctttctgccatttgggatgtgctttctgataatggcactaggctgccttgttgcctcctgcatgtagaacacagaacttcgcagtctctgcagagtatctaaatcctgctctgggccagccctttcagaaacacttcaggagatcaatagttatctgcttacctttctagctgagatgagattttatgcttgttactagcagatcaatagtgaaagcaggttctgttaagttttttataggagtcattaatctccctcagcctcagtttccctatctgtgaagtgagtctaaccaggatgataatgaagagttaggtcaagtgagrttggcagccagacacccaccaccagctgtaacataagaacagatgttctctccagacccccaggtcagctgaggtcgctctgcttggaataatgaactgccacattgaggatttttttcctctctttacttggccaaatatccgagtgtggaagctctcactgtgaacctgctaacatacatttcagtgtctacaaaatgtcttttgagagaaaacagcagggacattygtgagctcttttttttttctaaccactttcccagtgagacttcagttttcattctccccttagcagctttcaaatatgtacgtaacacaaatgttacatgtttgagmatttaaactgaatttggacagggcttctatttccagaaccttctaactctatttctttgtgacctgatagtcttgctctccagggtaaaagaagaggatggaaatggctgtggggcgcctgagstgggccctggcatgatggcaagwkgccgttctgggttcactgggatggctcaaggggagtttggaaaccctcctaacatgtcatctgaaatctgggaccacagttccggctggaacacttgtcactaaagctgctgataagcaaagggtgtatcactggtatgggtaacwgttgtgggaggaggaggggtctgacagatagccggatgattttaatgtttatattccactggggtaagctctaacaaagacccatcatttcccagataaccaattcttttaaaagaacatctgttgaaactggcaatttacattcttcttaaaatacggagcgacataattaaccctctggggagactaatattagtttattagagacaatttctagttctgtttatttttaacactaaaygatttgttcagattggggaaaaaawttttttttttttttttggttgtggtggcgttggcttttacttggggttgacctttccttatcaaggacatacaaggtgaatagctgggtgataatatatggtcccatgatcatcaaccaagcaccaacggaagccttttggaagtgcacagtattgtttaacacacaaataactcagcgtttagtaactttcaggtacaatcagtctattttaaagggacctcatgtgttattcatgtatgtgcacatgtgtttatgcagttacctttgtcttcattgatttggactcctttggtgctcgtaattggtgaaattctcttgtgatcattgttgtagttcccgcaaatctatttacggttttcacaaggaggtcacgaacatgcgttgttttcaatgctgggctagtttcagacttctggcttgttgtgggayggaggagaaagaagacagggcattttgatgtggcccagagaccaaatgaaacaaacgatcctctgattgctcagatgtcctctttgacttggaaagcacccacgtgaatgttgaaccatttggccctcagttctccgtcctgcagcaaactgcattgactcctgttttctacacagtggtcttcagctacaccttaccaagcaccccttacccagcaaacgtggcttctcttccccaggcagagcagtycgttacttagactaggaaatggctccgagaagctcacccatcaccatttgctctactgcaaaacaggactcattagcaggagctcataaaatgaaactggcagtgagctcatatggaagargcatcacgggcaactcggcttggctcaccagcccctgagctgcccccgagtgaccgctccagccttctttccttccacctctccctcttggccaacttcatgcttcagccaaagtgaactgagctcaccaggctgagtcatctgtgccagctgtgccctctccccgaggctgcctgccatgctcgtgctttcttgtctattggcaaaaggctctccatccttcaaaatccagctcttggcctcatatcttccacaaagccttcccagacctttactcacctgggccattaatcaccttccctctcagtyagctsctacaccatgagtgcttttgtatsgtgactgtctggttacaaggtcatcttttcccctggatgagacgccccttggggaaaggaccaagttttattycctgtttaaccttggcctgacaacctaataggtgctcagtgaacagttcttgaatttaattctctccctttccccacactgatgkgtatttaagctccagtggtactcgatgtgttgttttctttgttcttttttttgagacagggttttgctgtcacccaggctggagtgcagtggcagagtctctgtgcactgcagcctccgcctyccaggttcaagtgatcctcctacctcagcctcctgagtagctgggactacagttgtgcgctaccacacctggctaccgtgtcttgttttcaatgcagtatataagagggtgcattgtgtacctgtgggagtgattacagaatcccatcaaaatgggaatcactgactgaaaactggagtttatttgtaagctgggagatgggagctgaatttgaaaccccaggagaaaatagcatataaagtcattttaaataactatcatttgcagaggaggggggcacagatgcctccagtggcccaagactcccctttacacattgccgttcccttgccttctactcctcttttcattacccttatcaagattctgcagcccagggtgctgcttgttgatggacatcttcacctgactttctccctggtccaggtgcattttaagcatggaaggtgacacttgccattctcaatggacaaagggagtggggagtgtgggggtgtgctttggrgttagtctctgggttttcgaaacttagcattctcagattcccagccaactggtttcacatgacaagtaaatgagcaacctggaagatgagtggcgtttccacacacagggaagcagatagttccattasgtgacagtgtgtgcacagtttatggaggatgaagcggaaaacctgagccacaakgcagtakaggttggacgagacactcattccgaaggsgggtgtgtatgtgcaaactgtataatttttttcttcttttctatctgctagcaaagtggrtaagttgacccatgacatsgtccactggagggaccacatttgtgactctagcaattaagcytcccttctcatctgtggataaaactgacctcccagtgtgctggagtcaaacatattcagcatccaatccacattggactgtttgcatgtaacgtacagaacactcattcatctacatctaggaccataacagcgagcaggagacagtccctgaccctggggactaagcccaggacctgccactaggagatattcatggaatcactgtttctcctccttttcaaagaagactgaatttatgatgaaactttcttcgtatattggctttgagaaattctgttttggtgcttatgtgctctggataattctcaatgactttcaaagttatgattcagggagtaattggttctgagagaatatgcataatcacatcaaggtgtgtttgttttccaccatttgtagccttttgacaaatttctgggggcctcatgcctgctaggccgaatacttgtgtcccttgagcctggagacggcaagtacccagtgtgcatgcatgcactcccaaagtcctttattcacgacagacatcactaatcaatcagtcatgcttagcatactactccaagtagtcattactaatcatctctagtcagcatgggagatactctttaccatcccggtaaagtgacgttttgatgaaaacagcatggatcttcctgcagagaacagactagccccctgtacagcacacaactcggggaattttaggtytggtgatttactgctgttggagcctggccttcttcctgggagaaggctsgaaaaacttcawgtcagttacttaatggaataatacatgtttcctgcttccattgtcttcctggacctgacactcactctttaaccataagcagaagacacatacamaaatgtcctatgttaagaatctttatttaagacaggtggctagcattatttgggtccagaagcttccctggaaagaaaggattcactgcaagatcgacaggcttacccagttcatttaggcgtggctcgattaatgcacacaaagctttgggaacatatcagtcacatcaagctaggtccacctgtgtgagtaagtaacgtgtttatttatgattttctttaacagcacagaagagcaattgcatttggtcattctagtatcaactgagttctttataaaatatctttggggtgtttaaggagaattattctttttacaagttctgattaatgacaccgcaaaaatgaraataatgagctaatatgtatctagtamttgctatgcacttatatgtatagaagcgtataatccacagcactccttctgaatacgttacgtaaatggaaccctcgcaacagtcttayccccattgtagagatgagaaaactgaggcatacagaagrgatggaactaggccaagagcatagaggtggaattgttgtgtgagcctgtagagtccgtgttcttacccactgcatgatgtctgatcatcgtcaattttctttccatttggayagatgaatggtaayacttccctactaggtagagcaatgattccagaagtttataataattggaaagtgtattagtcgattctcacactgctataaagacattcctgagactgggmaatttataaagaaggaaggtttagttggctcgtggttctgcagactgtataggcttctgcctctcgggaggcctcaggaaacttacagttatggcagaaggtgaaggggaagcaggtaatgtcttcacatggctggcastggaggaagagagaaagtagggaggtgstagatgcttttaaacaaacagatctcaggagaactctttcacaagacagcactagggggatggtgattagaaagcacctcatgatcccgtctasttcctgcagagaacagaytagccccctatgcagcacacacctttgtgaggtccctyctccaacacagggattacaattcaacctgagacgtgggtggggacacagagccaaaccacactggaaggtaaaaaagttggcaaccagaggcttagaggaggttcaaatctcaaagtgatgtctttccttttgcattttggatggtttaataaataagattgatacaaacacaaagcattaagcaaacaaaaggaaataaaaacggcaacaaataaaacttctgtgctttttgaaattytgtttttggcaggcaacattccaaagatctttttcatttaaagtccaggagtcttctgtgtgaaccccacacaggtaccttggaaagactgcatctcctggattttgcatggttctggcttaatggacaacatatcagtcattttttgaggaaaataaatttaaggcttggtyatcggtccttgagtcagcacattgagcgttttgtcaattagctcctcccccmatctktatggtatggcttttcctgtaattacagtcaagatcctatagccggaggaaggcctgtcaattgagtaagaggctgatgttcatcgcacagtgacagcccattcggagggttttaggcctgtccttagagaggcttgttatttcctctttcggtactttgttgcaacctagttcaccgccatcagatgaatggaggtttcttatgctgtggcgaaacccagggggtcaagcccctcggacatgacgtactgcaaagtgaggatgtttcattgatttgtatttttaaaattaaaaataattatttaagctgcatctgtgtgcttataagaaaagatatagaaagattagtagtagactgttgtgttctttttttttttttttttttttttgagatagactcttgcctgtcgcccaggctgcagtgcggtggcatgatctcggctcactgcaacttttgcctcctagattcaagcgattgtcctgcctcagccttctgagtagctgggattacaggcgcccgccaccacacccagctaatttttgtatttttagtatatacggggtttcaccatgttggccaggctggtctcgaactcttgacctcaggtgatctgccctccttggcctcccaaagtgctgggattataggcgtgagccactgcacctggccagtagtagacttttgatagggtttttttttctcaaggtgtaggtttggctaggaagtcatagaaaatgctctttttttttttttggagatggagtctcactttgtcacctaggctggagtgcagtggtgtgatctcagctcactgcaacctccatctcctgggttcaagtgactctcttgcctcaacctcccgagtagctgggactacaggccaacgccacggcacctggctaatttttgtatttttagtagagccggggtttcaccatgttggccagggtggtcttgaactcctgacctcaaatgattccctgcctccacctcccaaagtgctgggattataggtgtgggccactgtgcccggccaggaagatggtcatgttttactttgaagcaatctgtgcttggtttatttttttcagtgagtgtggattacgtttataattttcagttactagttaggtaaagaatcaaaattaataaacacatttatagttctcagagattccttgagagaggaacatctttaaatggataaccacagtcttctaaacacctgaaagggtgtcttttgctgaaytatggagttttagttttgctttagaatttttggatgattagacttgtacttcttttaggctatttttccacctggtactatttggctttactgamtgccctcattccccatacaccaccttgttttgttcagattcccctaartcttcattctcgtcccacctccccatcactcctgactacttgaaacacgacttctgtcctcagaaggcagcagtgttccctcctcccgttcatttttcattttcccgttgcttaaaaaaatcaagcatatgtttgcagtcatcactgatgttctgcctcctcttctaaagttatagatgagtgccaagttggcagagcatgtagaaagatcactgcagatgtccttgtcgtgttgaccttattggagaatttcctatctgtgatgacctgtaaatggaatttaagggaggaatcamacgtgttagcacggggttggcattgcgtggctgttttcaattaacttgaccactatsataacatcaaaggtgtgtgtaccattctatgaccattgaatctccatggacatgttttgggaaatggatttgtcccattacactgctttctttagtgcataagatcttgaagggagggatgcattctatgcaccccaagtttctggtttactcgtggtttcaggwgtccctttagacaacatcactgacaactcactatgtaaaaccaaacaaattattagctttcttactgtgtgtttgcatttgctgtgcccagggaaatgggaagtgcattgaggaagaggccccaagacawggagaagtcactccaactttccggraacmccttttgctgtgccatgtgcatggaaggagaggaatgaatgactgttgaagccagatggccttgctcattgattctctcctttcccgccctctcaagccatccagaaggagaatgaaatgctcaaatcaagggagttaactatggcmaagatgttagtaatgggaaactttggaggaaggcaaagtcagaaattattctgcagggagatttggggatgttggatgctaaggcccaagccgtctattgtatgccttttgctttggcataaaacaacagatgaccttctgttaggtgtatstctgctcatgcttgagagtggtggtgtttggaaagactcaatagcatatgcacatgaggaagttgaccaaatgattccacagcrcatactcattttttgctctgattctagcttttcctccaattttattcagaatttgttcttttcttacctcacaccatatagaaaaatcaactcaaagtggattggagacttaaacataagatctgacagtgtaaaattagtagaagaaaacaaggaggaaagctccatgacactggtctgcacaatgagtgtttttgtatatgaaccgaaaaacaggtagcaaaarcaaaaatagacaactgggattacaacaatctaaaaaayttctktacagaaaggaagcaatgaacagagtgaagcagcatcctacagaaagagagagaatatttgcaaaccacacatgtgataagggattaatattcaaaatgtacacacagcgtaaatgcaagaaaagaatctgatgtaaaaatggcccttccaacatctagcattattgtgtgttgaataaatacttgttygattaggtctaatcactcttcatgattggatttccaaaatgtggactctcagcagkacattacagggacagtggttgggtctggagatgtcacccttagctgtttttcacaatgagaggttgttttatcataaataaatcaataaatggcagatkatacaccggagttactgagaaatataaaaaaaaaaaaagcccacattttaaagggaatttggtatttttaacaaagcatcagggggccgggagcagtagctcacgcctgtaatgccagcactttgggaggccgaggygggcggatcacaagatcgggagatcgagaccatyctggctaacatggtgaaatgctgtctctactaaaaatacaaaaagaaattagctgtgcgtggtggcgggcgcctgtagtcccagctactcgggaggctgaggcaggagaatggcatgaacacgggaggtggagcttgcagtgagccgagattgtgccactgcactccagcctgggcaacagagcaagactccatctcaaaaaaaaaaaaaaaaagaaaagaaaaaaaagcatcagggttgtcaccatgaagcaggaggagaaaaataatgctgttagacttcttaaagcgtattttgtggtttattttattgctctgtaaattgcaggctgtaattcatggggctcaggccagtgatttcacagttgatagaccaggcacatctcttcccaccccttccccacctaggggcaaggttttcaggaagagccccttttctaaaccacacatggcctgctcacaaatcttatgataaaactctacccactgagaagcacaaggtgtgaggctattgatgaggagttgaaggtgacagagactgagaaagggctgcacacctttggcctaaagggtaatgagcaacacacaaggattgggagatgttcatggcaagaaaaattcasaagggacattgttgtttcactaattctgtaaaggagagcagcggcatttacttakgccgattccccattctctctttctgtttttaaacagagacagatcttgctctgttgcccaggctggagtgcagtggcatgatggcatgatcatagttcactataatctcgaactcctggtttcaagtartcttcctgccttggsctcccaaaatgctaggaatacaggcaggagccactgttactggtctgttttttttccttaaatacataggcaacttcctcgattgtctctcctttattggcattgagagataagcacaataatgattgttaagatggaatattatgaaggctcaaggaatacttctgaaggctttttgtctatgaagtacacgaggtttcttaatagtttggcctctggcaaaaatggttttattgtagtttcatccttgttgagtcaataattaactgagtttgattaaagctgaattttcctaagtatgaaaaccatgtgggyccttctctttcctcgtgatgcacggtgatagtgcgtatctaacacttgaaggtgtccacgctggccctagctcagtgagatggctttgctttgsgggggtgagggggcggaggtggtggaaaggcagcaagctacgatgttcttatgtgtgtggccttgcttctggtggtggggtggcacacatgctctgtagtctttctggatgggtttggcccacgggagaccccctggctgtccaccagcccctttgtgatagtctcatagtcttatttgtcttttggcttgtatcccacctgttcactttttaccatagctaacctttctmagtggtcaggtgggactcatggagattttccgttctttggmractagcagcgactgcagattactcatcagctgtctccttgagtccacaatgccgggcggtggaygggcttcctgcctcctggcccagggcccctttgccggctcttagtgtagagcactagttgtaccatctggtagttgtttgtgcctgcgactctcttccctattaggctttgactccttaaggataagaaccatgtcttattttttttaatctgtagctccagtatccagcccaggacttgacaccagcctctgtcaaatacatccgtggaacgcatttgtaagaaatcgaggccaaggcactggaagtcccattgtctctggatgctgagaccttgaatttcatgccatggacccctcccttacattccgtctttaatgtgctataaatagacattcctggccttgcctaaataggattaagtagtaccaaatggtccttaccgttctgaggcctcactgagactcattttgaatctttaaagaaagcagtagagggatggagaagaagtgggtcaaaacctggtttctgcctgtgggaaaatacaaaacaacacaacagcaaagcagactagcatggttcaaagcacacattgaggtttttggtgtgccattctaatgcatgagctcattttgagccaaggatagctttttggtgtagaattttgccagtcctacggtcaatgcagtactaattgtgtgtgtgactttgtgcagtggggaaaggtggggctttaaaataaaacagaaggtatgaattgcttggcatttgctgtggttcctaagtctccattccgcttgccaagattaaattgaattattcccgctgccattcagttttactctgcacaaaatacagccaacatttttgcatttctttctyccttcctccttttcttctttcyttccttccttccttcctttytcccttcatctatctttgttccgcttttgtttgtttttttttagatcgctgcatgctgccgcgttgggttaaccatggtagcattttaccatgagaagccatagcaagatgtgccaggtgcatgctgctggaacacctggctgaggctccaacagcattttcctatgactgagggtagggtaggtagatgactcattacaatttataaaatggggggcttagcttgggtatcatcgtggttattccaagcagtcttccagctggactagcttttcgggaacacgtgtgtgtttgtgctggaagccccagtaatatcatttaattcgaaagcttttttctatgatgaattattcaggcagtgtttaccaaaattgtcattgatcagtacagacccagasagcatgtacaacagcgcctgtgctgggcctgctaggagtcgatattttctggctcaaagaagttccaaaagaattcaaagccagtgtgtctctttctctggamggccaagtgatgcaggtaccacgcttaggtctgctggtgtttagcttgacttaaaacccagccagggaaatatgttwcactttgctggggtgcaggtggaggaggctattattcttaggcatttaacagtgaagaatgttgggcagggcagagggtcagctgaatggcagggattccaggtctcagttaatgcccacaaatttctgaactttgaacataaataccctcactgcaatacatgtttttctttctctctctttctttctttctctttttttttyttttttgaaaaacttttttggagcagcacctgcatgttgtaaaaacacaaaataaaaaaaaaataaataaaagcagaccccttggttcagatatctttgtttgtgtaaatgttttggcattctttrtgaaaatcttcagattttcaagagcttaagatgacctcctctagccggctgcagcagtgtctaggtatctgtgaatgtgtaagaaattgagacagcctgcaaaatagctcacccagcttttctttaaagttccaacctttttgctgsctctctttcaaactgtactgctcactttgggctgtacgttagaaccacctgagaagttctttttctttcttttttttttttgagrtggagtcttcctctgtcacccaggctggagtgcagtggtgggatcttggctcactgcaacctctgtctcctggcttcaygccattctcctgcctcagccttccgagtaactaggattacaggcatccgccaccatgcttgggtaatttttgtacttttattagagacagagtttcaccatgttggccaggctggtctcgaactcctgacctgaagtgatccacccacstcagcctcccaaactgctggaatctgagaagttacgtgaaactagcgatgccctgggctaatgaaatcaggctccatggtggggaaggatgttgcggtggggttggggtggcaatgaaaggtgaaaaccactgtggtcccacctgcccatcgtcagatttcggttcctctcagagtyaacgtagaaggtttctgggggcatggacctgagtcttatcccctttgcaaaagtaagaattgtatcgtagcctgactcagggttttagccaacttctctggatgctaatgctattctcttctttatacttgtcttccytcccaggcacacatccactggagctttgcagggcctatctgcccttagccctccaatatccttttcattttctttaatagttttattgatatataatgtgcctaccatataattcatctgcttaaggtgtacaattcaatggcttttagtgtattcagagtttgcatccaccatcacaatcagttttagaacattttcattaacccaagaaaatgaccccttagtcatcaccccaaatacctcctctctccagttcctggcaaccactaaccaatctacttgctgtttctatggatttacctattctgcgtacctcatataaatagagtgatatgttagtcgtctcttgtgtctggtttcttcctcttagcatcatgttttgaaagtttatccctgcgacagcatctaccagttcatcatttctttttgtggctaagtaatacgccattgtatggatataccacattttgtgtatccattcattagttcatggattttgtgtctattatgaataatgctgccatgagcatctgtgttgtccacaagtttcagcatggacttctgttttcattccaatatcgtttgatgacatgtcttggcagtgatgtctatgacactgggcaagtgtcttaaaatgttgtgcatcagaaaaaagtcatcattgccaaggccagcagatctcgaaaagggggctgggacacgttggtgatttttttcatgctctacttacagtatgactcgtaactgttaatggctgagctcctccttaggtgaagaaggaaggcaatggcgttttctattctgggcctccctgcttccagcgatagcaaggagcgaaatgagatgctgtctaagaaaggaaggtgctgcgatctttgattactacacagcytcggcagtgtttgtatgattaatgagtccatgtttcagacgttcccatttaatgtatttgagccttctaacaacattgcctttcatatgttgctgactgtttttgagatttatgaggcctaactcgcaagcgatgtgtgtctggattaagagaacctgagaatctctatttatgtctgaccccaggaaattccctttaagctgcttrtcagaggtgcatgctgagagcatgatgggaagatggagtcttccatccrctggtaaaatctggaatctgctctcatttcattttcactgaactgaaaataaggtaacagaccctcaggtctacctataagtaccttccaactgttccacttttgtaaatttagttcarataatacatatgctgaaattcctatatcccccccatactccagatcttcaktgtggaatttaaatataattccttattgtaaaaaaaaaaaawttttttttgatcaaggtgattttgataaactaaatgcatctttaattttactcacagcaaagcgattctttattttctctctaaaagcataattgatgtgccatgatctttgtctttgcatttttaaaactgaaagaacatttccacaccattagaaataagatttcttcttaaaaatattcacaaggtgcaaacacttacatgtgtatatgcatgatttcaccaccagggggcattgtggtttgactgtccagttaaagagcctgtgttctatcagtttacccagaaactagaaggcctgcgagtatttctgattccttccaagaaggattcatatctggaagagaacagatgtcgactctttttcctctctagcaaacagtagtgttgtcaaatttgctaaacttagccagttgaagattaacatgcaatatataatatgcatgcgactaagtgtacaataaatagtaaatcacatttttatgctttctctgaacttggaagctgcaagttatgttttttttattccctgggtgtgatgaaataaataacattcaaatacatcttaaagatgtcagtcagggggaaaaaagtgcttggcaactgtgtttgatagatttcttttatgattaattctcctattaagttttaatgacttcaaagatacaaagctagaaactacaaaactaggcatggttaataaataactgaaataccaggtgtatagaaatgcatctgtggaaaaatgaaatcatrtattctctaggatatattaggaaatggctctttggcaagtctagagggtaaagtatccctgaagggggaaaaggtttaaaaacagtaaactaaagaagattgtttttctgaaagaaattcccaggagaaaggtactttctgagattcacatatgtagattacattgttatgaaccaacatttataagcaagcttgatctctcagaatgcgtttgtctatctcagattttcaagaatcctcrtacaaattgtccagggtttccacctcgcagttttcttccagggttgctatggcatggaaagtacattgctattttgttatgtaaatgctcaacagactggctcattccagaagtgggcgtcgtgatgccagtgtcttcgtaatactatctttctttcccctttagcacccagaacttatgaaatatgactcggtttatcctgaacacatstctgtgcatcrgggaggatgggagaattaattccagtttctcaattgcaaaagtgaggctggtcatggggcttggaaccacgccacggacgcatgaagcctccccgtttacatgccaaatccagagcttakgcatccrtgctcagggctctctgtggtaggcaacagctggattatttactttctagaatatctcgagttcttaatctgagcagtttcgaaaccaarcccacattaattaatataaataatgactgggaaacgttgcaggactccccggaaaagaatgtataarttgatgtgtttttgtatatgcttatgtatatgcctttgtgcacgaaaggagataaatggtgtatttcacacagttccttctcctcctctaagggatattattgttcctgaatttttctgagccgccgaagcacaatagggtttagagcgttcacaccaggcagcccccactcttcagaacttcaaatctaaagatcttttaaatacacagaacttacttttgaaagctgtggcccatcccaaatgaattctaatcctcagcctctagaatgcctggagtgagaaaacagaatattgttcttttctgtttatattatttcatactgagttaayacacttgccaagactccgaggcagcttctggcttgacaatgccttctttaactagcctagtttctagaataaagttcgggtccaccaggccctctgagtggggctcaggacactctgagatggaagagactggagaaagccaatctgtttctccctgaaaatcatcttacttttttaacgcttcgtacctagatttggcctgggcagcccagggagactgttcragcactggatacctagactctgctgggctctagagaagtgctgggctacagcgcccagtgccctacctcttggggccagccagcctcaccaaaaaatcasgcttctggcttgctccaaactcaggaagttgctgggaagtctggctagcaacaccctcattcccagtcctggccatgcctctctgctctccctagcacagggagcatgcaggcttaaggctggaagaaaccccaagcatttggccaggaagaggcaactagttccagctggcccacatactacactttaaaaattacccagatgatstgattctgtagagagagagtgggtggagaggactccagggccatggaggaagattcggcctttctctccctaatcatgagcaatgtgatttggagagagaaggacccggttggctctgcaaaccgcatttccttggctgaacgccagaggagagaaatgatccggcaagaagacacaccattccccgtcagcccctwcccgwcccttgcacccctggatcttctgctgagtatcggattggtctgcgtccaagagctcctcgcttggccagcaggggctgcctggagaaggggaggacaggcttcgagttttttgggtagkgacttctgtggacgtgaaaagactgcaccagaaatcggaggcagccctccaaacataacttggcctcttcgttctccctgtggacacacaggctgtgttctcctggccaagagtccaagcgtgtttttggcgcgtgctgacactctatatcgcttttgcttcggaaacgaatctggtcagtgacttagccactctataaaaatgaagagcagagctcgagtgcttataacacgtcatttttacccaagacagagaagaaaaacgaaagagagcctgagcattcctttgactccctccacccccggaaggtatattcagagtctccaagactgcctccgcctactcacatgtttatggcccggtgagaccgcatcctccctttctctatctgtcccttttctggatgcagggacacagaatcccctaagtgggaagagctttggagtggaggctgttcaaagttctgtggtgattaattattacctacccaaggtctggtcattgctatacttgagttcttttcaggctcaagatctctacctttttgtgttttttttttttttgtacagagtcttgctctgtcgtccaggctgtagtgcagtggaacaatctctgtatgctccctgcaacctctggctccaggtttaagtgattctcctgcctcagcctcccaagtagctggaactacaggcacctaccaccacgcctggctaattttttgtatttttagtagagacgggatttcaccatgttggccatattggtcttgaactcctgacctcaagtgatcctcccrcctcagctgcccagggtgctgggatcacaggcgtgagccaccgtgcrcgacctcagggtcccttctaacctgtgctgttgtcataaaccctggaggagaagcaagatctttctagcaggagcaacatcatcccaaataaagtgatagactttgatagtgttcttctattcattcaaccaacagagaacaaatgaaaagaatcaggagtctattgaggagacagaacatgagtgatttctgtgtgctgactatatttaaagacaagattagcagtaatatataaacgtaaataagaatttttttccccagccaagaaccatagattggacttcacattcaaaatgtaaattgtgcctaggaaacatcaatgcttattttaagcaactgacccttgggataaaaataaaaagtcaaaaggaaacaaacaatgttgctgagaagtgatagaatattctagtttatatctcagtcatwttacagctctggcatttctgggkaacactttagaatacttccactccggttggtccataaaaagctgcctgtgtttttatgttttgaaaatacacgcagagagacccactgcatgtcctattaggcatcttatccttgagtaagcaggcatgcaacatcagtgtcacacacatatcacccccatactcgacattctttgagaaatgccttggtcccgtctccagccagatcagcattgcacctcttggcatgcgttcttacctgttgaggatttgcttgaattataatatggtagaggaggaaacacagtcttactgtgccgtgtgctgagcgcagagccattctcagcatcctgccttgattaataaggcgtgaaagatcctccgaattcgcacctgttcagacaagcttgtccaacccatggcccccgggtcgcatgtggcccaggacagctttgaatgtggccccatacgtatttgtaaactttcttagaacatcaggatttttatgcacggaccttttatgcatggactgtggtgttttttgatttttggttgcgtgygtgtgtgtgtgtgtgtgtgtgtgacggagtcttgctctgtcactcaggctggagtgtagtggcatgatcttagctcactgcatcctctgcctcccaggttcaagcaattctccgtgtctcaatctccctagtagttgagattasaggtgcccaccaccaagctttgctaatttttgtatttttttagtagagacagggtttcgccatgttggccgggctggtcttgaactcctgatctcaggtgatcctcctgcctcagccacccaaagtgctgggattataggcgtgagccactgcgcccggcctttttttttttttttttaacgctcatcagctattgttagtgttagtgtagtttatgcgtggccgaagacaattcttcctccactgtggcccagggaagctaaaagattggacacctgtaaacaaaaacaacacagccatctagctgcaagacgtagctaattgctctgcagaacagggttggccagcctggccttgatgtcggagtgttctctaracctcacacccagtccctattcttaggttttatttctcaaaccaggttttgcctgagaaattacagcaaatgattcakagcacaatgatgttgctcatttttgataagtagttgaaagctgatggtgccctccatttcaaagcaacagaagaaacgctggtggtcatggagaaagagttgggaagcagagcgtgaatgccgggatctgcagatctgagcactatgcctgcagccgatgtctctccacagggctgatctggtggctggggtgcccctggtcagaaggggtgattactgtttcctctctctccttggtctctgtcaaacctaccaactcttttcaggaatgcagatatttaattatcttctgctgttacatctgcatcatgtattggctggctgttcaaaagtatcctctctaggcaaataacgagatttcgccagcaggatctcccgttaaaggcgtgcatgtgtggctttgtagacacgtatgtgtgtgtgmgtgcacacctgcctgcccttgcacagtgggcactgtttccagtgtgcagtgaggccctcccttcgtgtagaacaggacaggacaatgacaaagttattcaattaataattgaagcttgccgggcatggtggttcacgcctgtaatcccagccctttgggaggccaaggcaggcagatcacctgaggtcagaaattcaagaccagcctggccaacatggcaaaaccctgtctctactaaaaaatacaaaagttagccgagcgtgatggccagcacctgtagtcctagctacttaggtagctgaggcaggaactcgcttgaacccgggaggcggaggctgcagtgagctgagtttgcaccactgcattccagcattggtgacagagcgagactcagtctcaaaaaaaaaaaataatataataataataataatcgcacctcaatactccgtagccattttaccgcatgtgactattagctgtgcttttgcggttatctacgtctgttgtgtctatacggtggagtatttgcagacgctctgccagtgtgcaatgcttcccagccctgcattcagggataccaacttgggtgctgaaaagcagcgatggcaggactatttacaccacggaaacaggcaaaaactactgatcaagccttcactgttttgttwatattgtcttgacttagaaagtgattgcaatgttaataatgcagattaaattgaagcgtacagtgcctataaaccattacattatgaatagtataaaaaattgaggaagccgtgtggctcacaaattcagcactttgggaggccgaggcaggaggatcacttgagcctgggagttggaaaccagcccaggcaacatagtgagacctcatctctttaaaaaaaaaaaaaaaagaaagaaaaattagctggcatggtggcacatgcctgtagtcccagcttctggggatgctgcagcgagccatgattgtgccactgctctctggcctgggcaacaaagagagatcctgtctccaagtctgtctgtctgtctgtctgtctgtctgtctctctcggaaatattccttcagtgtattagtaaagaagttacttakgagtcacttatgcccttgaagagtgagtgatgtatcaaaatatgtctgtctttattgtttcactttcatccttctttttttggagatggagtcttgctctgttgaccatgctagaggtggcgcgatctccactcaccgcaagctccgcctcctgagttcaactgattctcctgcctccgcttcccaagtacctgggattatagacacccaccaccatgyacagctaatttttgtatttttagtagagatggagtttcacccttttgattggttggccagtatggtctcaaactcctgacctcaagtgatccacctgcctcacctcccaaagtgctgggattacagtcgtgagccaccgtgccggccactttcatctttctgattaactgaaaagtatcaagcaatrcttacatgtaactgcactttctcatcaactgcaaccataatttagctatggatacaagagttgggcacaaatccatgaaagcattgagtgagaatcaattggctctgtgggatttacaataaagaatgttgtttatttttatttgtaaattgtgtgctacagatccttcgtatcagtaaaatgtatgataaacatatgtgtgtatattcacacacaccctttcattttggcaggagtgtttgttaaacatttaccacagcagtggattcacttccatcagctgctaactttcaaggatgtttgaggatgcatgacctgtgcaatgcacctgcttcggtgcctggcacagagtcgcaaagccacaaagatggtgcttgttggttgtatgtgttgtttccatctgataycaccattgaggggagcaagatgacatgtgcctaccccacgtgtccagcagcaaagccacctggcatagtgggctgctcagcgtgcctggttcatactgcgtrtttatagtcccagggtgttttcagagagyaaaagtcctttatgattagcaaattgcaggtcctcccctttctgatatttacagcccttgcaaccgcctgtacaaaaatcgggaaaaggcagaagmsggctgtcattaatgtaaaagcagctggttacctccccctccccagcgcacacatcacctcctagtacaattagtcaccatgtcttttcccttccgtcaagccttttagcggagttcacagggatgccttcggtccagacactatgaccgttgacgaaggatttgaaatattttgagaactctgaaataatgcacaccagaaacgtccagctgaaaacaaaaagggaacaagatgacattttgcaatcccatgcacgttgcaggcrcgttgaatgtgaaggtcagtagtacttcagagggcaggcctgttgcccccaagcctgttgcctaagaaatgcccaggccctttgaacaaaatggattcgagtgattacagcacgtcctcacttacatctcccaatatatttcttgttattctcgttgagtactgcattcagacagaggttgccaataaagtttattgtaggagctaagtgtcaatatctgtagtaccccccgcctagggtgctgctaataaaatgccacagatagtctgggagaggcatgaaaatttgatggcaaattgatttcaggttcatcttgaaatttgtcctcagctggactcgatacttctggcagacatgggatggcttttgtcagaagggtctgctggaatgagacagagatgtcttgatctgaatattaaatacaacatgctgtttatgacattatccgtttactgctaaaatacccagctacttctgtttacacattcttctgcgttgaatgggtaagatagcatctcatagatccactttacatatgaaaagaagttgtatcaaacttgctgggcatcagaaataaagggttttagagacactggcttcaaacacaagttattccatccaagattctaaacttarcaatgcaacttgcacttaattttaaaacgctggaaaaataatgataaagattgtgtgatcaagtatagcagccctgtggtgtttcctcagaatggtgtattacagaaaaggaaaaagccatatacatggagaaraaactcccgatatttaatattatcaattgctggttcctgtaaatttgcatttatggatcacattataaaagcaattactcttatggattgttcatgcagaaatgcaytatgatgatamtatacttttaaaagtatatttatttccagaattcaatttgtaagaggtttgagggaaaaataatactgagttttgagtgtttctgattttaaaaatgtgttsagtagaattaaacgtgttcaccaaaacccattttatcmctttaaattattgggcaattaattgtatttacttagcattgaatgcatgattagaaatggaatttttaaaaaagcaatactcaagtggagtgagttcatttgttcattcagcaaataggacttgagtcccctactatgtgcggagccttaaaggatgagaaagatttctgggtgggacttcaatgagactcatttcgcaggttttcatgttattatgtatatgtggtaaataattaattttttcacaagtacttgcactagtgatgctaaaataagcttgactggcttgtaaatcaatgaaggttactgttgcattgctttgaaattgaatttaaaaacagaaacagagcagtccctttgcttccgaatgcagccctcccattggaatcactttggaagaatctggatctgcgtgttacccagtcttactttkcaggcagtcccaggcaggaaggcccattagtgaaaagagccctgcatatgctgtgggtcatcacagctgctgctttgcacatttaggagatatttgtggacctttcattaggacaatttttatggcccgagattaaaagttaaagttaagtagtaaacgtaatgaacatgtgcctttggagattccaactggtttgtattttcattctctccgttggtcatggcccattgaattttgatgatagcattaaaacaaatgcctcaaatcatttttggaaggagacaggatatgaattgacaaattaataaaataaattatacttcaaagatgctaaattatctcttctatgtaagtaggaggctctcttttcagatgtggaatttgtaggagcttgaatattctcaagagagggtatgggcaacatttgataaaagatgtaattattgggtcgtaggaaataatgattgagatagggtatccactgccctggtgggggaatcagtgaggctaggaatcactggaaaatgacattccttgagactccttcaatgggtagagtttgctttagcttttcawgtatcttactgtatgatggttgcttttgggttgaattccaccttgggttcaattcaacatgaaagttaaccttttggtgaaggaatgatccasgggaaatagtaaaatattagcctgtcctccaatacaaattgcctgtgagtcccactgatacttacaaatatacagaggtggtgtaaaaggattctgtgtcaaaactattaatatttgagaaatacaatacttatcagagcctttgtatgtaaatgtctcatatacccctctaagaasgggagcgaatagtattttccaaacttacgtcaccacttaccatccacctgcatactttacacrtcttggaatcaaccttacagggaacacttggtcgaaaaacagtgttttctaaatttatattacagttcccactccccccscccccacttgtatcactttgtatgacagtcttcttgggaacatccattgggaaactcttcccttgcaggtgtctgttacaagtcctggttcacacagtgttgcgaaagaatagttgtatgtcacaattttctttatatagtatttattgagaaacctattctgttaatagaatgactcaaaatcagccaaccccataaatactgctcaagcatttagaaagactttctctatagaggcttcagacgtcagaaaaaaacttagagagtgactttcagatacagcaacctagtctatgttatagaacattctaaaaagagcagattttaatatctttcctcccacacttgctttgactccctcctttagtaattagataattatgtataataagcacattaattatgtgcaacagctgccrttgagtgtgtgcatgtacaactgcttgaaaacagcttgtgagttcactattaggtccatgaaatttttctccttggcaggttttcactattartttgcttgacaaaggatagatacattttccatgtgtggaggtaaaagcagtgcagtgagctaaaaagttarcaaaggtgaagtggtcctaatctgcggccctggtacacttagataggcatcattgcctttcctctgagctcttggtgctgataacagcttccttgaccgataagtgtaccagatttccttacctgtcccagggcaagatagcaagagtttcttgatgcatttaaaaaatgcatttagtgttggcaaaaggctkgcaatttattattaagtggaataagcagtttaaaaacagtatgtacagggtggttttctggctatataaacacacaggcatwgaaaatagatatacataaataatgttactataatttgtctgcctcccttctctcagaaaagaccaatgaattatctattatgtgccactcactatttgagtgctgggaatacagccccataaagtgaagtttcatatatcaggtagcaagatggccatggtctgtgttttgagaatcacaggcgtttttgaggctcatggctataatcccagcacttggggaggccgaggcaggtggatcacctgaagtcaggacatcaagaccagcctggccagtgtggcaaaaccccacctctactaaaaatacaaaaaaaaattagctgaacctggtggttcaygcctgtaattgcagctactcaggaggctgaggcaggagaatcacttgaacccgggaggcggaggttacagtgaaccgagatcgtgtcactgcactccagmctaggcgacagagcgagaccctgtctcagaaacagaaaataaaacaaacaaaaaaatastattccatagctgactattttctgaaatgattttgttacttttctaatgagaaaaaaatagatctcgtgtgtggagggaattgaagatgtaatttcagactctgcgtacagctaagctcatcgtagttacttaactaacacttaaggaattaaatggcatatctgtgtttgagaggcacactgagatgagacaccagctctttttatttatttctaatggtttgcttggtgtactggtcatttccccggaagtgtgcaagaagaggtaggtgacttgcatgttgtctatgaacgtttttagaaacgtctggtggaaccatccgggcatcacatagctatctctgtgcagagccaggccggatgcctaggtgagatggaaagcttccgtcagctttcttgccggcctctcctcgcagccgctcccttccacacctgccttttcacctgccagactgcgcgttgcccgttgccctaggtctgcgtgttcagcacttctgcaacagtttcttctgcaaaggtaacttagcggagggtacagggtcttcttccaataagtcagcaccttcagttaaaaaaagcaataacattctccaatcttggcagtctggcaaggtagaaagacacctgaaggtgaacatctttggcccatgtgaaattttgttacgtgttgttaggtttcatttgtctctcagtcaatcagtcaatcartcagtctctctccttccatccccccttgtcccccttttctcttctctccccttccctgctccctctctttaaggttttctcacagattaagagagtagcatgtgctcatcccaattattgaaaccgtgcaaatgaatagcaagaaaaatagttcttggcgtgcccctttctttccgcagtgcccaggccagaagtacctgctgcccaagaccacagctgacagcgccccgggagtccttcacactcttctctgagctcttccatccttaaacagacatctatgccaaatgcagggagggtttgctgttggcttttacaagaacactgtcctgttatgcctgctgctctttgcttggttttccctggacggtcacaaacatacctccaggtcaacagttaaagagagaacccacttcttctaatagttgtgtaatattccatactacagatattctgttatttatggtagctagatttctattcatttttaattcccatgctcagagctttccagacatttggaaacattttagaaaattgacatcatctcttcaaatatctgaactcagatttcctctgtgatgttggaatctttaaaatatcatgcatacttggcctgtttctacaattttgttccccagccatcgttctccattttgcacgtgtattgtctcctcctattcctctgtacccttcacacgtgcctgcagggtatatacttttgcacaggcaaaagtccagctgaaatgatccttacttagcataatttaaacgcgagggtttcctaatgctccttccatttaaataattcaaaaatccgtggcaaggtacctgaaaactactaagagaagagaggtgttaatggacacatcattgaggctgaagccaaactgtgtgattctgtctgcagttgagaactgtaagaaaaagatcaagattaacattattattattggtgttacctcatgtctgtacctttttggasacktgggtctgtttcccgagaaatcatttttcctcctccttgaaaatagtgaatttcaagtggttttaattttaactgcattatttgtttgctttatatagtttttaaagttttatgaaaaagtcttccatgtgttttttatttatgaaatcggggcagccatccttcaaatatgaagcaggtatctgagaatactaaaatcttacagtgcattttataggagtgtgaatgatttttctgcaattgacatatcaaggagcttatcatctattattaagttaccttttcctgaaacaaaatatttgtcagatgtaacttggtacccaaatgccttttcttgctaaactaggaactgtcacacacacccacccacccacccctttattcttggttctctcctatattttgacatttgaagcatccacagaaaagtaatagaatgagcaattgaaaatcaccagaactgaaattatttccagctatgtttaaatatgaatgtcttgttcgacgcttcgcatatgtatttatggctgtgtgatatcattatggcatcctaatgaatgtctactgaattatgtgggattcaacaggggatacaaatggatttgaattctgtaactgtcatattgtggtccggagagggtggaaactgaagtatccctctgcgtcgccacatctgtcaaaagtcctcagcgctccccgcaatccatgtctggtggaagcgcgaggtggtgaggatggaaagggcatgcgttgacttcatgttgggacgggtcttaaactaaacacatgtcacgttatggagctgtttaccttggctttgaggtttatttccttctggattaagagtgatgtcgttttatataacaagaagtgaaaaaaaaaaagaatgatgttacacaacctattttttttttttttttttttttttactctgaatgtgtaactttaaatgaagaaccaggacacctcatcctttagtcttttctttactagtgagtggcagatatgtgtggaccacagagatggactgaaaagagaagtaacagtccttggtttgtattccagcccccaccttcctatgtctttgrgcttggtaattagatgcttggagcttcagtttccccatctgttggatcagaacggcagtatgtgctctccagtattttcataagagtcacatgaaatatgtacctacagagtctatcactgtgctttttaagttggggcttaatatgtggtagttgttgctgtttttgttrttattattattaatgttattttttgtttgtttgttttttgagatggagtcttgctctgtcacccaggctgaagtgcagtggcgtgatctcaactcacckcagcctccgcctcctgggatcaagtgattctcctgcctcagcctcccgagtagctgggactataggcacctggctaatttttgtattttatattagagatgggatttcaccatgttggccaggttggtcgtgaactcctgacctcaagtgatctgtccgcctcggcctcccaaattgctgggattacagacgtgagtgaccacgcctggcccataaatgttatctttatataacatactcacagctcccttaggagtacttttgtccatttctacacaatggaaacttayaattttagccttagcaacatgtatttactgggcatctagatttcatttatttaagaactttttattgaatgccgattgttcagcagccaccatgcaaggtcctggggaaccagtgggcagccacacagagaaggtcccaatggcaccagaacaaggccagcttcctaggaggtgtctggcttcaagacagggatttcctttagctgggtggtagagaaatggattgcctgtgatttcactgtgcataaaatgacctttcagcccttaacctgcgacatccacatgtgttctttggtactcacgggtgttatggttcatagctgtggtcttctgaagtataggaaaaggcagcttacagaaaaaaacttgcttgtttactgtcttctgagctgatttctcacctactggcaagtggataggtctastttttgtttagctgtttttctaatttaatcttrtacatgagacagctatagatggatgtatagtctttgaagtggggccagttggctccgtctattagctgtgtggcttttgtgcaggtgacttgtggcccccggcctcagggatctcatctctaaaacgaggctcttgatgttacctgccttacccagctgtgaagattaaaagggttttgtgtgttaaaggacttgcggagtgcctagaacccaatgagggccacagagcttgctccgattgctttcctgaaggcagtaagcatgttgctctggtaatagtcatcttcacggccatcattttgatcacattttggcttagtttcttcctctaccctcttcccacgtcagacctttccatggaaggtaaaacatgttaacagtctaatgtgtttccttctaatttttttcttcatttatattatacatctatgaaatatatatatatatattacatatggatatatagacatacacagatgcatatttagggtgtgctatggttagaaagtttgcatccccccaaaattcacaggttaaaatcctaatcctcaaggtcgtgacggtactacaaagcaggacctttaggacatgataaggtcctgggggcggagggtactaatccccatgaatgggtttagtgcctttataaaacagacccaagagagaccgttatccattttaccatgtgaggagcccacaagcaggtgccatctatgagccagagtggacccttacccaacaccacatctactggcccctttatcttgaacttccagcccccagaactgtgagaaataaatttgttactcataagccacctaagttatactattttgggatcgcagcgtgaatggactaaaggtttttgagattcttttttcagtagtttcacctaataaaacatggaatcattctacgcatgctgttctgtattgtagtatggttttccacactgagaacatactgtgaccatgcagtcatttcccagatggaacttattgagggacattcacttagtttcgaaaggtttctccctccactcccatcccggccacagatagtgatgcaataacatccttgttcgcatgtccagtctgaagcttttattcctatgggatgagttcccaggcataggattgccaggctggactctaaattttgaaaatggatttttatcattctgatggattacggtgaagagagccaaagtcttgatagaaacactcaacgcagtgaattttttagatgtaaaagtggatggtacttaaggatacgcacattagaaggagtaatttgaccagcccatcacagtattaattgattttcatgtctcgaagacttctgatttcgttttcgaggctggaaaggcaggtggaaagcccatcagttttacacacatattttgcagacaagtattagaaagtaactagcctgcttttactaatggttctgtggaagaaacacagcttgaataaatgtcgtcttggatgctcagcacagattggcagtggatgtcaggattgtctggtgggaaggctgctgggactcactctagactgggagtggggtggggtggggcagggcaggacggccctggctgattaataatgtttgttatgaagtctagggtacgtggggagagcttcatgaatccctgcattggccacccctgtaccacggccaatgattcaccctccctaaatcccagggccagatattagaacatctgtgatgaggactgattttctgttcgtggcctctggaagtccagtttttctgagctcaggggagccttggttgtatcttataggcaagagacgaatttacattttgccatggtgttaacaagcaaaagaagacaaaagagctcaaaatagacagtggcgtgctggggtcaggggtgctggtcaccagggcgagcagttatgggtgaagggctgaatttgcagggtcaaggagattgcctccaggccccttctggaaacacactccctgagccttgtagaattgagttgattctgtttaactgcccagtgaagaaatgacttccttgctttaaaacatttgacagctgtcttatataacttaattcttcattccagtggcttttggagcagcctcaaaagtcattttatcttcttggctctttgatattatttgtagtaatttatttaaagtaattagagacgggatcttgctgtgttgcccaggctggtctctaactcctggcctcaagtgatcctcccacctcagcctcccaaagtgctggaaataaggtatgagccaccaagcctagccttgatattattttttaatgggggtgtgtgggtgggtggtgatggggatattccagcagaatatcagaaacagagatgaggaaggcagagagagctcaaagacaaggctcaagttcatattccaacgccagtacctgccacctgtgtgaagctgggctaattatgtgtttaggtttcctccttcgttaaatagagttctacttatattacagggttgtcatgcaagttgatgaattaaatacgctaatatatataaattctgagtaagtattaaccaaagaaatggaacatcaatattggttcccagtctagttcacaggtgttatcaagatggttacctttctaagtgtctttttatttcactagttccaaaagagtatctctcaaaatattaggtagtatttagtcaacactttaacacataacttgtttttttttttggcataagaagcccatgtgaaaacacagttgaccctaagcctatgaaaaatgacttgtgtgtgggactggggtggctcataggagaaggaggatattcgtctggatttttactggtatgtatatatttttgggtactggagatggggacagtgagtatttgaagctcacagcaggcccattttgcaagttttcaggaaactgaaattcagagagattaagtattttgccatgaatcactttgtagtaagtgggagagctgttgcaaacccacgtctgtctacatccacagcctgtgctcttttcatatacaagggaatatggaggagaagggaagtgatggaaggctttaaaaaaaaaaaaaaaaaacttcagaagctgatttgagatttattcatctttggtgtactttctttactaaggcaggttgtagactcatgaaacctagaaggagttgaaaaataagggttaggattaaaaaaaaaaactagtgaaatcaagacaccattttgcttaattgaaggcttgcggaacattaaagcacaacaaaaacctaattctttgagtgtttctgaggccaagccttttcccacaaggcactgtgtacacggttctggaagctctcctctgtttgcacagtagtcactcatcctgctctcgggctctgcctgcagtctcttcctctgtctccgatgtcactcttctctgtcttcttcagaagctgtcatatgacctccagatttctctttgactccctgtattaccattagaagacatctacactgggaaattgctcagttcctgtttttgattaatattttatcagccgcaagaggaaatggtattctatagcaacactaataagtaattgagcagatgagatgctcttgctagctttggtaaaaagtcggggcaaggttacaacagaggagctctgatgagacttgggatgrtaaagtcaagtcgaatatctggtagggttaaaaatctaacagtgggccaggcgcagtggctcacgcctgtaatcacggcactttgggaggccaaggcaggtggatcactcgaggtcaggagtttgagaccagcctggccaacatggtaaaatcccgtctccactaaaaatacaaaaattagccaggcatggtggcatgtgcctgtaatcccagctacctgggaggctgaggcaggagaattgtttgaagctgggaggcggaggttgcagtgagctgagatcgtgccactgccctccagtctgggtgacagagtgaaacccatcccccaaaaaaataaataaataaaaattaaaaaayctaacactggtacgagaagaaattatgctctaaatccttctttgagcagtggcttacagacctaaatttatcaaaggtggtggcagtaatagtaataattaccatcttcatttaaaggcacgtatctaaaccaaaggacctaaataaaatattaatttttcatagtgtttaatatgtgccagtatatataaattcaaggtaaggtagacagctgtaaactggatsccctgctgtacccagcaaatgctgagagccctgcttcccctcttgtattcaaatggctctataagagaggaagtagtacagctatcagtaacaatgccatccggtaattaccgaatcataaatgtttggggagctgaaggtcacgggcttagtagcaattctagtctgatgtttgattccttgtgaattttaaatgcttgtactctctatctgggtgatggtgttttagttgccagtggacagtctgatggaggtgggggaagagttattcttccatatttatttttctccaccttgggtgaaaaaacttcgcttttcgtaatgtggtacagtgtgtgcttctgtaaatggaaatggtttcagcacatcacagtcatgcttccctgttgaaagatgctccgttttcccgcatacatgatgtccagcacaacgtctgatttatgagagcatgaccctgggggcctctggaacagctgctcacacactccctttaggaggcccaggctctcaggggaggcccatagtgcagctaggagctagagttttaggatgaagaaattacaggtaagaacacagccccattttaagaaataccagtgatttctgtttttccttgttcttctttccctcagtattttattaacatgtgctactatacaaatacacaattcacttaggactctgtttcgtgtggatcacatgggagctttcattaaattgtggtgattccaatgtgagtggttatcaagtcaacatcaaataacatgaagtgtgttttagtcggcaaacatcactttgtaattctctgatgtgtttgggttgattcccttctttctgctctttttctctttataaagtaaacatttttattgcaaaggtactgctattgttagtttctaaaggcacttgtcatggtgtgactaatattagaagcagacacagccatgatgagcaatactctttttttgtttatttttgwtgttactgctgtaagccactttcttctccctctccrttaaaatgcaacttaattggtaaagtttagttgactagagatttcatttatttatttatttatttatttatttatttatttgtttrtttgtttgtttgagatgagtcttgctcttttgcccaagctggagtgcagtggcatgatctcggctcactgcagcctctgcctcccgtgtccaagtgattcttctacctcagcctcccgagtagctgggattacagttgtgcaccaccaggctctgctaatttttatatttttagtaaagacggggtttcaccatgttggccaaactggtctcaaactcctgacctcgtgatccacccgcctcagcctcccaaagtacttggattaaaggtgtgagccaccgcgcccagcctgtatttatctttttaagtaacaaagtattagcattgtgataaataatatttaatatatagtaagggaggtcaaagtatgaactattttgattttttatgggtttttttttttttttttaaagaatgcgttgattttgtttttctttcttttttttttttttttttgaggcaggccttaggtctggcacccaggctggagtgcagtgacgtgatcaaggctcactgcagcttccamctcctgggctcaagcaatcttcgtgtttcagcctcctgagtagctggaattacgggctcatgccaccacacttggctacttgtttaattttttgcagacatagggcctcactatgttgcccaaactggcctcaaattcctagcttcaagcggtcctcctgccttggtctctccaagtgctgggattataggcatgagccactatgcccagccaaattttgtttttcttttcttttttttttttttttttgaaatggagtcttgccctgtcccccaggctggtgtgcagtggcatgatctcggctcactgcaagctctgcctcctaggctyatgccattstcctccctcagcctcctgagtagctgggactgcaggcgccagccaccacgccyggctaattttttatatttttagtmgagacggggtttcaccatgctaaccaggatggtctcgatctcctgacctcgtgatccaccagccttggcctcccaaagtgctgggattacaggcattagccaccacacccggcccarattttcttataaagtcaaatgggagatacttgtttgcargaaatagttcttttggttcttacttttccataaggattgagtctcaaaatgtctggtagcatccactgcattttgtaggggacaataacaaagaagatgccagcaatatcttctatcttttccaacattattcacctctcccacccaaggacaatggtgggctggacagagcattcaatgaccgagaatctaccataagctactagggccacatcttcccctttcttctcccccaggtttgtcccatttgtactgactctgacccaggttgtcatgacttgagactcactagaagtttcagaaaratgcasactgctttaaaaaaaaaaaaaaagggcaaggggaggtgtgagaagaaagtataattctttttcttctaackggagatataaaaatcatataagcatgatttatsatttgattggaacattgtattttatggttgcagagcacaygtatcatcctatctgcttctgacacccagtaagcagctctggcttttataattttgatgaaagargtttccyaacagtatttcggtgtgcatgctcacacaccagccctggtcrtcagtgaacagattcttccaggtcttcattgtrgcggaagaaagtgagatcagagatcccgaggaagggcttcagtttcaccagtagtggagctagggagtagsggggcagaagccgcaggaagtcagtgcaggacgccggaggccactcctaattgcttcatgtgttgttgccgtgctgatgaccttggaggcgctgctggtcctggatccttgcgaccttttcttccaagaggaaatgtggtgctgagccccccttccactggctgtgacaaagaaggacccctcatgtgggggcctaattctagtgaatccccaaaggtacatgttgaaatagggaaaaggcccaggtgaggctgtctatgtaatagagaagatccattgcaaaatgaaaatatggggttctagccaggggcagggaacttaatctcccttttccatgggcccaacacctgaatctagggcaaacagstgtcccccagattggatcctctgctctaggacacattcttgtcctagagcrggttgggcaagaggcttttctctcagtcaccagccccaaaccctgtggtcttgccagcccaggacgtgtcaagactgcagcctttgctgacytgtgaccatctccaagtccatgcccaggcccctactaggagttgagggcaacaggggcagtgggtctctcctgcttaggaaatttgggttgagggtggcagtgatcttgaggggggtctgggagggaggagccagcctggcctggtctggcctggcccagtgtgccagckagggcaggtgcaatggctcaygcctataatcccagcactttgggaggccgaggcaggtggatcacctgaggtcaggagttcaagaccagcctgaccaacatggtgaaaccccatctctactaacaatacaaaattagctgggtgtggtgatgcacacctgtaatccctgctacacaggaagctgaggcaggagaatcrcttgaacccaggaggtgaggttgtggtgagccgagatcatgccattgcactccarcctgggcaaaaagagcggggtaaaaaaacaacaaaaaaatgatgtaggaatgaacagatgaacaaccccacacaacctaaggacractttgaatcaattcttctaagctggtagcagaagccacctttccatttgacttstatctcgctctttttttctttcttttttttttttttggagacagagtctcactctgttgcctagactagagtgcagtggtatgatctcagctcactgccacctctgcctcctgtaatcaagagattttcctgccttgggcccctgagtagctgggactataggcatccaccatcacacctggctaatttttgtattttttgtagaggtggagtttcgccatgttggccaggctggtcttgaattcctgacttcaagtgatgagactgcctcagccasccaaagtgctgggattacaggcatgagccatcgcgcccagccagacttgtatctcttaatgagtttaactacatttaaccatgtatgtgtcagtcctactatgcaccttacagctcactaaccctgtttaataatgtatgttgctacatttaatctttatggtagcctcatgaacaggctcttatttagttcagtggttcttgatcaggagtgatattgcctgccagggaatgcatgtcaatgtctggagacatctggggttgtcagttcaggagggtagaggataggggggaaaaggtgctactggcatctagtgggcaaaggccagggatagtgctaaggatcctgcagtgcaaaggascatgcccaccacaaaatatcagcagtgccgaggttgggaagctctgtgccattgtgcaaagattcaaggtggctatgtcacaggactggtacatgtccttttttttttttttttttttttgagacggagtcttgctctgtcgcccaggctggagtgcagtggcgtaatctcggctcactgcaagttctgcctcctgggttcgtgccattctcctgccttagcctcccgagtagctgggactacaggtgcctgccaccacacctggctaattttttttttttttttttttttgcatttttagtcgagacagggtttcaccgtgttagccaggatggtctcggtctgctgatctcgtaatccgcccacctcggcctcacaaagtgctgggattacagacatgagccaccacacccgccctacatgggtattctaacccagtctagtgatagtccaacctcctgtactatgagtaattagcaaagaattaacagcagaagatcgctctcaccaaagcccatccagaaagtggctcgtattcaaggtgctaattagggtgttttgttgccagtaaaaacatgagtcagatttcatgattgattcatgatgactttaaaattaatgctgctgttatcatacaaagtagtggtaagtggaggtaagagaatgtttttgctttggggtactaagtcatcgttataataaacacacagtaaacccatttatctcaggcttaatgctttcttgtttcttctaagcacttcttaggtgcctctgggctttttaacattctttggcagttgtaatttattaattgatttttaaatttggccggtgaaaatgaactttargtaggggtttgaggaaaatgaaaaggcctattkgtttttcagtggctggttcttcgtgttcagcattaaggattggtagaaatcaggcaacctctatgtaacctcagccatcttggattcccagcttactcacatcatagatggagagtcagttgtttagaaaaaaactttcttttttttttctttccttttkcttttcttttctttctttctttcttttttttttttagggagggtctggctgtattgcccaggccggagtacagtggcacgatcttggcttactatagccttgacctctctggctcmagtgatcctcccacctcagcctcctgagtcactgggactacaggtgcacactaccatgcccagctaagtttgttcattttttgtagatacagggtctgactgtattgcccaggctggtcttgaactcctggcctcaaaggatcctcccacctcagcctcccaaaatgccgagattatgggtatgagctactgtacccgaccaagaactttctattatatagattttaattaaaaacagtcctgttgagtggcctctttatcaaatgcattctcacataacctcatagaagtgagccctcttactgaattatgtggctggggttcttgggtatgttttgttctattttctggttggtggttttctttctgtcgggtcccrtgggctctttytggacctcttctcagaatgtttttcgttttttttattttttgagatggagtcttgcactgtgtcctgggctggaatgcaatggcaagatccctgctcactgcaacctccgcctctcgagttcaagcgattcttctgcctcagcctcctgagtagctgggattacaggtgcatgccatcacacctggcaattttttttttatttttagtagagatggggtttcaccgtgttaggcaggatggtctcgatctcctgacctcgtgatccacccacctcggcctcccaaagtgctgggattataggtgtgagccaccatgcccagccctcagagtgttttaaaatgcatactattaaatacctaggattataaagggagccagctatacttacatatagttctctctgtgaccctgtagaatgcactgaagcaaaaataacaggtaatgctaatcataaagttttacaaatctcctgaagagtcttgttggtttcygtgttgatgaagcaggaaatttccctgacccctttgcaggcaggaagtggagtgcggatgctggaactagctggctgctttggtgccagtagaggtgaactgcactcwcttgaaccccctgcactccaccccttctgggaggaagcatgcaggtgagcaggtgcaggagccagggtaaatgcttttgggcactggcaggaatgaactctgtactggccctgggatagcatctggcaggggatgcccgtgacccctgaaaccctaaaaggagtgttacagtcagtgctcttttagttttgccatccacggacggcttaagtgttaacagttsagtggagggtcagcgtgacagccttttgcacccacatctgggttcttgtccagtgtccaggaggaaygaggtctcatgagcaaattttaaggatggcaratgtgggggattttattgctgatgaaagtggctttcactgggaagataagctaaaaagaagacaaagcaggaaggtaattttcccctggagctatgccatcaagctgttcttctgaagtccagccgcttctctccaactgtggtctctaatttccagctgcttctcctcttttcttcaatgtgccagcggagcctggggtttttatgggtacaggattgggggcaggccgggccatgggtggttgtggaaaaggcaatatttgagtggaaaaacagggatatatgttctcactttgggccacagttccaggcttgaggatggggccctcaccacggacctgccctcttctgcccagaatttccctgcctcctgtccctatcattgatacctgcaattctttgtacatatgaaatttaatatggtgagattggcatctagctgctgctagagatagtgctcatartaatttttaacattgattgagtgtrgataataatccaggagctgtgctaaacgttttacaacacattatctcacttaatttcacaactccataaagtagttttcacttagttgagggatgaaaaaagttaggctctgagaattgatattactctgcaaatatggaattggaatttcaaagcaatctatggtctttatcacttctccattaactgtccttgttttattaatgctgattactttttgatttggtttggttctttggagttgtttgcatttcrtgagtcttggcatctttttggtagagaaccttgctaggttctcacaatgtagaaattaarcagaaaacagaggtctcaatttgccttttcagcgtgaatgcagactcttacattcagtgctgggagtctttcttgagggacagtgagagcgaggaagggtttccattctccgagatggatggttgcattagtatttatttcctttttgtttttccttaggatgagaaagaaggcagtggagcccttttccttaggttagaatggttctgttggttgaattgtgcaccctgtttggttgaaacaattggacagtaaggatgtgactattattgttgctctctaatactttattatgtcataccaaaaattatcttttgtattttgctaccagttcttttagtttctcttacatgtatgaagttggatagttagaatgagatgaaaataaatgggctgggcgtggtggctcatgactgtaatcccagcactttgggagkctgaggcaggtgaatcacttgaggtcaggagttcgagactagcctggccaacatggtgaaaccctgtctctactaaaaatacaaaawtttttttgtattttgggattcggtttaggtgatgtgtgtctgtaatcccagctacttgggagrctgagacaggagaatcacttgaactccagaggcagaggttgtagtgagccaaacttgcacaactgaactccagcctgggcgacagaggaagactctgtctcaaaataaacaaacaaataaataaataaaaattgtttaaacctgccaactacaatawctttttcagtctctttctccctttcccaccttcccaaaagggtgggaaatttttaaagtaaagtaataaacaaataagttttgggttgggcrggagattagttagagacaggatctgtaggtcagaagtggtatttgggggagtagggagttttktttttttttctttttcccttatgcatttgggagtggaagagctgtcagattctgaatttagttagatttataatgctagagacattcagcagtctgcctttycctttctgttataaaatcatgtttttattgaattacattttaatattggtatcactttaaaatgaaaatgagtacttgcaaamtgtatttttgaaggagttkggtggtggtggggggatgccattttggcaacagatgacttcggttcaagtcctctctctgtctcttacttgctttgtggctttagaccagccacccactcagagccttgaaatcctcatctttgaaatgaccatagtaagttcctgcctaggctctcccctgaagctgaaatgcatgaacatgctttgtaattttttttaaggattgatactagctagggtgttgataagaaacagcaggcatagttactgggtgattgagaagagtttaacaaaagactrtattagtctgttttcatgctwctgataaagrcayacccaatactaggtcatttacaaaagaaaaaggtttattggacttacagttccttgtggctggggaggcgacacagtgatggcagaaggtgaaaggcacatctcacatggcagcaggcaagaaagaacttgtgtagggaaactctcccttatgataccrtcagattycttgagacttatttgctattgtgagaacaccttgggaaagacctgcytccatgattcarttacctcccacctggtccctcctgcaacatgtgggaattcaagaagagatttgggtgggtacacagccaaaccatatcaaaaaccatttayaaaactctaagcagccttaaaggaaaccaccaagggaccaaggcctgatgaagcaagagtaggagggaacagatgcttggatagggcaggtgagtcacaggctgatgggagctgccaccgtcagtagaggtcctgatgacctgggagggtgggagccagacagatgggagtatcctagcctcagttcctttccatcctcagaactcctcccagtgcctctcaatggctaaaccaaccaaaggttggagctcaaggaagctcctgaggctatctttacaggtcagccagttgggaacagagttgacggagaggggacaggaggtgactagatttggaaggaaaattagaaaacttttggccgggcatggtggctcatgcctgtaatcccagcacttttgggtcagttgagtctaacataggggtgtccaaacttttggcttccctgggccacattggaagaaaaagaattgtctttggctgcacataatatacaattgttgatgagctaaaaaaaaaaaaatccccaaaaaatctcataatgttttaagaaagtttatgaattkgkgttgggccagattcaaagttgtcctgggccgcatgtggcccaccagcyatggtttggacaagcttagtctacaggttcttcaagaggggcttgagcatttgaaagacttctagtgggagagatcacaaggkacaastagaaaatcctgggctggcctgagaggcagacctgtgattattttgctctttgaaagttgtccttctgcacccattttccccagacctaacctcgatttgtgctccaggtctgagcagaaatgttattccctccaraaagccttcccykgatgttgagggatgaagttgtagscccctcccgaatgcgtcctcagaactcgctggttctcgtcctcgccctcagcatacttgctcattgtttgtttccatctctatcatctctgtgagccctttgaggatggatgtgtgtccatcttgttaacagttggmtccccagtaaccagtacagtgccagatacagagtagtaaccctacattstagcgtaggcaaatattctagtatttgccaaaactagaggatgaatgagtgatgggtaagagagttctcagaaaaatggatataaacaatattgtaaatcatatttggaaaataaataytagaatcattgaatccctgagttatagaaaaatttattaatagcgctatctggctactttttaaagtgtggacatcctcgatgtattagctatgcatctgtggataggaggcttacccactctgagtcttgtcaaataccaaacacaggaaaacaatatcttcctgagaatgttgtgaagaatatatcatccagtcagagtgaatcagcttgcccagtgcttggcatatagctgctcaagaaatattaggcattctttgttattataaatcccctttgtattttaaaaycctcatgtatcactgaaacaaccaactgaaaaccattgagaggctcatggtgaaagaagacagacagtgtaatttccctggaaactcaattttgattcagacgtccacagcatctcatttctgcctttaaaaaatttcaagagtgrcattttggcatgaytggactcacaggtggagaaggtatgacaaacattctggaaatcttggaaggtgaaatatagggaagatggcccctatggaggttcattgtcccccaccttattctaaataatgactttcttaaaactacatgttttgggggaatgtcctgcaatattgctttacatctttttatttttttatttyattttattttttttgagacagagtctctgtctccaggctggagtgcagtggcacaatctcagctcactgcaacctccacctcccgggttyaagcgattccmctgccctgatcagcttcctgagtagctgggactacaggtgcgcgctatcatgcctggctaattttttgtattttagtagagactgggttccaccatggtggccgggatggtctcgatgtccttacctcatgatctgttcgtctcagcctcccaaagtgctgggatgacaggcatgagccaccgcacgcagcgtattgctttatattttaagactatacactgatatccccgagcmcccaagttcctgtccgctggtagaattcacaaagctggttttatgtctccttctcttcctcttccagtgttgtcttttccctgcattgagatagcattgcatggagatccttgtactcytcgaacagaggctgcagatggacacaggatctgctcagggagataagatcacctgctaattctgctttctccatcagagtctgaatgatcagtgatggggaccagagctaggttaggtctctggaaacgccctctgtctgagtccgggagatggatgatatgggtaatgacttgctgctttatcttctctccatctccttacagcagctccaactactgacttttattgtgtggcagctaattgtaggattctatttctgtaaagagaaggcaagagaggaatgcagtgtccaccatccctgcagccctttggcgccttccccctcccattaccttgaagtagagggaaaggggacgacagaagaacccttagaagtaagactttttctgtctctgatgccacggacctttgaaatatttttttgaaaagaaggcctcccttggctgataccttctgactgttagtgaataaaggaagtttaaacaatctcttccctgtaatcattaatctcgtcttctttgttacaatgtatgttgtggtctttgttacaatgtatgttcacgaattcctagaacactgttcccgttggccatgggatcaggggaagagagaaggaagagagaaccagacacaagttggagggaatccatctccagtgctgctcagaggtatgacctagagcaaggggtttaggctttcttggactcattttcctcggtggtgaagtggggataatttattgacagtggaccgtgaggttctgcgcacaaaattcgttgcatagcacctgatacacacaaagctttcaggcaaggttagtttcgggtatttccagccttagtcttggctgtgggagccataatggagttgttcagaagtttacagctagtgtttataaattgcttgccatggggccttgtatacagtaagcattcattaagtgttccctcctattatatccttaggtttaagatacaggcaccacaacataaaccacccccagagtacacatgcatgggtgtaatttggtgccattctcctcccttttgcccccaccaaaatgaagtttttagtgtaaatgtcatgtagattttaaccaaaggttgattggagggtctgagtttctcagctaaatgaaggcatgaggactgtatccctcctgaagggtgtgatcagttccatgagaaagaagctgcgagctgtggggcatccaagataatgtaatctgccccggggtcctgtgagggactggccgacaaggcaggctgaatgcagccttgcccactgagctgggttctctctgctttaggtcctctctggaggtgaagagggaagtccgctgattgtttttctcttggtgcaacttcgcaccacccttacatatcccagtgtatatggtagccaaggacagtactgtttgagcctcccccattaagtgtcaacattgaatcaatgcaatcccatgcaaasaaagctgagcatgggattgtgccggtttagccagctaaagtgtggtctctgatgctgatcatgactatgaaaagggaaaatggaggagaatgatgacgaaggaggaggaggaggaaaaggtgacttgcctctagctgatgtggattatttctcttttttaatttccatgtctgygtagcttcatcatagatctcarcttaaggacaatgaaagtcgtttattgagtacttagtatgtgctggttgcagagccaagtcttttttttttttttttttttcctccttttttgagagagagagtctcactctgtcacccagactggattgcagtggcacaatctcaactgactgcaacstgcacctctcaggttcaagcaattatcaggcctcaacgtcctgagaagctgggactacaggcatgtaccaccacactcagctaatatttgtatttttagtagaggcggggttttgccatgttgtccaggctggtcttgaacacctgacctcaggtgatctgcctgcctcagcctcccaaagtgctgggattacaggggtgacccaccacacccagccagagtcaagtatttcaagtattagagttgtctgcctgcctccctgtctccctgccttccttccatctgtttgttatctgacttaatctttgaaataacccaatgatacatgatatgcattttctaggtagatagatgaagggttaggaagatgtaacttgtcctaaatcacgtgtcttctaagcggtggaactgattttctcactgactatagatgttgagcccattamtgtgatacctactgccttttaattttaaaagttctcattgttttatcgttttcatcattatcatatgatttacctcttctcttgtgtcttataatccgattggtcatgctgacatactaaaccatattgtttgccactgggaaccaattcatctgtgaaaagtcatacagataggctcgaagaaagagcttggttgtgatgttgttgttgtgacaactgtctcgggggctggagttagagccagggtcccagctgccacagttcatgtaggggtagaccagtgcttccttttgggtgatgaggaagctggatttggcagctggttttgtctggatttgaaagggaggtaatcaggggtgtgctgggagggccagaacgatccacccacgtgttggtgccacccggcartggaaaagcctctggcctcggccttctccggaaggttgtccgcggtgccagtgagagctgcttttcaccttacagcagccccggcctatctctcaggaggcctgctgataatcagtaaatgaaattcacctttccccgattcttgaaaacggaaaagatgagggttgaattatagggcaaatcatgaacactgtcttttttccagcatggtattttgagcggcacagaagggggtaattattttatttggaagaacaaatttaagtttggcagttacctgaaagaaaatttagtgattgccagtccattctctagccttctgaagaagatagattgtaatctttaattaagctatcactcacaccmaaaaaaaaaaaaaaaaaaaaaaaaaagyggggcaaggggttggagaatgttcatatcacattattttggatgtctggggttgcacctggaagctcagatagcaatatctaggcacggctgccagygctctatacattsacgtttgtttaatattttaatttccccatgagtcttaaacctctgcgtggtgtgcaagttgaggcctggtgtatgcacttcggccacgggctttcccaytgtaatgaagatggaatgactccatggatgacctttccgtgcctttgtctgtagcctgccctcctctttaactgaacaccttccagacgagcatgctctgaactcctgaactgstcattctgttctctgagagaattgctcaagctgcagtttatcattatatgcctccaaagactttgtgtttcctrtgtttgacatcgagatagaatttttcataaccctttactagtaataaatttgattgttaagggaccrggttaatcttatttctaataccagcatctgattttaaaaccctgatttaggagcattttctttctgctaccttcctaaaacgcatgggtggaaatgtataaaatatgtcacctgatattggaggattgtttatttctgttcatttggtcctgaatagtacctatgagatgcatttgaaaacttaccttgtttatatgtttcttctgttgcaatttcttccattacctggaatagctgctttggacggcaaaccaagcaatgccctttcacagstgtgggatgaatggggaaagaagtcttggtaaggaagcaattcagagaacatggaagcatctcatggcagcagtcacaattttgtgttgcgtaatatttcaggaacttgcaaccctgataacttgtgcctgcctgtctgtaggcctttaatgatgttttattgaattttggttttccmctagactttgcagtgcatgacacatagtaattgctcaataaatatgtgttcaactgaactatggtggttaggttagtaattagatgcacagacaaaatcacaggaatctgcgtgagccttgtcctactggtaaaggagtcttgtgaggattaattgaaataactcgcaaaaatatccagctctctgtttccctgctaggggctcttgtcataggagccattgttgtagccttagaaaacatacrgcattattttagggggagaggttagagtagaattttaaagagtgcatttctcttccagtaagcaattctgcatcgataaaaagtggagaaagaataagtgaaaaaatatttagttaattcttgttgacagaagtaggacttcaggtccacatatatttcattgtagagtgcacacatgcatttttaagaatttcccgattctcttccacgtgtggacagattggcacatatgtgtgtgtgcaaattgtacttgcagtggctgcctgggaaatgaaatttctgcaccttgccagarcatgttttccctctaaagagaggcagctsataattagtaatgctaatgtcggggtgagatgcaatagataatctaacaccagcaatgatgcccagagcatttatctttgatgctgggaatgcgttcattttctttatcttgccattactgtacctctattgggaaatttactctctcttcatagataggatcmgathcagtacatattyakaaaaccacacttacatttaaatacaggcctttcccatttcacagtgtttctagctcccctttccaatacatctctctctctctttctctctctctctctcwctctctcamacacacacacacacacacacacacacmgscaaatcagacaccaayataaactgtagagttaacattctttttccaccctcacactttttttagctccgatctgtgttcaatttctgcctgagagagtgawatattcatatatttaggtatagttagaaaaagcaaaatggtaacaatagaatcttgatgggattgatctcctgcagcaaggagcaacagaaaaaaaaaaaaakggaatcaagaacccaggtgctttttataggttaattgtgcagggttatcatgtatctctttaaaatcaccatcttgattctgagctttggttctacacattagaattgttgcctgggcctggatttttccccttgcatgttgcgtgtggtagtccagcacatttgctgattgcaaatatacttgtctcttctcatgggcattactagtactcaggaaatcattgatgtggggtaaaatgagaaaaggattagttttattttggacagataaacaacatgtcattttaccaattgctcattaatgctgatatttcccgtgggtctctgactctgaaatctgcatggagtggttacaccctgggcttgttagctcctacctgagctctgagtttctgtggatttctataggctcctgcaaattttatctagtggatattttgttaaaaaaaaaaaatggggtctcattctgttgccccggctgcagwgcagtgacatgatcataactcatggtgacctcaaattcaygagcccaagcgatcttcccacctcagcctgagtagatgggactacaggcatgtgtcaccatgccaggctaatgtttaaaaatttttcttagaggtagagcctcactttgctgcctargctgatctaraactcctggcttcaagtgatcctcctgccttgagctcccgaagcgctgggaccaatagagatttctctgagaattaggtcccccactattaataaggtcattgtcagctgarttggggaggtggcgtgggtagatacaattaatttagattttttaaaaggcttttgagaatattcggagaacctaatatattttgagacctgacatttattttaaacgtgaaaagcaatttacaaaattgcacatactctataaatacacttctgttataaaaatagacacgtacggccgggcgcggtggctcacgcctgtaatcccagcactytgggaggccgaggcgggcggatcacgaggtcaggagatcgagaccatcccggctaaaacggtgaaaccccgtctctactaaaaatacaaaaaattagccgggcgtagtggcgggcacctgtagkcccarctacttgggaggctgaggcaggagaatggcgtgaacccgggaggcggagcttgcagtgagccgagagcccgccactgyactccagcctgggcgacagagcgagactccgtctcaaaaaaaaaaaaaaaaaaaaaaaaaaaaagacacgtacacagacaaatgttctgacagaaatacactgagatatctacagtgcttgtctctggataggatagggtataatttaattgtttatagttaagttaatgaacttggccagacagacctgggatcaaatcccgcctctatcatgaattggctgtgaggtgtgacattgaaaaagtgatttagcctttgttcccctccaggtccttatctgtaaggtggcagttacaataatacccacctcccagggttatatgtcaatgggttaggcacagacctaggaactcagcaaatggactactatgaagtattagctttttactgtttctggttttctgatttttgtctcctgttgtgaacatacgttgcttttgtaatatgaaaaataaaaaataaaagttaaatttgttttgtttgtaagaatcagttgaggacagatgggactatttgcatggattggtgtcatgtttgaagtcagttaccagagggtttctttcaacagagtatmccamaaaaaaaaaaaaaaaaaaaaaaaaaaaagtaaattgcacagaccccagcttaggacctggacttaatcttcatgatgtttgtaaagtaatacttcttggagaaacctcccaaatttctatcgacactagacatctcaggatttgaaatgttaagctaacaaattgttcatcaggtgtatctccagccctycgtaaacactgccggatggatgaacctacgtaatgatctcctggtgccattttcctgactgtagatacttgggtaaggaggagactttgactctagatgacatgatgtaccctgtgttctgcaagctggagaacatcatgtaraatctgaaaattaggagagagaggcaatcagaaraagacagagtggtgttgcagggacctgcagtcagcctagtcccccagtttgcgtttgaatttggtcccagattttttttgtttttgttttttagtagttaaagctgagagcaaaccacattgcttactattgtcagggaatgaaaactatgcaacagaagccgatgtgcagaggtgaccgtgttcgctggaattgaacttaagcaggttcctaccgcacagatccacacaggagggattgcgtaatgcacccagcagagttgtgctcaactgtgattttataaaagacacagaaacacatattaaatagacaattcttctatcagccctctaaactggcataaccttgaatcataattcaatgaatgcatttctgtgagaagtgaaggtaataagctccaagtgctttcgtttcctttctttctttcttaatgcagggaaaattgagatgggattctcagttaaaacccaaacgacgggcctgggggttgtcacaatgtgatccctgaggatgttagccccaatgtctttctgtagccagaaccaatagaaaaatgagaggaggagagtagaagcagaatagcaaacaatttttcctttcatggtctacctgtgtgactgtgtatatgtccagaaggggatgtggttggggaagggcatagtacacatatttgagcagagtacatgtgtttcatttcttgctcatacgacatgtccagtgtgggctggcatgttcttctgcacagtccctgagggacccggacttatagagtctgtgatctcacagctgctacatctggcacagatggccttcttgatctccagttagggcgagtcacaacagcaattaaatggtttggtctgaagtgtcacgagtcgtttcctcttggctgcctactggctaggccagtcacgtggccctgaagagggtgggaatgtctcatccccctgtgggcttagaagaaaaccagaggtctgtgcacactatggatttttactacaatgatgccctttyacatacagcgagaargattaagaggtactgwattgktggttrataaagtcaaacttgtgaacagagcaaaagggcattgcttggtcattgcagcttccacccatgcaccttacacagaagtttgggccctaacatggaaacttttcaacactggccaaattctgtttgaagcactgtattgagcataccatatgctgaaagacttggaatgcaaaaacctaaggccaagggcacttctcaatattaaacccycagttgtaakggaggcatcaagactataagayccaagaccttaacttttgtgctccttgtcttgtggagggaacatccatcctcaaaacagaaacctgtgagatcccttgaatatactgacaatacactgatgagaattgaatgccccataaattgcatctcccgcagggcctgataggtgccctgtcttcctgcttatgactctgaaaccctgtttatttgtatcaaggacggttggtactttaatcatcaataaactaacatctcaacagcctgccataaatttcttgtcaaaaaaagaggttatgattagaatactgtgattaaagagaatttgtagatagacttacatccctcagtttcaaagcttctagtagtagggcttagaggttcctagagtaggaaaagcctagccaagcagaaacccatgtttttgactttcaggatatttgtgaattaatttacttgcatatattggccaagatctagcataatctcttaatattcartgaataaaaaattgagttttgagagcaaatattttggtaggaaatagagaactgacactaatattctctctgactataattgtaaaacagtagatgtctttcaccaagcgctaacattatattaattattaataaaatccaactccttaataatacwatcatagttaccatttattgagagcactcttctgaacattttgcattctttatttaatcttmcctacaaccttattaagtagacattatcttcatcttattaagtagtcagttcctcatttgcagatgaggaaactggctgactgagttaaatgaatgccaaagtcacagagctgctgagtggcagagttgtaattcccatgcagaactgtgtggcatcaaagccatttttwaactcattgcaatgcacagtgggttaaaatgagatgattgaaaatgagatgtggctgggcatggtggctcacacctctaattccagcactttgagaggataacttgagtccgggagtttgagaccagcctgggcaacagagccagaccatcyatctctacaaaaaatttaaaaattagctgggtatggttgtgcactcctgtggttccagctactcaggagactgcggtagggggatcacttcagcccagaagttcaaggctgcagtgagctgtgatcgytccactgcactctagcatgcgtgacagagtgagactatctcaaaaaagaaaaaatgagattatggccaggggtggtggctcctgcctataatcctagccctttgggaggccaaggtgggaacatcatttgagcccaggagttaaagaccagcctgggcacatagtgagacascagctttacaaaagagagagagagaaagaaagagagagagattatttctagaataagcaaaccaaacgtgaattaagttttcattctcattttagtgattctctaagtacatacccacattctgattccctcagcactttaggactgactgattagcagtaactgccctcccactggtaccactgtggccagggagtgactgcaagggtcaaaacttttgttggggagctgtttggactaagtgaatgtccagccccaactcagggatgttgtattggttctaatctctgcttctgaggaaatggttacctgcagggcgattgtggcctgctcctcgtgggatatattgagatggttccttttaatccatttcttttaaaaaaaaaattctttttaaagagatgggatttcattatgttgcccaggttggcctcaaagtcctgggatgaagagcttctcctgtcttagtctcctgagtagctgggacgacaggtgcctgcaaccatgtctggcttaaatccatccttaaacaagttcaatgttttatttccttcagataaaatgagagtggagagaccacagtgatgcccaggaatagtcatggttggcgattaaatagccattgagtctctattctgaaacaggcaccgtgttcatttgctatggctaacatgacaaaataccacccactggggatattaaacattagaaacttactgtctcacagttctggaggctggaaattcaagacaaagttgctggcagggtctctctgaggcctctctccttggcttgcagacggccgccttcttgctctgtcctcacgtggccttccgtctgtttcttggtgcacatccctggtgtctcttcctcctcttataaggacaccagtcctcttggattagggcaccacgcttatgacatcatttaacttagttaccctttcaaaggctttgtcttgaaatacagtcacatggagggttagaacttcaggatataaatttgagggggacgcagtttagtctgtaacatgctctatgctgggcacaaggaatgttatggtggataaggggaaaatggtccctaccctctgtcagttttttatggaagaagaaagacggtctttaaagaaattyacataattaatcacaaaaagctaatactatgacaaagaatgtaagttactaatacagcttagaacagatgactctaaccttgtgtaggagctagagaaggcttctctgaggaggtgaggttggaactgaagcatgaaagggaacagaagggggtcaggcaggagaaggcttgggaccaggaggtagagaaaacagtagtgtgatcagaactttaaggcccggttctgtatacaacaggtttcgggacttgaaaggcagcccacattgagtgtaactagaaagtgagggcaagagattgttcaaaagaatactggacccagagtttcatcactttgttaattacatctcatattgtgggattgcaattaccttgcccaagaaaagattatttacgattccattgtttatattgtttgttgaaataattaattctcaaaacttctggatacctgagactcagctaggaacttatttttaaaatataaattcctagtcccactccctaaagattctgagttagtacattcaggatggggtctaggaatcagtgtgtttaagaagtgcatcaggttcttctggtactgattgtccatgaaccacactttgagaaagctccatctaaagagataagttactgacgtgtgttaccagagagagcctagaaaacctgggcacaacagtagttgttaagaactaccagacctgggccaggcccggtggctcatgcccgtaatcttagcactttgggaggctgaggcgggtggatcacttgagcccaggggtttcagatcagtctgggcaacatggtgaaaccctacctctacaaaaaatagaaaaaattagctgggcatggtagtgcatgcctgtggtcccagctacttgggaggctgaggttcgagggttgcttgagcctgggaggtcaaagctgcagtgagccaagatcatgccactgcactccagcctgggagagtgtgagaccttgtctcagaaaaaaaaaaaaaaaaacaactaccaggcctgttggaatgtctgccagtttcaacccacggggatagggtgagatgaacattgattgagcctttacatcggagacactataacaaatgctttgtgtacatcagctctttcaaattaatacaattctactagaggggrcactattagtatccccaatttacagatgaaaaaaatgagggacagagaggttagatgtgtatctaaggtcacatagctcacaaacgacacagcatgcacccaaatgccaggtttcaatgaccctgtggtgaagtgtgattgctggcatttgcctagtgttgactgtgctctagacactgtattagttacaagtgattctacttctcattcattaggccatccagaaagccttgtgctttagtctgtcctggctactataacaaaatatcataaactaggtggcttataaacacctgaaatctatttctcatagttcttgaggctgggaagtccaagatcaagctgctggcagattgagtgtttggcaacggcccactttctggttcctagatgttcacctccttgctatgtcctcatatcgkgggaggggcaaagggtctctctatctggcctcttttaagcccttaacccattcatgaaggctttgcctcaatgacctaatcacctcccaaaggccctacctcctaatatattatattggtgattaaatttcaacatatggctgggcgtggtggctcacacctgtaatcccagcactttgggaggctgagatgggcagatcacttgaggtcaggagttcgagaccagcctggccaatgtggtgaaaccccgtcttttctaaaaacattttaaaaattagccgggtgtggtggtgaatgcctgtaatctcaggtactccagaggctgaggcaggagaatcacttgaacccaggaggtggaggttgcagtgagctgagatcacaccactgcactccagcctgggtgacagagcaagactgtctcaaaaaaaaaaaaaaaaaaaaaaaaattcaacwtacsaattttgcgaggacgcaaacatttaatccgtagtactgatgtggatatgatttgagctaagactctgctgttgattctcttcaaaaacttggcagtagcccttggatcccattaattgcattcaacagkcatgtattttattaatttttgttcctaaagaaaaaaaaaaatccagattgcttagaaaataaatgtgactcacgcagagcagaatccgaattttctaagtgatgaacatgttaacatattattttaatctaaagacatcctatccctgaatttagggggagacatttttttaagtaaggtttatttttaaaattgttttgcaaacattttaacagtacatcactgcctcattggatgaatcatatttttaactttcacttcccatcaatttaaacatcatctctcaaggaactgatgggccggttgactctaaatgattttgcctttcatgcagtattgttccatccgcctgccacagaagtgattccaggtcattccaatttatttaattaattttggagatgaaattattttgcccaataactagaatgctaatgggacttagtgtaatggtttagttcaggtttgttggtttgaaaataaacgccttcatttcaatatttgccttttggctgcagcccgttaactggtcacatgctgtaacctcattaacatcaaggcttaattgtaagttaatgtgcacctagtttttgtaaagaaggtttctatcttaactgccaagttttgccccccaaatatagccccaaactggcatttccaacagatggatgggttggtgtaatataattcatgcttttaaacatcatacttttatcggtgccttgataataaatatttgaacttatttttagaagttagaataaagtgaggaaaataaatctcagctctctagagtgtcactgtggtattgagatttgtggaggtgtactacatccgtaattgggagagattgccggtcgtaaaggagggacaatagaacctctgtagaatcaaaggcagaattaaaatctgcatgttaatagctttcctgccagccacgaatagattcattcttcacgtctcaratatataaagcttatttcaaaataaattctggggagcgttcaacctgattgaatctgctgtaagctctgttaatatatttgttcgagtcacttgcactcaaaaggtttttagacagaatatcacttttttatattattcatggtaatgtaattcccccctttaatctcttcagggtttcccattcagtcatgatatgcggttcaragaaagttggatcgaccattaatcatgctatctcgacttctgtgtgtctcctttttgtccatctcttaaatcagtcacttggcagcagcaagacatgtggccactccagaccawttgatcgaaragctcttgttaggagattaggctgctaatctgcaagcgagctaatggaaatcattctgggcaaggaaacaaaactgaacaacattagcaaaatcactacatattataggaatcaagtacattctgaacggcttaatcctacagtttagatatgaascctaagggtaagatgaacgtcttagatgatctgagatatccaaatacctgtaacaaacatttgtatggtgtatgtagggcaggaaccccatcagaattggggaatctttaaaggattttttatttagccagataaaataaacaaggacagagttgactgagaaaaaagaaagaaaaaaaagaaaagtcaggagaggaggactgaaaattcccatcccacccccgcaacaatgaagggaaatgcctaggttgaaaacacgcaatacacattcaataaatgttcatggttgaatgaagttacctggtagggatttaatctttatttcaaaaagagtggctgtgaatctttaaaaatttctttggttctttaacattctcttcttcactaaacccaaattaataattccttactattgkcattaaaagttctcactggatcattccatttatactcagarkaacaaagcaaacccaattatttgagagacactgaaatgaattttgagtctagaacagcatctgcaaactttgcaaaggttcacatgataaatattttctgctttgtggcctacaaggtacctatcacaactactaagctatcatgcattagtgaaagcacatagataatctataarccaatgggcatggttgtgtgacaataaaactttatttagaaaaacaggtggtagactggatttagcttgtgggttgtagtttgctggcctctggtcaagagcacttgtttgtctgggagacataatttcaaaaatcattttcttttttgattttcatggttttagaacatgatattttctactatggatgaatgctcctcttttgaattttcatttttgtctgacataactcaaagtgcttgctttgggagttcttgttaaccctgacaawtcttgtcaaatatcttactcctgggctgtgctggggatggcagcagagtggggtggttggatggraaggcgggaaagagctagcttggagatgatacgcttttccayccttgaataacttgggaaaaagtcaggagtgtggaatgaagaattggaatataaaggctgagggcggacctaattttttttttaaggattaagaaaaaaggagtaagagagatggtatgacttatcacttggctggggactcagcattaattgataaatccactgtaaggaatgcatgacactgtcttttgaagaaagacattgcatgttaggattctgagtaacagtcaatatattcagtgaaacaaatacctaatatattccatgaaacaagtatcgtgaatatattccatgaaacaaatatcatgaatatattgtgtgaaacaaatatcgtgaatatattccatgaaacagatatccagtatattccatgaaacaaatatcatgaatttattccatgaaacaaatatcgtgaatatattccatgaaacaaaatactgtgaaatcataccastgatttttgaagaaacctaatgaaaacagcatgctcctatatcttttttctgggtgatctttagatatctcgtcttccaaacttttgtgtagcattgtctgaattttcccaagaaaggaggatgttgatctcctatttatttatatttatttaaatttttaacctttacattgacccagtgttgtaaggaaatgggagaatattgccctgatgtctgggaaattgggactcccatcctacaattcaagtgttggaatgttgcagggaggctgggctaaggtgttctgttcctgtctctggttcaaaggaaaggaatagcctagacctaaaggattctgtctggtagctgkttgctcttcgcgcctgtgctttgaatggtgaataccctcggcgggaggcaggcacctgatgccactgcccccgccccacctgcccccgccccgtttctcagatcacacaggcaggctgaggagygcttaacaccccagcctcccatgaagcatcctgaaaaagcagactttgtcttcctccatcagctttgtttgtcctctgccgagactccagggacatgattgctcttcattttacgctcgagatcaaaataaacagaaaccactttcagctttcccgttccagggttaagtgcccaagcaggtgttgtttctgttatgtggtttgcagtgagcaaaaccaccccctcttamctgtggcagcaaaggcagggagactttgagacctggggagggctctctgctgtgttaacagaactggctcttggttggggggtggggggcacccattcttggcttcttataacacttcctttctcatgcattacctggggctccctctggaaagaaaatggtggagaggttactggcctgatgacccagggacccaggcagtccttacagggacccagaatttcacawgcaaatgtgacctccaattaaagctggacttgattaaccccatttcccctcaaaagatgatacttgtaatgccgttccgatgaggccgtctcactccgtaaactgtcatctgatttacacaaagccatctgcttccatacggggtgttttatttgggatccaggaggggagaaggcgcatctgccccctccatagcatctgaatcttaatgaataaaagcactgacacttctttaaaagggaatagcgtgatgctatttacagtttatacagttttgtaatccagctccatgctggatatttaccgtcagtcatttgaggaagttcacttctctgctggttttctgagtgagggagcgatgagtagaggagcagctggagggtccaggagccccctgaactgagtatccggtgggaggtcagatttccgcattcagaacgagagctcatacggcatccacgcgtgtctttctcaygcatatccccagcccgagtagaagaggacttctgcatctctgttagttctttctcctcctaagaaaaagcagattttaagtaacttatcatttgttcatttaattactcattctttattccttcttcattcattttccttttctccttcctttctccctctgttctctctgttttaacaggttttattcttattgtggtatggtaaggccaagatgaggaaatgactgctattgcaaagatggtttgttactcacagatccatggggactccacatgccacagggagttacctgggaaagccccagggttgggcaggaggcagagggagagggggagaactgtcaagagttttgagctggaagctattatcctcagcaaactaacacaggaacagaaaaccaaataccgcatggtgtcacttgtaagtgggagctgaacaatgagaacacatggacacagggagggaaacaacacacactggggcttgtgaggagtggggttgggggagggagagcatcaggaagaatagctaatggatgttgggcttaatacctaggcgatgggttgataggtgcagcaaaccaccatggcacagrtttacctatgtaacaaacctgcacatcctgcacatgtaccctggaacttaaatttttttaaaaaatgtttttattgtgattttcacaggaaagaaggggccaggcagggtaagcaggcttaggattggctggcttgggtcatttccatgggctctgggacacaggggttgtctttaggtgtctgacccatggctatggggtgattagggtaggtgggtgtggcctggagttcgagcccaataaagccagtggtgagggtgtggctgtgaattggttggtttgcatttgaactgtggttaccagtgagctgtctactatctctaagaatccgctagagccctgtaaagaaagcctacaagggagcaggttttaggcaataataagtgagcagtatggcgccctaatagaaggagggatgcctgtggccaatatacacggctcaaagttgaccatgatagagaasytttccctagaaggtctgtgagggaggaggcctgggagagacagcagggtgaccagagtaagtgaagtcaccgaggtgccaatgagtgtggccctgcaggtcctgcagacccccctggtggcagtattggtggtcacagctggcaaagggaagtgtggctgcccggagagcttggctgaggttggaacgtgggagtttaagagagcaaactccmacagcttggtgcagagagaaaagtgtagaaaggtcgggtgtcatacagcagagggctgtgatgctctactgaggagtggaagtgtttttctgagggcatcaaacacgccgtcaagcagggaggcaacaaatctgagtygttccacagatactttgagtgcagtacaagttggtaatgggtaacaggctaaaccatgtggcaccccttccctcttatcagcttcttgctaccatgcagaaaagtgctgaaggtggcctgccytaaggcagtagcactagagcagggatggggaggacttgstggccagatgcatgtggacatgatggaaagggaagagaagaactgtcaagattttcactatcagtggtataagccccgtagtaatatgcctagtgttccattattggaacactaagtatgtgggaattatttatatcctaccgctcaaagccatcaccaaggtctgatcgtgaaaattcaaaaaattgcaacctgaggcataaatgggttttaagctccatacagtaaaacytagcatatgaaaacagttctggctgatgggttggtagaarkgatagatatagatacatayatacacatatatgcacagtaatagatataggtaaagaccttgatatatgtacatatattgtatgatacatatccatgcatatacgtgggtgtacacacacaggtacacacaaatatatatgtgcctttggacaaraaaaaatccccaggacagtctcatttggcttttaaaatgctgcagttgaataggaccgtagaggtggcctaaggcagccttccattcagggcacgcagatttggttcctcagctcccttcttctctatttctgagtcacgtgggctgcacctatctgtcagaagcccactgcccacccagagcccctgactctgaatggtggcccagtgctttctgaagacagaggtgggacctggtgctggagacaatccattcctttcacaaagactgtaagccttacccaagcattaattttgctgcatagrcggcctgttctcccacaaagcactgagtaagaagaaaaggggcccggataaaccagcagggcctggcagacaacttctggctcccttgccatttaaggtcccgaggaatgtggagacattggtgggggccagggtgggtttggaaggacggattttttcctctttgtctctatctctctttctctctgtctttttctctttctctcatagttaatgctatgattttgtaaaaaaaaaaaaaaaaaaaaaaattctagtttctcagaatcctcattggaggcatgtgtatatttctaaatttaaatgtattctcctatactgtccggggaaaggaagcatttttcaaccaaactgaaagggaaaggtactcttttttattctaatactcacatttcccaaaacatatccttaatattgtacatttggcacagttattgttgaatacttggaaggcgatgtgtatagcatacagagctgcagctttggactttgtggctttaggtaaattacttattctctttgcacctcagtgtattcttctgactaatggggacagtagcaacatcgatgtctcggggcttctgtgagtattcatcaaggtaatatatgcaggccagtaccacattccccactaaaggagtgccactttttttttttttttttactacttgcattattgttgttgttgttgctgtacgtctgaagggctttagtcctcttatgagcaaggcaaaagggacaatgttcaccctttggactggaagtaagaagcccctgcagttccaaatgactccacatttggaatgatttcacaaggagtgcaaaagaagcctcttgtttgactttgcccacaaatgccagaggaggactcttctgagccatgccaataagaaaaatgagaatgccagcttaaataaatgttatcacaatctctgcagaatcgtgatgtctccgattcttaaaagtgtctactgcagggtatttattattctgtgataataataaatcgctgcttatgaaatgcaaggaatcgagtgtcatggaggggaggaagggaagtaacagggagaagaactgtgagagatggaggtccagccaggcccgggctattaatcatcgccctccattatttcctgaagattcattcattgttccataggtacctagagggtcaattagagaccacagacaggctttttcaaagacgcaagagggtcaattaggccctccttataattttctgctttaacagcaaatgccagcctatcgtgcatcagatgcaagggagtttggaaataaacagggtactttccctcctcctctaaaaaaaaaaaaaaagaaaaaatccaacacagagacatggagacagtcggcgattgggaacgcttggcttgctggctgtcaggatctggttcaaggaaggcaaagggaattttatcaccaactgggacttgagaggagcagagttcttctggtctcagagcacggggaacggtcagggaatttgtatgatggagcaccctgttcccatatctgagatgattcatttatcttgagtgccatcttaactacaattagagtacaattataaagtatctacaatggaaatgggtcttgaaatcaatcgcagctggaccggcgtgcggtgagttgccgtgcccaccacgactgctgtctgtgtttaggacagagttcaaccaaacgtaccggtgtgtgattttgcacaacactgctttgtatttgttttccctgagaccggcaaacacattttttatttattttatttttatttttcgagatggactttcgcttttttgcccagcctggagtgaagtggcatgatctcggctcactgcaaactacccccgcccccgggttcaagcaattstcgcacctcagcctcccaagtaactgggattacaggtgcccaccaccaagcccggctaakttttstattttmaatagagatgaggttttgccatattggtcaggctggtcttgaactcttgacctcaggtgattcacccacctcagcctcccaaagtgcagggattaaggcgtgagccaccgagcccagccggcaaacttaytttaaaacacattgcaataaaataaaaagaaaagggattgtsctaagtgagaagcagagatgaaaatgtggaaggatgattgtgagaagtccacattgctccatttggacttcctttttgtagtgggctattagattttgcctctgcttgtttctgaatacccaagcttgctaacamagggaaagaccaattatcatgattattattatttaccttaagacctgattctacctatctatgatcacatagacatttggaagcaaagagaaatgcttttcatgtgggaaaaaccaataccaacttcagtgatattatttctccgccccccgcaccgggctcttgggaatatctcttagccctcaattgtcacattcattcagcagatgttagcacgtgcaggcaccattctaggtgttggggatacatccaaaaacaagcaggaaaaccccattctcttcatttctggaatgccggagcactgggcccatggagcccgtttcacttacacgtttttgtcgtctttgagtttccaagaagggagtggcactatagctgaagaggatgaccctctatcacagcctttgctaaaaccactgaaaactgtcttatttttcattttgcccggaaatgcgacacataagtgcattcctctagggaaggatttttttttttttttttttttttgagacaggagtctcactctgttgtccaagctggagtgcagtggcgcgatgtcagctcactgcaacctccgcctcctgggttcaaacaattctcctacstcagcctcctgagtagctgggattatagtcacctaccaccatacccagctaatttttgtattttttagtagaaacagtgtttcaccaggttggccaggctgctctcgaactcctgacctcaggtgatctgcccaccttggcctcccaaagtgcagagcaggaatttcattggatttstacactgctgctttttcagagcctggaacagtgccaagcacatagtcggccctcagtgagcatttgttgactaacttaggtcacagatgtggggctgtgattctgaaggccccggctcattcttggctttcagagaggtttgctttcactcctgggcagcagctgccctggctgctgccaccaccgccttcccggaggtcagctttattttcagtgtttttgcccttccgatccctgggtaagaagtaagaaaatttctagtgcctggagtctccatcctcgtttcccagtcatatcctagaagctgcaaattgctggcttgtggatgtctttggtttggcctgctgaagtttgttttggattttttaatgaaataaattagctgtgaacatttaaaacttgggagacatcccatcaaaattgggatttcctgcttatctcgacaaagcagatctggcatcctttgcctgcattttacatttggctacagttggctggacttgagcagcggctgcccctctttagctggggcatgtgccctgtggtttgccatagtacccatcaggcctgcttcactcattgtagaaatggcctggcctcctaggcattggagatttctgttatgctcattcatgagcttgcctgcttacacctagctgttgtgttggttctcataggtctccctgattccagcctccaattcactgagctggcctctgccagtgtcacttctccccagtcttggctttgatcaagcttggaaaggcctggcctttgtgttgtcacattcttctgcctagagtatgccttttccttcaccaaaccaagtggctctttcggaagacttgcctgaatcctagaccccttctctctacaacmttcagtstgagttgggtaccttgcatcctcctttgttcccatactaacccctacaaccatggtcattttgtggttatctgtttaattctctgctggctattccaggctgtcasctccctgactacaaggactttgttgctcacaatcatatccacggcatccacacaagatctggccgctacgtggaaggacacatagttccgtctggcttggagcctagcttgggagagggacagtagtggggaagggtgagcttggagatagagctgaccttcccaggtgcttcagcagttacagcaagattctagatcttaccctgacagtcacagaaagcactgggagcgtttatgaatgttgtggtatctcacataataaggggaccatgcatgtattttagaaagagccctytggcttcagggaagaacgatggatttgtgagggtcaggactggtagcaggtgggctcctagaatagtcccggcaagagatcatggaggccagagccagggatggatatagactaagacatgcctgtagactgagtgtcgaggagcaagtagatcaaattctagcatgagactgggagaaagagatgttctccagccaatggatttatgaaatgaatgaactttttccctttcctcccaagcattgcctggatcaccttgttaatatggtttcttattaaacgtgctggaaaaaagaggctctaagtgcgtatgcttttaaagcaacactattagcaaatggccactggcttcatttttcctgtgcatatatttttgtgtattccgggaggattttcttttctttttctttttaatcctcctcctcaagggaaacattcttctcacaatagcttcctggtagaaagttctaactaatgactttratcgtgtgmatgtattgcagaaatggacaggrcarttctcagcccattcatcttacagacctcaagtgaacaggcacaaaacaacaggctccaccctccttcycccctctatctcatactttacctcaatttatgacttggcttacaatccgttgcagaaagcctagctccccagcttctcctgaatctacgtttttctattttgtctgaactagccaaggtctctggwgtttgctgttatmttgcttcagagaaattagtgacattgaaaggctgttgtcttttttaktgtacttttggttgttaggagaaatttacaaggccatttttttctcccgtctctgcagttcaggagattatattagaaaatattctatacaaaaaatatgcatagtagggcttttctccagctagtagctcagaataagtcaktaytactgaaacaggtaccttttgtggaattgattctgaaatctgtttggatctgaaatctttctttcttgcctttgagtaagayacggcagagaaaaacaattacactagctgctggtctgtatttactggttagaatagaatattattaccatcaagaataacattagtggccaggtgcggtggctcaygcctgtaatcccagcactttgggaggccgaggtgggtggatcacctgaggtcaggagttcaaaaccagcctggccaacatggtgaaacccccgtctctactaaaaatacaaaaattagccgggtgtggcggtgcatgmctgtaatcccagctacttgggaggctgaggcaggagaatcccttgaacctgggaggtggaggttgcagtgagctgagatcacgccattrtactccagtctaggcaacaagagtgaaactctgtctcaaaaaaattaatrataataatgttacaataataataatgttagtgatacatatcattttgaaaccagttcttaagcaattaaaaaaaagcagctatggtgattgagtttttgtgttatgaattttatactctgaaggcatggtcattgtgaatgccaaagaaatgaacaggagaaaattttatttgaaagctgggattgttgcatgctgcagaatttttttttcttttgctattgctgtgtaacaaatgaccacacacttagcagttcacattcacatcttgtttattaactacaattctctagatcagaagcctagacacaatgtgactggcttctctgctcagggtctcttgggkacaaaataaaggtgtccgctggaggaacatcctttcctgcatgctctgtggaagaatccactgccaagctcattcaggatgctggcaggattcagatccttgaagttgtaagactagggcccctgtttcctactgacttctgctggtggctgccctcagytccsagaggcaacccacattccttgacttttggccccctgcatctcaaagccagcaacagaaactctcttgtgcatggagtcccctcctgctttgaatctctctgactttccttgactttgatgtytaggtytggatttcaagggytcagaaactctctcatgcatgtagttccctcctgctttgaatctctctgactttcmttgattttgatgtctaggtctggatttcaagggctcacgtgatgaggatagtttctttatcttaagggcaactgatgtggagtcttaattaacactggcaaaatcccttcatgacagtacctagagtatgaattgactcagtaactggaagaatgcatgcgtacaccatggaccgggaatccgggaggccaatttagaattttatgtatcaaagccccatttttttttgaataacagaaaaaaaaaagagacctgatatttggagagactttttcaaaagcagaaagtttaatataaaagaaagggggtaattgaagaagatataaactgcaaagaaaggatgttaggtagagcgccttatagggaatcagaggttttattacaggcagacacggcttcacctgtgagccgagcaagtgattttgcctgcagagaagaacgcagggttccttctatggctcaggatcttcagttaccagcagtggaagtgaattgaaaatagttggtctcttgagtgacctgatgcaactcattatcttctctgtgccttaacgtctctatctaatttcccattaaaagtaacaggaaaaagcgcaatgacttttgcaccaacctaacaatgggttgacattcaggattgctataatgatgaagcaatggcaaatggagtctttgtttttagccccgtggaggcatatgctgggcactcaacaaacatcacttcccctgcccttttctcagatagagttatccaaacaaattggatgctcaactctggatttgatccaagctctctggaaatctctagcttctcaaactgtttcgtggtggagtgccttttgggcacaggagaaggaaataagagcctcgcgaggtttgggaatgctgcctstagctytyacactgcatgcagaattcctactctgagagctcactttatctcaaaaacccatgcatattctgcatctactctgaattccgcagtgttgtgtgttactatacgatctagtgttttcgttgcttacaagttagattcacactccaggaatgtatctgttcccacatcccctgatgctgagcataccagagttaagggaggcaagcaaggcccytaacctccyaggttcatggaggtacccattctgcacttgttgaccttgagcttgaggactccataaatgtctgcccttggcattgcacgtgcctccctctgggctgaccctgctgggcctgtcacttactcccattggagaggcctgtttccatacatagctctttgtcagttgctcacactcggtcaatacttgccttcctttgaggccatctgcactcactgacaatctgatygctcccctgaatggaggtgaaagcatgcaagctmggagttaagatctttaactcagggaagaccctgtctatggaagtgctgagctcttcagtgtcatcacagaaaagcatgagcscctccctggtacggagtcatcacatcccatagctgagcgacgtcggagctccacgatggggaggtgacacatagtcagttaattacataaagagaacttgagcaaactcttactctgccatatgctgtgcagatccctctgaaaagctttacagatgttcttttttttttttaatccctccccctatctttctttctttgcacccacgatgctctgcacttcaagctaaatataatgtatctgattttacagcatacatactaatcaggtttgaaagttgtcttgtgaggctttaaaaagctagccaagagcagtgcgatttctccaaaaggatgtctgcaatcaagatgattacatgggaaaataaatcataatttatattgctgaaaatgtcatttgcaaaacactttgacaatactttcctttcagtctattttcctgtgtatggggtaagtgttgcccttctgcaactttmcttttattttatttatttmtttcttttcaatackctgaatatcactggagcagctgcagattcagggcagtatggggtggttcaggaacagaactgacaggtattgaagccaaaaaytgaacaataacaacgtaggagggagaatccaaagatagtatgtgttcaggatacgggcactcrtgtgggtgaacacacacacacacacacacacacgcttttttttttttttctttttttttttctcctattgcaatagaacgtaaaggtagatttttagaaccaaatgccttttaggaagctacctctcttccaccctgctgcctttgtgttgaataaactatattaaattatccaggaggaatgrttagtgatctgattcattaatatcccttgttattaagaactgtctgtatttgtgtcctggttggcagatattaagtccacagatwccaataattaatatctwtggttgattgtaaaaatggccaccaattcttccctgtcccctgcayatgtacatccttgcactgtgaaattgtagatctygccctccaaaggtgaagttcgtttgtccactccttgaaccaggatggcatgaaacttgatttgaccaatgaggcatttggaaacacggcacaagcaaaggcttgaaacgtgcttttatgttggtgcttgcccacttgctgtgctacgaacccttttacttytgggtgcgaacaarcccaggctagccttctgggcgatgagagacacaagaccatgtttccatattgccccagccaagagccaacctacagacgcaactgccttgctgacagcagacacctgcccagctgagcccagcccaaattgctgactcatgcaatcttgagctaaaaataagtagctgttgtttatagccactaatatttgtgatggttcattgcacagcaaaattgaatggagacaatacttttgaaattgactcttcgggagctgttgtaaagaagtaaaatgtgtagtgtttgcccttttcctcagctgtaggcctggtatgcagaagtattcagttatttggtgagtgaaccctcgctgatgccctggctagtgttttctgtctcaggaagcatgaacatttcatccagggttatatgctacagggatattcaagaaattgaagatccttgaaaatctagtctccctcacaaggatcaggtggcaggatctaatgggaggggtagagagtgagtgttaacacacagagaacccaggagacctttctcagaggtctcatatsaagaaaagatcatttctcctaagcaatcaatttctttttaaatctgaacctcatatctgagaatattcccttcttttatctggccactcgggagctcaaaaataaatttctggcacccttcttcctggctccagtaaagtcatacaaccatatggtacctctctggcaactaatttcacctatttccttatttgtttaaaaattttaacttaaattttttcccctcaagatctatttacggatcatcagttttattttttcttttctttcctctttttcttttgctcccttttctccccactcttgactcttctctagtttttatatgcagtttgtatttatccatgccatctgaaatcctccttcctttttaacaaggcaagtagaaaacgaaaacaacatcaaaggatacactacmcaattgttggagccctaggamccgagagaagagtacaagcaggttcttgaactgttctctccccagcaactataactggaaggaacctcagtttgtccattcattcattcatcagagcagcatagcagagtagaaggaactctgactttggcattggtgcctctaagtttgaagtctaactccatcactgtgtttctttcctcttgctgatagctgatttgttataaacaaattaccaaaaacgtactggctttaaasaacacatgcttatcatgttgcagttctggggagtcacaagttcaaaatcastctcacctggtcaagatgtcagtagggcttgttccttctggaggctctaggggagaatctgtttccttgcgtttttcatcttctasaggcctcctgcattccttggctcttggccccttcctctggcttcaaaccagcagtttaatatcatcacatctcctttactgattcctcttccgttgtcccatcacattctcctcatctggccctctggccactctcttataaggacccttttgatttcattgggaatacccagataatcttggataatcactccatctcagggtccttaatcacatcttcagagtcccctttgccatggctgatgacagagtcacaaatttggggaattagtgtgtagacttctcttgtagggagtcattattactctaccacaaccactaattctggacttcacgttccctcatccatagagcagggataacaatatcctccaggctatccgcggaagaagagaatataagctttatccagggggccactcagtgatgggagtcttccttatgaagctgtcccagctccatctctcaggactgaaatgtgggtaagaccatcacatttttcatcccccgccccccgsccccaacattgactgggcagatattcatacaatggcgattgttttgtctgcctggatggctttaacataataccatagactgggcaggttaaacagcagacctctattcctcacagtctagaggctgggaagtccaaggtgaagccatgggcacattctgtgsctgcctgaggctctctttctggttcccagatggatgcctttgtgtgtcctctcatggcagagagaggaaggggtctggaacctttctcttataaggatactaatcccatcgtaccccgtcccccatgatctcawttgaaattagtcacctcccaaagccccacctccaagtactgtcmcactggggcatagggcttcagcatatgaatttgggggagctggggagaggaacacatacatttagtccataacaactatctcacttacctctctactaagtgattcagaaaatagcaagtatagtagtgggagaacatggtatcagaaccaggagagggtcctctggctttctgagttctgccaaaaaccaagttttgytgccttgggcctgtggcttytcctccytgattgtcgctggccttgctgtaaattgtgaggcatccatgtgaggcacaggatggttccaaggaccaactgaggctgtctgtgctgaggctgggagggtgtaagtgctcagaggcagccggaagctgtggtttttacctcccaagactgtgcagagcttccttcttctgtagggagaagtctctcaggacagggctcacaacagtgcagtcaggagattggaaattttagtgacaccaaagtgggctttacttcctcctcctagaattcctgccagaaaggtggagatgtgcaataaactgagcaccgatagagtaccaagaacatgctttttgcacattgtttgattcatcaatcagagtggggcatggctgtcatcagttcagagttgaaagaattgaagatcaaaggggtcacgtctctgtgaatagtattagtaatagcagcagtatcgatagcaatcatagtaattaaaatggaagcaaccaccagtgtaatcatagcagaaactcacatgtgtgtgctttctatgtgccaggcatgaggctgaagtcatacattcattatttgttaatcccaccctaagtgatagktgtattcatcattctcagtatcagaagaagaaactgaggttcagaatgacccagtaaagatcacaagcccaaccctggtgaagggcgtgattggcagaagcccaatttaagcccccatcatgtcctgacgctttcccaaagctgagctgcctgccagggtctttgctcttccactgccaagaagtaaggttttggttgggcgcggtggctcacgcctgtaatcccagcactttgggaggccgaggtgggtggatcacgaggtcaggagatcgagaccatcctggttaacaccgtaaaaccccgtctctactaaaaatacaaaaaaaaaaaaaattagcccggcgtggtggcgggtgcctgtagtcccagctactccggaggctgagacaggagaatgtcatgaacccgggaggcggagcttgcagtgagcagagattgcagcactgcactccagcctgggcgacagaaggagactccgtctcaaaaaaaaaaaaaaaaaaaaaaaagaagtgagttttttttgtgtattctgaaaggttcccaagctcgccgcagcctgctattgtatttaaagggtgccctttgctgcgtaactagggcaaagaagaaccaactggctgttccccactggctgtggagagttccagctcatccaccctgcctctgtggctgagtcggggagaaaaggacaaagtttttctcccgcaactgggccaccaaaccagcagagcctccagccrgggtggtctcgaggaggcccattaccggctggagtgacagagtgtgtcaagcctgcagctcgtcccgtgtctaatggaacagaaacaagcaccytgctgcccttgttttccagtggctcaccggggctytgcgaggtttattaatcttagcgtataatggaaaatgtgttgccatgtgaaatctagagcctctgttcactactccgcgaattgaaggcggcaggagtctttgtctcatttacacacagtgcctgcgagagactcttagggcagaagaacgccgtcgtaaaaatccgtgcggaatttgaaagtgtgcattaatgcatgtgaccagatggttctaaaatatgccactttcaccaaaaatcatcctctgaaaaactcttctgaacaacatcggctgtgcatagtaactgccttgagtggggccattttagaaaatatatgaggtacgggatgaagatgasggaggaaaatggttcctacttatcattactttgtccctccaaaagcctgcatgcgggaagaaaaatccacccagtgcaagaaccgtggcagtactcagaccatttagaatcactttgagttattaccaagaaattgctaaccactgctttccaagttatatattaaatttttcttttttttaaaaaaaagcttccaactttttttttttttttttttgagttggagtcgcactctttcacccaggctggagtgcagtggcccgatcctgggtcactgcaacctcygcctcctggattcaagcgagtttcctgccttagcctcccgagtagctgggattacaggcacccgccgccacacccagctgatttttgtattttagtagaggtggggtttcgccatgttggccaggctggtgtcgatttcctgaccttgagtgatctacctgcctcggcctcccaaagtgctgggattgcaggcatgagccacagcgtccagccccaacttcttaaaagccagaaacaactggctgttagctgtcacaatattaatactagtgtgtgcaagtaagtttgttttctgcttctgtcttacacgttttacgggctatcagtagatgcatctaataatcctaacactgtcatccttatacttgaggtcttattgtccacttctaccttagctatgtwaacagatgagtaacctactctggatttacccagatagtgctgttaggcaccacacacgatgagattggaggcacctgggtgtcagcctcttgggctggctcattacaggccactctgtctgaggaacactcaggtttgcaaaccgkttcttaaaatwacaggatacctagggacctgttggggtgggwgggaagaaccctatgggcagaaatgtgactttctgtagcaaagatgtactgtttcccactgagaagawtcaaaaatagaaaagtgcttccttgtctytctatattgttattaaaacaagtagatgcattttcrttgaatcaaggcagttttcctttataaaatgtcctatttcatatcactgttcaaacttgacatccacatttgagttggtttaaaatatcactgttttgttgacattcacctgtattatacatttcagttggtcaagtcatttaatttatcataaaccatttaaggagcagttggagaaaagggggaaaaagttaaatgttaatgattcttttcgtaactgcaattttatcggctcctttttgtacatatatgattatgaagcaatttgyrtgaaatttacaccttttcaaattttgaaaattgccttgttgaaaaagaatcgctgtacttctcaatactacactgattaatcacagttatagagtagacataacatttttattaaactctcagtgagcaggaaaattagcacttcctgcaataacgatactaatttcattastgaacgttttcatttataaagtgcttcttccttatcttgaaccttttatcctcttcttattgaccaaagagagggcatatctttgggagctgctaataaaccatattcgtaatatgatgtgacctcatcgacaggctgctgcttctagctcatcatcttccttgatcataaatacccatcggtacctcttgtcacatggtgctcttagagcttcctctttgaatttcacatgtgataagagatggtttccatcctgaagagcttgcagtgggatggttatcggaaagattaaaactctaaaactaacaggtggatataaatataaagaaaatacagtattttgttgatttatgttcatataacttctttattggtaaaagggagacaggtgagaatacaggaaatccttgtggccttgtttgccttttttagaaatttaactttgcaaacaaactcaggggaaactagtgaggtggaaataaagaatgctagactacgggtctggggcccaagtgttttattaatataaaaacttgcgtataaatgtccagtttcaccaccaaatcctttctgaaacattggtagtagatgaactaatgcaacaatttatttttctttgagacaggatctggagtgtggtggtgcaatcataactcactgcagcctcggtctcctgggctgaagcgatcctcatgccttagtctcccgagtagctgggattacaggcatacaccaccatgcctgcctaattttttttaatttttcttttatagagatgcagtatcgcttgttgctcaggctggtctcatatgcctggactcaagtgatcctcccgcctctgcctctcaaagtacagggattataggtgtgagccacgaagcccagctgctgcagttactcaaccagcttcctactagaagccaggcgtttctcaagcttctgaagacacaaaggtgaaccccagacaagccaggtttacagagtgtgcatttcagtgggggagccagccaaaaaatcagtaaacaccaagataaaatatattccagtggcgatacattttcagaaacaaacaaacatggcactgggctggaaatgaatggcaggggagaaggcgggcggggcaagctttggaaagcacgggcaggtaaggacagggtttcaaaggtgagaaggagctggcagtgtgaatagccaggggaaaagtgttktgggtagaaggaacagaaagtgaaacggtgccctggcaaggcaaagattattcatkgctgaagagactatgttgcccagatgacttgttcatgtaatctgtgatttttaaatttagaattgaggtttgaagggaagtattgctcctttctttatctgcaatgggaaagcttactgtagttacttacagtagaagagaaatgtacatttctgaaaatccactgaggaagaaaggggcagtgatgattctaaatgttaataatgcagacagcctttgctttatgtatcaatttttgtaaatgtgttgcttaaatagatttttatgagccagtaatggtttagaaaggtaaatgacttgcccaaggtcatacacccagtacacttgggagccaaaattcatcatagatgactttgtgaaatgtcccattaaatgtgtatatatatatatagtgtgcattacagcttaacagacacacattcatttgacacattatgttttaactttattaataagtttttgtgggcataggtcttgttttgccaacttgacatgtggattttaaagggcaagtgccttagaatacaaactgtcctataaagaataccatattatcgaaaggatgttcaaactcatcagttagaggcgttgcagttggctgggtgcagtggctcacacctgttatctccgcacttaaggagtccaaggcaggtggattacttgaggtcagaagctccagaccagcctggccaacatggtgaaaccccttctctactaaaaatagaaaattagccaggcgtggtggtatgtgactgcaatcccagctactcgggagggtgaagcaggagaatcgctggaacccgggagacaggttgtagtgagctgagatgtcgccactatactctagcctgggcaacagagctagattccatctcaaaaaaaggcattgctgttaatacaacaatgataagttatttcacactcaccagattggcaaaacgttaagtactaaggtcataacaagcactggaaggatgtggagaaatagggaattttatgcattactgaactgaaacagccattttggaaaatattttggtattacgtaataaagtagtacttagcaacttatgcaatttggttcctataaagatgccttagagaaactgttgagaactaggaaaagctcaggaatgtttctggtgcataatttgtgatagcaagaacctgaaagtcctccaaaagccgtctacaatgaaatggggaaattaatggtggcacattcctgcataggagatagcagtgataatgggtggataccagaacgtgcatcaacacagaagaatctcagcaacataattcaggattaaaacagcgtttacagctgggcacagtggcccacacctgtaatgccagcactttggaaggccacagtcggcagatggcttgagcccaggagtttgattccaacccgggcaacatactgagaccccatctctactaaaaatacaaaaattagccagtgtggtatcatgtgtctgtggtctcaggggtctcaggtacttgggagactgaggagggaggacctcttgagccgggaaggtcgaggctgcagtgagccatgattgtaccactgcactccagcctgggctacagagtaagactctgtctcaaaaaaaaaaaaaaaaaaaaaaaagcatttacataggagaatatatacagtatgattcaatttatagaaagcttaaagtataggcaaagctaaacattcaggatatttgataaaactataaagaaaaccaagggaatgaagaatgcaaaatatgagctagtgttttcccaggtgtgagggacggggcatggttgggaggaaaacagaatggtgccatggcgagagatacacaggggaggtattggaaagttctgtttcttaaaatgagtgacaggtacctaggtagtcattctatatgttattaaagtgtacacacattgcttatgtgaagtcttgttatatgtggcacatatcacataatctgaaagaatctgcttcctgtagtaaaaattaaaaaaattatagccgggcacggtggctcacgcctgtaatcccagcactttgggaggccaaggcaggcggatcacgaggtcaggagagagaccaccctggctaacatgatgaaaccccgtctgtaccaaaaatacaaaaaattagccaggcatggtggcggggtgcctgtagtcccagctgctcaggaggctgaggcaggagaatggcgtgaacccaggaggcagagcttgcagtgagccgagatcgtgccactgcactccagcctgggcaacacagcgtgactccatctcaaaacaaacaaacaaaacaaaacaaaaaaggtttaagaaatgttctagtaccttgaaaccaaaataggtrtcagatacttggctgttttgttttttcttctwagccattttgacctgtgagattttatgtgatgaaaacataagaatgtggtattacaccctgtgakttgaattttccatactccattccattctatatgtcagatgcatcttcctaaaacacacctttgtcacatcactcctctgctcaaaarcattcagtggctccctgggccctctgggactaagtttataatgctcagcttgtcattcctttgcccagtgtactctctgtctcactaatttgttcattattttaatgcattttcttgaatacacttctgtagacagccataagatgggtagcaggaatgctgcactgaaccataatccaaagctttcatcaggttcacttgcttcctgtccttgccacaccatctgctcattctcgatctccacttgaacacacttcacattctccacttgtgtatcattcactattcttgctacataaattaacacaaattttgcagcttaaaacagcacacatttattatttcatggtttctgtggatcaggaatctgagtatcagacttagctgggtcctctgcctagggtttcacaaagttgcaatcatatattggccagggtgtgttctaatttggtagcttgactggggaagaattggcttcccaaatcacccagattactagcagactttatttccttgtagctttttgactcggcctggcttcttgctgactgttggctgttggctggaggtacccctcagctcctagaggcatcaacagttcctgaatatctgggcttttcccacaaagcagcttccttcatcaagccagcaacaagagtytctggggcaagttggtcaacaagatggtgtcttacatgcccaatgtaatcatggaagccatgtatacctcatcacatttgccagatttctgctgattaataccaagtcagaagtcctgcacacattcaaagggaggacactgcacaatggtgtgaataccaggtggtagggattatgtggggccaccttacagtctatcagccacaacttgaagtatcttctctcctctttgctgccaaataatgtctctgaagactgtaagacctgaatcctatctaaagttgtcggtggttgcttccttcctgaaagcaacaagaagcccatgaatgtcttatggcctgaagatctgccttcaaagactactacctgtgttgtcacaaatggcaagatttcatcctttttatggctgaataatatttcactgtatatgtgaaccacatttttaaaaatgcatttctgaacctgaaggacattatgttaagtcaaataagccagacacagacagacaaagacatatgatctgactaacaatgtggaatctgaaaaaaccaagctcatagaatagaaacagagagtgagaatggtggttgctggggctagggggtcagtgaagtggggaggtgttgatctaagggttcaaacttctcgttaataataaaccagttctggagatctaatgtacagcatgagtggtgatggatgtgttaattaattcgattgtgataatcattacacaatgtatatagtaatcaaatcattactttatagaccctgaatatattcaatatttatttttcaattatatatatatatatatatatataaatatatatatatatatatatatataaatatatatatatatatatatatatatatatatatatatatatatatatatatatatatatagatatatatagatatatgtatatatacatatatatatgtatataactttgcatattttaattgctgtctggaatcctccttcagatggaatgagaaatcatctctgggttagttctgtccctgaaggtgagggccagacaacacatcaaaactgactttttattttttttcaaagttgttaagactatctaagattcagatctccctaawactgttcctagttagtatttagaacgtatttgtttagaggatactagcctgaaatagccctatctccaggttgtctgatgcgatgaggatgtggtgttaatcttacacctacccattagtctataaaactcctgagggatgctcaggaaaccaaaaaggatgtctgcatggaggacaagaaggcacaaatcgtytgatttcaccccatcctaagatcttgtgactymagctttgttttggactggggcattggatctcccacatgccctctcttaagtcgtgcatttgacgcatatttaataagcacctactgtgtgccattagagaccatgatacagttttgaaagcctagcctgaataatggatgacaccctcctaaagccacgatttggtcttgattatttttagcactatgaagaaaaatttcattaaatcacaactctatttacttttaacccaacatggtgaagttatcaacatataatgcctgtctatactttcagatggaaaatgcctagataaatactgcatgggacatttttaaacatgtaaaaaaatcaattttcgtaaggttacatctttttacctctttatataaaacatgctatattaaaagagagattaaattttaccctgtggagtaaaatgcaaacacaaaattatttttttcatttttcagagcatgtactggattatcatttatttatgaggctttttttaatctagaatatatggaaatcttttcttgaagcacaatataatattgaattgggaatgttgtctgacagtttccctcttaccgttgcatagaatgactctcctgtatgaatttttaaaagaaacttcaatatgctatgcatttgaaagggaagaagtaatcaccataatcttgaggtatcttttaaataggcttccttccagttcttctatgtttcaccaacttttctacaacaaataatgcatctgtgatttttcagaactcacaaaatgtccagctttctttcttttattcaaaatttatacttcataattgaagttcacctcccaaaagacatagcttggtttagcatagagytatgatgtgkkttctctttgttccttttgcacactttccttgtctggaggcgttgggcttggatccttcattcttcatgaggctgatgtttttccatttcggtttccttaagtggtgaagctgcacaaccatgaaagcagtgaccacataaaaatgctgctttgaggcctggtacctcatgcctataatcctagcacattggatggcccaggcaggagcatcacttgaggccagaagtttgtgaccagcctgggcactatagtgagaccctgtctctactcacataaaaatattagctgggcatgatggctcataggtgtagtcccagctactcaagaggctaaagggggatatttcttaagcccagaagattcagactgcaatgagctatgattgtgccactgcacttcagcctaggcaacacaacaagaccctgtcccttaaaataaatgctgccttgggtatcttaatcctttctcaagattccttctaaggctaacatttctttgccatccccacactaccatctgctcacttttatatatcttgaccattttatttttcatcccatcttcactccatgtaattagttagctattgctgcagaacaaatcaccccaaaattcagtgattagtttataggtagccccatttcacccatctcattctatagctcaggttgaaagttgagtcatgaattggggaacattcttctcttggtgtaaattagtcaccagtgtctcatagggttgggctgaaacttaacacatcccatcactttgattggctaaagtcagttacataaccaagcccagcttyagaagggaaattgtatgccttacaaggaggtgagaggatggaaaatgaatatttgctgaacagactttytgtccagtttgttgtatttggtggtggtgcagggcaaatatatgtttaaaaccttgttcagatttttagctttcttcagaacagagcttttaaaactgagcatttgtcccctaaattccagcactgcggccatgagtaaagggtgccctgaccacgagcaaatcatttagctggctcacctttcatgcaaccttgaattcaccaggaaggaagttcatgcagccctgggtatgatgccctaattttgagccaagccagctagagttcaagtccaaaccattccacttcctagctttgggacgatgaacaatttacttatgctttctgggctttggttcctaaattatttaaatggggatgattacatacattcatcattttcaccttctcaaagaccttctggacaattccccaattcatagctctgggagacagtgtgttgacactctatttgaccacatcttcctagcagtcttgcggaaggtgccactttgcgaacgatctgttgctaggtaatgtcaatgacatgactttcagtttagcacatgtacagatgaccttgtttgggcttgtgccgttggtaattcagtttcaggatttccgtttgacagaatatattcaagggtggtttcttgctatcagttgtacccttgtggccacagtttttccagataaccaagactcactaatattttcacaagaacatttgtcacctaggtccagatttcagaggaaaaaagtataccgccattgttcttgtataaactttataaaatatttggggaacatcactagccacctgcttccgaaagtacttagatactgtgtcatcttaatacaagacactatgcactaattaagctgttgttgatgcttttttgcctttttgacaattaaaaataatctcataccactggattagtctcttgcctttcaattttatgtttatatacaaatatatgtgcmtaccaaattttatatatatatatatatatatatatatatwtttwtttttttttttttttttttttttggtcggagtctcaccctttcacccaggctggagtgcagtggcgcaatctcggctcactgcaagctccgcctcccgggttcacgccattctcctgcctcagcctcctgagtagctggcactataggcgcccaccaccatgcctggctaattttatgtatttttaatagagacagggtttcaccatgttatcaggatggtctcaatctcctggcctcgtgattcaccygccttggcctcccaaagtgctgggattacaggcgtgagccaccgcggctggcgaaaattatatattatacacacaaacatacacacacgcacacaccaaatttaaaaagacagatacataggcagttgttatgcagtgtttgaaataaatttattkccagctatgggtcatttggaaaaagatcaatatgatgcatcaacataacaagtaaatggaaatgaatacaaccgcatggttttctgaaagcacggtttcctgcgcggcttccagaattgcatccctgacatttggaacatgtgttacatgctacagaacatctgtctgtgaacaggttaatgggaaaggtgcatctctacaaacaaatattacctgtaatgctgttgtagctttgttgattgttgatattacttatgaactttcttgcttttcagaaaccaccaccacaaaagaggcagtaacattagtattacattatacatcttmggcatttttttcctttgcccttttcgtaggtttttgtttgtttgttttttcttgtcagccacttcatcatgtttggtctctcgtctttggctgtgtttttctgtttctagttattgtgggtgttaaaaatcactttaatgattcagcaataattaggaagtccctatttgtgggtgttactttactaactaccagggatgaaaaggcaggttttgctttgttattacgtcacagtttcgtcaaggagataagtacttaaattgcagtagagtgtgacagcatatgtcgacggtgtgagtgatatggaataagagtgagacagggaggcagggcaggctccaaaggcgaagagatgtctgagccaaattgaagggtaaactgagttcaccaggcaaactgaggaagggtactcaggctgaaggatcatgggaggggaggagcgtgagttcctcttaagtgartataaaccagggggtaggaaacaacatgagatgaggctggcgagagagaaggatgcyaggtgaggtgctgtggtgcgccagagactgcggaagtggctttctaattaagaaacagaagccaggaaactcctgtacttcaaggttttggagtgggaaagttgaggaaatgtaagagatcatctctgtctctatcacattaccgacggagaagtgggataagaactaygtgtgttttcacttcttctttctttagagaaaacaaatatcatctgccttgctaggtagttgtgagaaatgaggagataatatctttaaatctcctacggtgatacctggaacatgatggtgcttgggaaatgtctcttcttctgaaatgaggctgcctsgaagactcactggaacccaagcaaagtgtctctgcatttcactccgagccatcgacttctgttctgaatgttaaaatgcaggtggctgtgagggagtcttctgagtcatgccagcgtttaaggcgcttgctcttctttgtgcacattcctgcttttctcaaagcctattgaaagcaagggccatgtttgctgttttctttgacagaggaaattttttttttttttttgagaccgagtcttgctctgtcacccaggctggagtgcagtggtgcaatctcggctcactgcaacctccacctcccaagttcaagtgattctcctgcctcagcctcttgagtaggtgggactataggtgtgtgccagcatgcccggctagcttttgtatttttagtagagatggggtctcactatgttgcccaggctgacctcaaactcctgcagtacagtattgcaccttcctcggcctcccaaagtattggaatatccggtgtgagccactgcacctggcctccaacagaggatttcagtcaatgctgagcaccaattacagattgattgcctctgtgattccaggtaaataaccttgttgtggagctgagtctttcatcaaaaacaaggactcctggcagatgcccagaggcatttataagcagtcccatcacgaacaaattgccaaatgcaaggcctgagcaaaagacacagaaaggatttctttatcgtaagcacacttctctacattacctttataatccamcaactytgstattagtaaattatagaamcaacttttgtaacactatcttgtttscagagtatatgaaaaatttgaagttaaaattcagctccacgaatactgcagtggtgagaaaatggcgacaaagattagtcttctgtgagaagtctgctaattattcttcatttaataatgccatgtatgatggccttcattagaatgaattcttctcaacacctatgcctctttcacctcagacatgccttctaattttctttggtagtgtctgcccacccaggtggtaatttctggtcataagtctaatttagtagccagctaaaggatatctgtgaacccttcgcaaagagtaatctattgaaaaggaacaacaaaaaagtatatctgtgaacttatkaaatgactttaatcatatgaaaatcagccatcagccttattagagtggttgattttttttttratctaagagctttcttggttattttctgttcttaatcattgttgtatatccttaatgygcaggacatgacaccgtataacaagtgttttaaaaatatttacaattctgatcttataaaggaaaaagttacatatggtcctttgaactaattgctaaaatgacactacattaattagataattaagggtcttgagcatgtggctattgtattcattgggctggaagccaaccttttctatagctgagaaaatgggttagcataattcaaaattcaattgctgtaccctttttcatatgaatagataatacagaatgagccttaaatctgggttggaaaaactaacaggaactggttttattttaattgagttttaaagcacttctaggccatctcattgtctttatagtttaaccctttgaagttgtgactgccaacgtgctagtcttgtcgtcttacacgttaatggtaatgatctttttagatttaytgtgaacctctaggaatgttttttttaaccagtaaatgcactgaaacatggaatcaaagtctctttcccgtgggccccttttcattgggaataaatgctacccatagattgaagtagtttataccagtacattttttaggtgccttaacttaccaaggttatttgtcaggaaaattatctcttgtaacaccaggttccctacctttagatgacaggacttaatacaaaagttttccccataccaactagtagtgtaagttgatttcatatccttttatttcataaagttttgcttatcgggtttgtcatcctctatttgmaattaaaatgtgtggtctcgagatgaccttaaagtatctgacccccaaatctaatcactcctagcatctgtgaaaattgacaaatatgtcaggtataacttggggcatcaaaacattgttttaaatatttcgtttgtagacaaggcaaagatcattttcaggttagtcctctgagaaggaacgctgggtgcagaagcatctttggtttctctgctctataatcggcactcattatctatgggtttatacgagcagaaaatgtacagttatatgttcagcacaagtgaattattgattggatttacggccagaagaatgttcctaagtggtcaatacatggccaaagtgtgtcaggtgaaggtaaaaatcaagtaagatctatacttttgatagcaattgctgttggattatgttacgcttgtcatctgaggttactgttgaatatagataaaaatgttaattgtattaatttagacaagaatgtggcttcaatgagtatttcttacaaagtgggagtatcaatttttcttaaatgtagagatttagtttttcaaaaattatattttttatatgacctgacgttgattggcttgcctacattctcttttggtgtatgatgacagtttaaaaattcggatgcattttgcacagaattaagacgttatgtgcaatccttgtgtttctaattatatgttgatcaatgacacctttacaaaactgtcatcartctattggtggttgattggtccaaccttagcccgatacctctatctccgcttagtcattcctggtgggtgactgatgacccctgcttaacagtaaacttgttatgcatagggttgttagaaaagtcttcatcaatttgagccaaactgtggctcccagctacttccatcaggggtccttattccaccctttgattgcaaaatgccctgaagacctggtatgtcttatgtcagttacaagaggcccttctagtgatgtaccgggaacctcctatgggaaccagagctctgctaattttggggacaagaaatgatgaaaagaagtgccttgttcttggggcatcacagtctcatgacagagtgcatgttgtcaaatgcgcgtttaatcttcttaagctcaacttcatgcaagagacctaggaattcacagagtgaagatgatttctccattcccttctccgagcagagctsttgaagaagatgggagttaggagaagtgaatcttttgttttcgaagcctttgtccttgtgagtctcttaattggggtgtcttgtaatgcaaagtctttaaagatgtgtgytcctgaaactcaggaggctgctctatcccatggttcaaccaaagaaccagggccaaagcagtgctgaaggaacaactgattctcttggccctccttagagtgagggtacaactggctccaaaggaaatgttggcacttccagagtaattctgacagtactcagatttgcttcatgtacccattctagaaccttacctactcaagtgtaagatgagatgccactgtggtatcttcaaaggaatttagaatcatgtcttaatggctccattaagaagaattctttttctsttttctctgaaaagcatcccaggtcataaaatgtaatgtgggattgtaggttttgtgggaagatgcacttggcagcaattccttgagaggaggccttgaaatgtcagggtcccccattcatcttcccaagctgggattgacccagtgataacataatgataatgcagctgctttcaatgtcaagccatcaggcagcgggttgggggggttgcttggcccaggaacccgtgccctgatgtggagttggtaatctagagggttttgagttaagtgcttttgacatggaaaatcaggagccaagggcgaagctgccttttaaatgctctttctgaaagagtccactgcagatgtaattgagcctctcaggtgaagagctttattcgagcaaagctggttagtgttgcatacctgtttgggggaatattttaggcatcctcacaaaactgctatgtgacattgctgaaggtccccagcctccttgctcccaaacacttcaagaaggaaaatgctgttgcagaaatgttgtctaagctttaccattcagtgtggcccagatmaacctgtcccttctttttgtgatcacagtgtgtaattataaagttatttgtgtgtttggtttatgtcttccacactggactgtaagatccatgagatctaggaccacgtctgtcttgatcatttctccttctctaagactaacacaaggcctggcataatcattgtcatcaccatcaccatagctagtatttattgccatatacagttatgtaaaacattgtaagaagtgctttacatcagttattcccaaccatggagtcatgagtcaaagatggtcaaattggccaagatgaaggtgtttgcattttggagaccaagcacttgaatccataaccccaagatgtgactttccaggcttgggatttcgcaacacgtcgcttaatctcttagcttacattttgtcatgagtaaaactgaaacagtaattcccatgtgctgagtttgctgtgaggattaaagacaaggactgttctaagcccggcatataacgggagcccattataagtgaactgaggtgttattttaatatataccttttaaagtttgagtgttaggcatgctgttgagtgaaagaagacagactgttaccagaggacatattctgttctatgataccacttgtgtaaacgtgaaaagcaggcaggaattttccatgtgagagaagtcagaatagcagttagcttaccagggggtggtgatcttaaaggggcaggaaggagccttgtggtatgctggaaattttccattcatctggtgatgtgatcacttggccgtgtgcacgtgtaaaagttcaagctatatgcttaatatttgtgcacgtcggtgcgtgtaagcaatatctcaaaacatttgagagaatttcccattcattgacagaatttttctcccgcctcggtcaaagcacacagtgggttttcccaacaactgaggtgcctgagggttgggtgccaaagaggcagaaaggccgagatgaccgcttgacctaattccctattcagctgaggcctccacccctggcctgttcaaaggcagttacggatcttttactcaaaacctgaacctaaaaagaaattctttagccatgtccgtgtgaactaaattcagcgtcagatgtacaaggctgtggttctgaccacccccgggctatttytgaccacaggacagcttaaatggtgtggcccataaaatgtaatctgcaaactcaggctgaatgttgatctatttagggccaagagaagaccaggccttggcagcagttctccctgaggtaggatcttaggtcgaatggagaccatcaccctggctgccagccccaggaggctggaaattcgttagcattctttatctttggggatcggccacttacttgtggggttgactcttacagcctttgaccacctcccaaaagctggattcactgatgggcccccaactcaactttcactggccaaagtacttggggttaatttagcaaaccccaggatccccagagggtccctcggtattgtggttttctcctcgcttccaccttatagtggctccaccaggacctcttgactcagccagcactccttctcaagtcacttcgcagcacaatccgtttgttgttgctgttgttttttcttttgttttgttttgggtttttttttttgtttttttttgttttttttgtttttttgcctaatttgtgcttggcttctccacagaggcctggttctggtcccttcccctgcaaccccaaggcagggggcagattcccgtatcatggtgctccttggcctgattctgtggsctttatattagaactcaccttctggaatcttttattgtcttgttctctcttccaagctgcgcatcttccttcccttcagaggtttggtgatcagcgtggtggctcgtttctataatcccagcagttttggaggccgagactcggggatcccttgagcccaggaggttagagaccagcctgggcaatatagcaagatgtcatctctaccaaaaaacaacaacaacaaacaaacagacaaacaaaattaggccaggtgtgatggcttatacctgtaatcccaacactttgggaggctgaggtgggaggattgtttgagccccggagttcaagactagcctgggcaacatagcgagaccctgtttcttaagaaaaaagaaacatttaattaaaaattcagaattggaagttgcattgagccaagatcatgccactgcatttcagcctgggtgacagagcaagattctgcctttaaaaagaaagaggtttggtgccaggacgccatgaaataattactctaggtaacctgaggctagacaaacctctccatgtctcagtttccttcctggcaaaatggggaggtaaggccagatttcttctcctttagttttgtttttctacttgaattctatttgtcatcctctgtacctaccacctgccagttgctgtattagatgctgttttactcattgtctaattgaattctccaacaaccttgcaatacgcttgttatctccattttagaaacgagaaaatggtgactcagattaagaaacttgctcaatgtaaccaagtcacaattttaatattaaaaataatgagcatttattaagtgcctgttgaatgtgtaggattttgctaaatctttcacataatctcatttcatctttatcatagcccttatggtgaaaatgccattattctttgacatagaggaattttgattcaggaaggttaagtaatgtgcccagtatcatctatgtataattgatgggtctataatttcagactcaggtttgtttaagtccaaaaatcatgccattatgactgtgtaccatgttgcatgccttcatatccccaatggaaaaatcccttctcccacttttcttaaccctacaagatatgccaagattctatagcatctgaatttgaaaacctctactaattcatgaggcaatctatttgataatggcatgatttagttagtgttccttttttagagataaagcctcacyctgttgcccaggctggagtgcagtggcgtgatcacagcccactgtagccttgacctcccaggctcaacctatcctyttacctcagcctcttgagtggctggaaccacaagcagatgccaccatgcctggctaactttttttttttttttttktttttgtagaaacagagtctctctatgttgcccaggcttgtcttgtactgggctcaagcaatcctcccatcttggcctcccacagtattgggattacaggtgtgagccactgcgtgaggcccagttagtattctttacatttttaaaataaaatttcagagaaagcaaccaaagggagcataactctgataagaataataaaaagaaacaattcagcaactctcttacagatttttatcatcatcccattcataattgattccaracgtgcatgaatctttcaagataagtgtcttattgattaycctgaaaacaagcgatcacttggtgtcctgagattcgctcactgccctcccctgattaccgtaaacagagatgttgatgagaagaaatgtcactttctttggtgttggatccataggacattttgaggaattgggtgtggggagtggagggagtgaagtgacccagatagggaggtgcttgatggcttgactgtggccttcaccttgctttttgtggagctggatatagacatttgttggccagctaatactgtcttgatctgttatatgatccttaggccaggactttttcctggtaattgtgcaaaatgtcccagtgaatgccaattccttgctgtcaggaaacattaagtttcctaagtgacatcctttttctgcatgtttacttatggttatgtaaatcaagcgggcctccccattggaaatgatggcagtggttacaagggacttcacctggtcttttgtagttgtggcaaatagataagatacaaatgtgacctgcaattcagttcagcattatgaagctgtatctgctccctgggtggtggtcacagccctgctttgtggccctaacccttgccttcctgctggcgggccttgcacaggtgcagagagggggttagtattggcaagctaattggataaatggtgaagtttcccctgggtggctccattgctccaggtgaagctcttgaaatactctgtagatgacaatagcctcaaacttgaacaggttcttgcagttggcaaacagaaggagaccagactcataggttttgggtgcggataatggataatctggctattgcatttaattcccagcctgatttattgaggctgcctttggtgaaatattgatttatatcttggggggccaggatggggctactctgtactcagatgaggcttgctctcaggaagttcttgttcagcagcaaaaatctgccctgtttgggctctgaaagttatttttgtagtggcctcacaagtttcttgtagcaggtcatgaagaggaatgaaatactataatcacagagcttgcagaagctgcctggaggaccagttagtctattttttgtacatgaggayactgaggctcagagaaagtgaggtcattgagtcacttgagttcttgttgagtgttctttcctgctgaggtgtcctaggtgcctcttaatgcctttaacatctgctaagagtatgtcacttattgacgtagcatcactttattgagcagctactatgtaccaaacacttagcatatgctttttggcattaggagctgaacccagagtggtctctgtggagaggtgcaggtttacccagggtggtggtagtggtgatggggtggtagtgatagtgttgatagaagaagaggaggaggaggaacttctcaggaagaagtggcagttccctcctttgtttcttatctctactgtttagcagccactctccaaagcctcttgctgggaaygtggccatcatagaagtaaatgagacatctctttcatctgcaccaacctccttattaagaccttatcagttacctgtagattctcccactgttgtacttgtttctccctcaaccaattgtattttagctctcaagttttggcagggttgagtctagtatttctgttgggatccggggagcatatggagtgttgtttgttattttttagagtttcttattgcggtaagtgctcaggagggaacagagggagaaggatagaggaaaagcaaagcaaaacaaaatagaaaagcacaaatgaagaatatttagtccattctgtattagtcctccttgatggggggacacatgccagccaggttacctgattcatctagttgtgattttattgacagtcatttctaccttgttggtatccgcagaggttgtcttgaagggggctgatgccttctttcactagctttatgtggctggcagttctgtcctgccactcttttcctcatcatctcagcctccctgcccatggcactcaagagtcsaccttggcagaacctgcaactcttcagcgcctccctaatgaactccttgcaagggcccttggttaagttacagtagagaagtggttgcttaagcaagtagtttccggtaaaggcataaagatagcccataattgggtgataaaatacctggattgcatctaaaaataaagacttgtgaaggtaaaactgtagcttacagtgtgcgactgtttaccttcttttggtttcttctcatttaataggttggtcatctctctgctggstttttcccccttttttctcccttctgtagaataacatgtggaccattaactatgatgctacttcttagctgcaaggggggaaaaatggaaaactccaggggaagagggtctttacttagggagttggcatttgttggaatttcccaagaacatttcatgattagtgacaggttatcttctastttacctgaaggctatggtcactcaacaaattttgtgttgcttcttacgtgtcacgcactgtgataagtcctaggattatagaagtcaataagctatgatgcctatccttaaggagagaaacacatataggataggaamatagcttgccatgtctgatagatattaggcattcagtctctctctctctctctctctctctgtttattatagatagaaataaaaaaattataaatagaaatttatttctcrtggttctagaggctggaaaattcaagatcaagatgcagacaggcttggtgtctggtgagggctgctttctatccttcaaaaaggcaccacgttgctgtgtccttatttggtggaagcaagtgtgttgaatattctaagaggaatctgaaagtgttatagtattaaggaagacagatccaagatggtggcaatggtcaagaagggtgcgggaagaacccttcaactctaatattatttgagctgctcactgataaataaataggattttcccagttggggaagagggaaaggtttttagggagcagattagacaagaaacattgaaaacacaaagtgtatttcttgatacttgttaacactaggtgttgaggagacataaccaagttctcctgcagtttgtgtgttaaggcagatggaaatgtcttgtaactcagtaaaacagtttagaaatttaaagcctttggagagagtaagtattgagaaggcacatctctacgttgttgaygtgaaggagttgcaaggtcgggtagatgggatcagtgccaggtctaatgggcttcatttgcaagacctaatttctagcagatcatggtgtaagcctcaaatgggaggtgtgcctgggatggttgcagaggagttgttaagagctcagactccagcgtttagacaacaccagctgctacaaaggacactgtgcatttctaaatctgagtttctgcacacgtatggaggagtaatatggcacctcctcatttggttgagatgctctggggtacacgtacaaggcgctcaactcacggtggctccaccagtatgaaaatgtgttatctgccctagtctgaagtacagaagtcaggtggtgagaggtgacatgccatgatgtggttctgcttctctgagattgtctgtcagcttttccctcagtttcacccccctttctccctttttcaagatggttttagcacttccagacattataaccagatagcctattgctagagaacaaagcaccttctcttcctatatgtacctcttgggaacaagggaacctttccccaaagcccctcaacacacttaggctgacatctccttgaccagaactgtatcaaatttacatagcctcaaatgaagcatctgggamcaccaggattgggtgtttaggccatggaagagtaacagcccagtacacaactgtctccagtggccagcacgtagaccttccctcacactttccactctctgcatcccctcttccctctcatgtatctctattacatggagcctcactttatagtcctcattaagagactgtggggtggtagacagataacaatgttaacatcaggcaaatgggttttggatttaggttaccatcatttatcttctctgtaaccttagacgagttgcttgagttctctgagtctcagctgaccaagctctaaaatgagcataaccatatcagtttgtgtttcctgttacagggagaaaagactgagataactaaagtacctgattgastaactgctctctgaaggtggaggctggactgcttcactggacagggtggcctggggttattctagtgcagtggtagctggtgacaaaactsaaagaagatgtaactagagaaaaggtactcagtgcagcctctgtgagctaccaccactgcctctagttttccagaaaaccaccmctgaccactctctgtacagatgcgctcaagcgaccataaccaccagtgttcctaacaatgcgcctattgacttcttatttcaatagatatccagattkattatccctcaaggtaagcatcgattttacctttgtctcagtcaatatttacctctgaggtcaatacgtgtggatattcacctcagctgcagtcaatatccatttcgtattacaatatatgatgtgcrtatgtgaaaataaagaacagcatggtacaaaaaaggtctgctaggcaaagaagctttttgcaaagcggatgtgtttttgttttattttttgtttgtttgtttttactgtgtcactttttagaggtcagattctatttcactaaataggacatatgtgtcttctgccaagatgtggaattttggcaaggctagcatgataacaaataaacattcaagcagtcacttaatgatattgaattgaacacmatttctcagaagttcctgtattaaattacaaccataagaacatacacaagcatgcagattgtaagtgtgatgagaatggaaacattccataggacgcagagttattcctcaagcccctggactcgcagagaatcaggtgtatgaagcaagaggaagaagacaagaatcaggaggcaaagagaaggaggaagaagcctcagtggggttgcttctttttatttcttagagccagagctggaagacaaggcctggcatattttggcaggcctggatcagagcctaggtgtgtaaattaggaattgcatttsgctgctgctaacaaggacccaaacatggtggtaaattcttccacataaaacaacagaaaataagttgttttctggccctgggctggggtggccactccaccgtcatcgatgatccgggctccttttctctttctgctttgtgacattgcttctatcttcatgataactcgctgcccagaatgaccaggcagcatgaaaacgaaaaggtggagagggaactaacttcttcccttttgaagagctttctaagaagccccacccaacactactgcttctctcccagtggtggtgatttagttgcttgagcacagatagctgccagggaggctggaaagtacagccttcagtcctagcaccaatgtgtctaggcaaatacaaaagctctttagccaaggaagaaatgacaacgaatatttgggacccactgggagtttgtgccaaaccaggtgtcattgccctccccaccctaccttgctcccctggrgtgtatcctgattcttttgaggawcacttgatcctgattttttttttatgtgtawagatgggatttcattatattgcccagactggtcttaaactcctggcctcaagcaatccagccacctcggcctcccaaagtgctgggattataggcttgaaccaccatccctggccttgatactgatattttattgtcctaactgacagttttgtctgcccagcattttcccccrtcacccttgtactatcccattttcctttgccatgcacctgtcttcctcttcaggattgatcacaaaatcaaaaccattcctaccagccagaggtgggcacatgacccaggtcagaccagtcacagttcctgattcccggccacagtgcwtgatgggggaatgagcatatatcaaaccaggacagtccaagtccttccggggactttgctgccacagttgacagggggaggtatttgcataacttcaccacacacagctaagctggtgatcctgctgcttggcagcatcttcccagcgtacaacagaggaaaactgcctgttgtagttaaaaaaaaaaagagagagagagagagagactgatacmcaaagagaatcagaaaggagtagagatgaaacaaagatagagctagcatgattgcaagctgaggacatacgaggagtccctgggtcagctgggccatacatttgtaagctgtagacaaacaaaaatgatctttgggttccttctttagcaattggagttggaggaggatgaccttagtttgcgtctttgtcccactatcattatatccaacttgtgtaattagaaacactatttaagtctcagtttcgtctcctgtcaattgggaaaatatcgtgaggcggagatgtgagatgtgatcacgtttataaagtctgcggcaagaggatgataaagtcacttctcaactccttctcaactcctcctcctggcttattaatgcccatcctttaacctgtcctctgctttatctcttggaatccttagggcctttttaaccccatatacgaagcaaacctatgtgtatgtgtttgtgtgtgcatcaattcatatggtcctctgcagccttgcaaagtcgattcctgacatttccgtagactgttttttttgttttcagcaatactctccagcagcaaaacccaatccgytcatattcttgcatttgctgcagcaaaacctgacctctctttgtgttacctgagtcttgacgaagaagactgaggaaaggcccccccccccccccrccaaattgtcccgttgtctcttggctggtcttgccagctggcacacagcttcctctgaccaccctgctaggtacaaatcccacatgaaaagtctcaatcacctggctcaaactcatagttttcaggtggcataagccatggcattttcacctcctttcctggttgtttccagaargggatgatagccccagtgcagtggctctgtatttctyagggcagcgtgggacctcagggtttgtcatggaccacacctttctcctttgtccctttttataactcataggctacctccaacttgacrcttatttaagtttttatttattttatttagcattcagaaaactctatagcctcagtctctcgggatgtaaattaaagcaatttcattttcatagtttctctgtttcaaatccctcattgtttatttaaatagcagcctatgcatattgcaagtaaagaattataattaagagaaccagaagggcctgtctctcaggaaagcagtgatttcctttcacaataaccctatccttactgttgaagacttgyggaaaagggacatggcccagggaaccagagtggtttgggaaagcactttgtcaagaggctkggggaccccagggtggaagytgccatgcgcatgaggytgtgttagcagaggcagtggcagaagaagacattgcaaacctgcaaaagcaacctctgaggatgggtagacatatacttcattgcaggcagctgctgctgaaatagatttggagtcagatgtcatattcctgccagcaggtttagcagtcgtgggactagggaagtggcaatggcaggagcaactggaaatgtcttttttttttyctcctttttcctgaatatggaaccaaagcctgtgtttttcttgctcacatgtgagtcttctccttgcttcaaccctccccgctgacagccacaagactctgcctccctgcagcctgtggaacrtaatattcgttgggatcatacattgaccaaagatccgccatgtctttgcaactaacatactcactcatgacttcacgtggctatgtacaagaccacatctctcaatggtgaggtcctcaatctctccctccccaccacagttagctatcagagatatacggtgtccttaagatagggcaggcagggccacctgccccccagctgaccagtgtggatgtcttgatgatgagccatactcagagtggccctaggatggctcctcagatagctgctggcagaaacctgcactcagtacatctatacatggtgtaatgattgactcaagatamttagcatagccrtcatctcaaacctttattatttgtgatgagaagattcaaaacccgctttttgaactgttctgaaatatgcaataccttgttgttaactgtattcacctttctgtgcaacagggcaccagaatttatttttgctatctaaaatatcaattaaaaatacaataaaactaaaaagaaacctgaactcaggagagtggaaaagaacttcaacattcaaaggggataagacatatactcagagtgggaaaaatactaaatggtaggaagatgagaagttttttactctttgttgtttctgctcattttttatattcaaaatttctaatcatgtgtgactatatatgtattatacatggtaggacttatttttttaatgtgaaagaatataaaacaaaatacgatattatcttttgagtgatatcaacaaaacaaaacatgatatccaaagtcaccctgtatggttggatactttgggtttgccatcttttcttttgttcatttgtttcatgcaatagaaacgttttgagatcctgtctggctgggttctgctaggcctgggtctacagcagtttgctgtcaaggtcttggcccttcaagagcatgtagtgtggtggggaaggtgtacatcagtgaagaggtaatccaggtcacggtgggatgacacaggctgctgtggcaacccacagcaggaatagccagtcctgccccagcagggcgtatcaggggtgctaaggtgacttccaagattgaggttggcgagwtcgtgacaggtgtgcaagatggggtgttccaagactggggacaggacaggtgtgcaaggaccagccagctgaggtagaggaaacctagacctatggaacatgctgatttcaaggtccatttgtggggagaacacggactgtgtcattggaagccagcagggagaatcagttgagaggtaagccgggcctagtagaaagtaagcgaagccctttcattaagtgaacgaagggtgcatggtgagtacacagccatgaaaataaaatgatataaatcagcacggtttcagctgccctcccatctttctactgtgatctcagcagtgatggggctggctttgagggttggagatcacacacacacaatcagccagctctccaaagcaagccccacactctcttgatgctatcctcaataaacatgcggtctaaacagtaaccatgttctagctatgcagatgcagtttaaagacaaatcctttgagcctccagcatgcgatcccctcccaatctcattgctgctcccctaccctcttctgcgtagaagcgctggagccaggtgcttacgacctgggtgctagtatctttgtgaaaactgctcctgacctattgctttgtttattttagccggtgcctttgtagagggaaaacagcttagcaagcatttagtaggtagatccaaagtccccaggagctgttgggaagtccataggtgctgtttccattgctttttcattccttcatatattaatcaaggagtcagtcaatcaattaaacggatactattagcacctactgtgtgccgggcactgtacttggggccatatgcactgctgattcattcatttggattctacggtggctctttacccattgccatcattttgtaggcagtgagtgcccgcatcagtgggcgttttatgttgcaccattttctgagcaatgtctttsgtccaccattaagcatttgtggccgcccaccccacaatatgctttgctttctgctttcagaaacaatactggtgacctgttttaagaaaagctgaaaagccaggacttagatttttctggaaaccttcaaattaacctcattaagtttaaaattgtttttttctcgttcatctctcttgcttttatgctttccaaacccctaaattgtggtgcctcagtgatcttctataacataagttgatagtcaataattgcttaatgggaatcataaatatgagtttatttatatgtgtrtatatatatatatataaaatatatttccatgaatatactgaatgctaagccctccccactttttttttcttttttaaattcagaaatttctagttgtgtttattcccctcgtcagcatactttatcatatcaragccttttcagacactgtaaaactactgagttatgtttgggtcatgttttgcggtatgccctttaatagtgtagctttagaaatgcaattttcagcctctgcttattagaatatgataaagtattcctggtctatgtccagctccactaatctccagactgcgcttcatgaattaagcatgaagattttagtcaatgtgctttcaaagaccaatgtttagggaatcatggattttctacaagctgagggagaaatctataataggaggaactgattttcaaacatcatattctcaagaagaaatgaccacttctggcccagaaacagaaaatatttcactatcagaattttctagaaccagttaaaaccacattgtgctgttaggtttaataaacggattgtgttttaagatgtgtaagactgtctgtcacgtgggaggatttcaaatgactgcttattttggaaagctcatgtagactgggttaaaatcgagaggggaatgcaaattgaatttataaggtattattaacttcttcctctttccccccgccctggcccctgtgcattttggttcattttgctctgatacaattcagcaaatagccagatatttcttgccatggcgagagcttagttgggggagagattttgaccaggcaggctctcaggtcggtgccatcggtgacgccaacacacctcctggcttggtgtgttttgtggcatttggcaggcmaacgttttgaaaagaaatctcctttcaaaaatcacagcactggttgaagcaggagcatctctcccyttaaatgcaaaaggagttaatatgccagtgaytacagtgtgcctggaaaggtcactggaggcatttttgtctggggcagcccctggagtcttggcttttgtgcttggtgagaccttatctggcytcttcattgtccccttcatacaaatagatagcttttagtgagcagctactctgcctggcactgttctaaacacatgacaccaatagctcactcagattsccgcctctcaacagggaaactgaagcacaggaagtttcagtgatgcacttaggcaaccaktaagtggcagggtcggcattgaggtcaagactggttggacccctaagtttgaacaatcaaactggactttggggctcacagtttgtttcatgtcaggaaggtgtccgatcagaacctgaatgccagctcaagctgctctcagctaaactccaggggttgctgatggagacttcatcccctcctccagtyccgggatcaagacagaaatgtaaatcacctccaagaatgggtctgcgtcttgcacattttccttttgagaaagaggaaaattctcagctggtctagctttgtctgtgaacctccgggatctctcaggggctttaaattaattaatcaatccacagacattgaactgaatctccaccttgggcttgagactctgcaaagtgcattaaatgggaaggaaaccaaagggcctgctgccctgcccccgccatagccyaagkctgtggccatggctggggaattggcctgtcagttcaatcaggcagcccctctgactggtgtttttcactaagctggccccatggatggccctggtcatgtgtagacatggcctcaggagggccacattcctctcatttccaggcctccccacttaattgttcctgacacagtttggggagaaatgcagcaaaacccaggcctgccaatcaacatttgctcccgagtctcagagcggcccctgaagagacaggttggaccaagggacatccacagatgccttgtgtttaggaagtggggtgtgggcaacagagggagaattgttacccccgggagactgggggtgctgaagaagagtctcagtctctgcactctgggtcttgccaaaacctctgggattgggtgtggtgtccatgttgaggaagggacagtgagctctctaaatgacagtgggtcaaccaccgcatttctaggactcaaagatgccgtgggggtgtattagtctgtttccttgctgttgataaacacatacctgaggctgcataatttatgcaggaaagaggcttagtggactcacagctccacatggctggggaggcctcacaaccatggtggaaggcaaggaggagcaaagtcatatcttacatggttggcagcaggcaaagagtgagcttgtgcagggaaactcccccttataaaaccatccgatctcgtgagacttgttcactatsacgagtaaagcacaggaaagacttgccctcatgattcagttacgttccaccggggccctcccacaacacatgggaattgtgggagcgacagttcaagatgagatttggrtagggacacagccaaaccatatcacagggtcacctgtaggttaccgtaaataagagaaacagaccaagtagagactcagcatagctggagggggggccccagatgacggaaacagccccccagctccagccatttgttactgggttgtttccaacagaatcaaggactcggatttttatgtgaagtcatctccattttaagtattcttttctttccccccaaccctccgtgggttaaagcatccatgtttacagaatgaaagatgagggcaggataccacttctcctagggatcatcatcattttgtggggctatagtccagagaggtgaaggacccatcttgtgactgcacagctaccctgtggcatgactgagactataatcttctggattcttcaggaaaccctggtagctgatgaaactgccctagaacgacagcaagacaatagggccatgaaagcataagccctgaagtctggacactgagagaattctaggcttgacttctctgtacagccatcttgggagtgctcaaccctttgaatcggatgtctagaatggmytcagatgtcactgtgcaggtgactcacgcctagaatcctctgcctatcgtgacagggagaagcctgtgtgaccctgtggccatctcagtctctgcagggcatctgtagytttggaggtacctgggcaagagactgcctttcctactagagcttctgccatccctctgtcactatttaaagcattgcctgcaccctcaacctcgttcagtttccacataatacctggggcagggatgtaaataccctgattttatgtgtcaggccttcaggactcagggtgtataagtgacatggctcctsgcacagcagggatggagaggcaaacccaggttggcctctctgccactcatatagaactcctttatcaccaagattcctttcttcttcagtgccacctgccttattttactcacccagaaggaagccgggtccctctttgcccctttgggtgtttgtgaaaagcaagttgyaaacwctgaattctataaactgttggagacagrttctggagagacactcaggcttagctctagaaagaaacgggtaagacagaggaggttcagggcaactgtgttgccttccttgactggtgcatgggaattccccagcagagagaaaaaaaaaaaaagaaaggaaaaaaaccagaaaggagaatagaatctattatctccaagccattattcacacacacataccccaccgccattttccaaattgtaaggtctttttatataagcactttccgttaaaggggaagaaatagctttacccgtggtgtaaaatatatactttctaatgtaaatcaagaagctatgaataccataataagaatgtggtagtatattaattgatggaaattgtagagtggaatattcataatcagcagaagtcttttctctggaaggaacaaaggattaagttagggagacagtaatggtattgttagcaggctatttcaatgrttttctctgcrgaagagtagggaaaggtgacattccaactgggaatattmgactctgcagatccctactcggagtttttcagccctgttttaagtgccgagctgggttttgcctcatgatccaattgttttattagcgaaatcatcatctrtttcattttgctttggtaatagtgcagtgtctgtctaacaataaattatagagtcaggcaaacaatggtttcgtattagggatataatgaaatatcttattaaaatgcagacttccttaggttcctgaaattagagtcttattttaaaatgattctgttgggcttattacacgcttttgaactaatcacactagtagaatctctctttagtcagagcatagaggactgtgagagttacctcttacttcagtattttcccattcgtattttattctcctgttctcttctggatagatctggatagattttttttagacagagtctcgatctgacagccagactggagtgcagtggtgtaatctcggcttactgcaaccttcacctcctaggttccagcgattctcctgcctcagcctcctgagtagctgggactaaaggcacgtgccaccactcctggctaattttttatatttttagtggagacggggtttcactatattggccaggctgatctcgaactcctgcccttgtgatccacccacctcggcctctcaaagtgctgggmttacaggtgctagccaccacacccggcctcttctcgatagatcttatttggctgacaacgaaagctgttgtgctggtagcatcatccctttscatgcaaaagataaactgaaatctraagtagccatatccttccggccaggtttttcaagtggttactctgttctgatcattgtcatgacaggaatagtgaaaataacaataaatcatttttctttaacgatccatttactgtatgctgggcactgcacaaaatggtttacatggtttatcttgtagcgttccatttaagtctgctaagagtagatgctatcattctctccattttacagataagaaaattgaggcttagagaaattgagtaatttttgccaatcctgagacttgaatctccgctctgtcttctgcatacactttttacttgtcattgctgattagctttctctttccatctccctgatcagaaccattctgcgttcttagattcaacaaaatgtaatactccaccttgccagtatctagcgtgttttcagaaattgtgaacggggtggaggtggagtactaactgcaatcagatgttttatttgtttatttatttttccttcttgcgttgctcttaagcccccactcttgggcaaggctctgtgctatgctgttttatgsacatcatcttctaacagcttctctgccacacctggagaagtgccaatatcattttcatggcacagataaggcattggatgctcatagtttaagtcatcaggtggtgactggaggagccagaaggtccctttgggcctgtcctctcaccagcatcaactgcaccaaaaagatctcattctgaktatcagggatgaacscccccactgggtgatcaggcaaactacatgcattttaaaaaactatatcctgctgggtgcagtgcctcatgcctgcaatcccagcattttgggaggttgaggaggacggattacttgaggccaggagttcgagaccagcctggccaacatggtgaaaccccatctcacctaaaaataaaaaattagctgggcgtggtggcagccacytgtagtmccagctactcaggagactgaggcaggagaatcgcttgaacccaggaggaggaggttgcagtgaactaagattgtgccactgcactccaacctgggcaacagagtgagacactctcaaaataagtaaataaatataaaataaaataaaaaatatgtcctgtaatgaaattgaaagagaacactttgtttcttatctagttggaacaagtggggtggggacagacaagtgactgaccactctccatctgactcagtgtcagtagactctctcaaaaattagaagctggctgacatagtggctcacacctgtaatcccagcacttcaggaggctgacgtgggaggattgcttgagcctaggagttcaagatcagcctgggtaacatagggaaacccttctactacaagacatagaagaaaattagttggccatggtggcacacacctatagtcccagctactaaggaggctgaggcggtaggatcgcttgakcccgggaggtggaggctgcagtgagctgtgatcacgccactgaattctagcctgggtgaccgagaccttgtctaaaaaataaataaataaataaaattagaatctgaattttgaagacacaaattcagatgcatgtggatgggcccaaaatactttgtttacatgtactccaaatgtaactcctggggcacccttccttattttctctacsacaccaatgccttcatggtcttacatcttgtcctcttaaccctgacttctctagccctcatgaatgctttagtgtggcagatgttactgtacatgggccctcgtttattcagcaaatattcatggagcccttgtaccaagcacggtgctgagtgatgctgtgagggtgagcaaaagagaattgtcatctgttaaatcccagaggtccgtctgtgacaaaactttcaccattcttttgtaaaaattagaaaaatacaaaatagtgagtttttcatgagctacgttgtatcaattttaaagtatttcttttaggattctattatttaccctttttcttcaatgttaaataccatttcctttaataaagatttaaaaaagattccttccttccttcccccctccctccttcccttcccccctccctccttcccttcctccctccctccttcccttcctccctccctccctccctgtcttcttccctccctccctcccttctttccttcctttctttccttcctccctccctcactccctccttccctttttccctccctctctcccttcctcccttcttttctttcctttttaaatgctgattttgttttctttttaaagccctcagttggcaaacttaaaagttgttaagtctgtgttagcctggctagctttttttttctctactagaccttcaaagtctaggaatgcctgatgtatctgtatcctgtgagtttgccacttcatgatatttgatatgtcattgtttccccataattttttcattgttagcgttgtctctccagcctcctgcttcctcttcctctgtctccctcatggtgtgtcttgctcaggcatgtcttatataatcaatatttagtgatttgacttcttaagtccttaaaaaaaaaaaaatccaggtgcaaaacacaaagacagggctcatgtcaagggagggaacctcgctcttctactctcagtgaaagaaaggcaagaccactccagcctattttttttttctttcccttggcccttgtcaaaagggtagccagttttctgttaccattgtgctaactgaagaatggaaaatatgcccagagtttaaaaaaaatcaaccaatgcctgccctttctagagcaacctaattaacaacccaaatgttaaaatttctttatttagaaactcagctatccagaattacaactccgcctctcgtgcttggaggcatagttctttgtcatattcctgagtgtctacagatgatgaaaatagccagttatctttgcccttcatggaaaggataggaagaagctctgatgaagcaatgttggggcactcatggttaaattgaacctttcccctggttaagtggagtgtgtgtgtgtgttgttctttttttccagcaccatatttggccctataattaatatgcaagttcaaatacctcttgcatggagcaagaagctgaaacatgcgcatttgtaatagactcagcatctgaattgaatgggcagctttggctggagtagtactgcagcttctcgaatgcctattgtcaaaatatatactagttaggagacacattctgctacgagggatgccctcccaaattaaagacactgttcagtttacgcttaacatttatggctatcaaactactagtccacaaccaatcatcatggtttcgttaacacagtcaaaatttaccactgggctattattaaaacttaatataattaatgtaaaaacacatacttcttttcaacaaaaactggctctctttgtagtctcttttttaatttggtgcaatcacttaaaaagtttagcasatttaaaattttacatcattttaaaattgtttctcttttataagaaggatgctatttactattaatgtagaagtacaaaggaaacggttactttggatttattcttttggaaaattagaatgtgggctacatgcttttcagaagttgatgaccaagagaagaaagaaagaaaaaaaaaagggtgcttgatgccctgctcctgctatgtccgggaatttcttgtacccttcatatgagcccctctgaacaaaagcaaatcctgttgacctgtcagcttaaaaagacaagaaatatgccacattccgcaggaataaggagaaaagaatggtgcgaaaatcagtgacacgaagttgaatatgtgaacacatccagacaaatgtgaagccagcccgattaggacgactgaaagggcatttccccagaattgcagttttttttttttttttttttttttaaataggggacgctattgtcattcagaaagccacaggctgttctgaaaacaggcaaaaatcaatagcccacttgttgaggataagtgaattagcctgtgttgaatgtaactgagtacctgaacacttgagtgggcagggattgttggggagaaaagacaattgtcttttatgtccacagcggttcacatcgctgattaattatgtccaatgatcatttttgtgcaggactaatgggcagactctgtttttgtttttgtctgtctgcccacaacctggtgaactgaatagagttccccacttctcagaacaatgcaaatggtggccaaggggctgtggaagagttgccagaaatggaatgattcagattggatgaaaagttgattttattaattagttaaaatacaaaatgagaaaacagaaaacacaataaatacacagttaataaaatacttcatattttattataaaaacattaattactttaataaagcggtttatattttcaaatacaatatttaataaactatattaaaaatatatacaaaatagttgtaagaatcggggctcctgtgagtacgtaaatgaaatacgcttacatcatttacttctcttcccttttgtttgtgagtccagagacgatggaagagtttggaaagttgtcagcttatctttgcatatatttgtccaatgataattaagcacaaattgtttcaaaaatctttcaaaaattgttataaagatttttattggtgctaagggctgtaatttagcaaagtcttacacctgaaaccaaccaaagggtcttagagtgtgaactgttgtcttagacccggagaagtctccaaagaatgaccatccgaggcattcagctggcgtaagaggagtgactcatttgttcttctttttttttttttttttggctgtctacagagaaggaggatataggggcccttaagagaaaaactgkagtagggtgtgtgtgtgtttgttttggtcaagggcagagtgtgctgtgtcagggtgtttcattgcattttcatatttgtcatttctctttggagcgtgtcttttggtgccacggaaaagggctggattttctatcrggtacaataggtacctgcagggcttagggtacaagagcttgtcggggacctgcacacatgtttgagacctgtaaaaatattgctggctctgaattatggaaagaaaatcgcaaagttaaaatctatcaaagtataattaaatacctacaaaacataatattatgtcactagtcaaccgcaacacaaatcttatatcattagatttcagtgatattgaatgtgggagatggaaccattttagtgcatttgatatgatgtgatgtggctttctccaagcctgagagtgcctgaaacccagagaggtcgtacgttgaccatgccacggggcccttcctggtaaatctaagcagaaatacaccatgcatgagacagaacaaaraaaagaactgtgaaaatacactcaggaccaggatgctgatacagtcatgaggttcagcttaaaaggccagtttctctactgcagaataatgaggtctatcctgttttgctttctttcaaagcccttaccatttatgaaaccagattgcaagtctgtttgaatcccccaaatgcctgtgctacataactgtctccttactctgtgctcttgccccaggcagagtggaagttgccttataaagctgcgacttggccacagtgttttccctttcagcagggaaaccggagttctccstgctgttgggaggttcaagagccactctgtgcagaaatgcccagaaagagttaagtgaggtaagttcgtcagacttctgcagacccatactgtggaagggtcaagtgcagggtcaccaacccgttccatcttcctgtcagttggcgtccacccttggtttcaaagggaacaggcattactgacatgacsggacctttacagttcccagctgctcatttggagtactgcggacccaggacaactaaagccggggtcgcctgccctccaggggttcctgggttgaagtatctgttccctccctttattttttctagcctttatagaaatgacaaagggtcaggtggtcttaaattccaaatctgggcacatgaatggtctgacctcggaaacttmctatatgctcgaaacgatttaactagcagcaataaaatctctactctttttatgacaaataatctagcatgtctggggagcatatttgattcttcatatttgggacccttttttaaaggctgagttttattaaaatgatagaaaaattagttattaaacagtatgtcaaatacctttctgtcccaccagatttatttttaaagacaaacattacagaggggcaggggaaggttatatttgaaatctttctatcctttctctaaaatatatttggtgaaaactaggaagtgttgatagatatcattgtttcctgacaggtttttggtgtttgcatcttgaaagtaaaactgccaagttatttttttgttctggtttttgttttttaagcttttctttgataacctcattttcaaggggaggcttagcactgatgtattttattttcttgctcagagaggaaacactgaaatagctatatgcttccccaccaggagagtggaagaatcttgcttttaaagcgatagtcctattttctaagtaaaagtccaggcatgtgacttaaaaaagaaaaaaaaaaatgttttctggtcaagtcacatgcctctgaggttkktttttttctttctttcttttctttttttttctttttcccagactcctcatacccctcytaggagacagtgattccctggcttcaccaggcaggctcttgggggcttcctggtccctgtcactcttaaaatgcagcctgtctttggacatctactccaagtttgcattctgccttgccttgtcagtctgggctatcaaaaatatagtttcgtttggaaaacaaaggggtgaggtgggtccaaagtacaggaagctataccatgcaaatgaaaatattttttccaaagcyatctgctaatccctgtgatttaaaaatgtgcgtgtttttagtttctgtctaatttcaaccttttcttgctttagtgattaattaccaggtttctctattaagagcttgtgcgtgtgtagggggtagcatagaataaacaggctcagagcccccacccccacccccctttaagtaacagtgacgcaaacgacctttatttagcagaaggtagctctgcgaatccgctgaatgtccgattgckatctcgctggaaagactgctgcttcagcaaggtttctttgctggtctgtggcaaggtccctgcttcattttcaaggtgtcctcacttggtgcctttgaagggtttttaatggattcgcttgatataccttccaaatggagtactttgtgcgttaattcagtttgtgataaagatcccttttaccctccttttcataattcttcccagagatatgaagtacactagaaggttagatgtggcatttaatttttccacaaaacctatccatagagggggaaaaaaagattcaatttcattactattcatgtgtaagaatattgaaggtggtatactaaaggagataactatttcttcttctatcaaaggaagaacaaatctgtctttgaacgaggagctcaattcttatttaaaagataaaaggtcacctacaatactcattcctttaaagctatagtgttggggtgggaaggaagctgtcttacctggacatattaattttaaattttgcttgaaaaaattgctcagtgcatttattgactagtctctctgtgtgagttctgaaagtctgtttatatctgttgccccttctcctaaagtgaacccagatatgtgggtatggggtgctagtttttatattaggtctgagatgtggaaaacagaaatctaacttagggatgtatcataatcaaaccgtcggggctaatggcatggctctgatattataaaatctggaggtttggaatgcagcaaactctgggggcattatcattattattattaatagtttgtatttacaaatgtggcattaagtagaacaacgtattcttgcaattaatgacaggaagcctacaatttctcattaagcacaggacagtgagaacgaacrgaatttcagagacatgtttcttaacattaaaaacaacaaaaacaacaacaacaacaaaaaaccaagtaggaagcaggcagagttgcaatatgaagaacaatttcaatcatatgttgtttaattgagtttaacaagtaaatgtatatcccagtgtgtgtggtcaccaaagcataatgacaagttgttcatcatttaattagagatttgcttattgaaacgactgaaataggtagttgaaattttgcccttggacaagggagtaatttgtgatttgctacgttcatttcgtgagacttttggtgaaagacatctccttctcatatgtttaggcaagcgttgatgacatcaacctagccttttattttaaatcccctgtcaacgcaattagataatacaaaaataacaaaactayaggaggttgaggatggggctgggggccaaggagattacttggtttgaaatgaataaattgtctatcstaagggaattctttggtgcattttattgtgtgaaatgagcctggtcatatgactgccctgcctccctggaggcctccctgccctcctccttcccacagacacttatgggaggtactggccarctctgtatggccagtactgccctaagcaagaccaagaagcttagtctcaatttcagagagttattttggcaacatatttgggaaaatgatagttagatgctgcgttagccagcctctgcatgattttttacgcaraacaaacagttccaaatatcagtgctttcagcaactcatatatttctcacttatggtgcatgtcgctgatggttggctgctgctctgatctcactccagtatcagcttcagtcaaggaacgtattgttgtcaaggaaaggaaaaagaacagtggtgagaccaaaggatcttaaagtttctactttggaaggggcgtggcattgcttctctcattccattggctgaagcaaatcatgtatacaagccagaagccaatgagctataggaagggtagcaaagaacagaacagccatacagcctagccsacagatggggtcaagaagattcaataggcattggctgaagacttaagacttctcaagcaagttggatcctggtgtgcacctggcatatcctttaggattctttagtgttggtagattgagatggaaatgaggaaacttgtattacctactcctttgggccagaatttgcttacagcacagtgaggaggtattctttggagagcactgtttcccaagagtgattctaacaaagaggtgtaaatggacaagaatgaaaagcaattgcaagggccyttgaaggtttgtgaaggatggcaaagtgacttggatgttgatttctaaaggaggtraaacttgaaggtagacaagctctttgtgtccatacatttgatgggtcatcctatgaaggagggcccatctcttacggcaggcagcgtggcgtaggcctcagagtcaggcatctggggcccagccttttctctgcaggtgcgggtggctcttggcacatgatgtaggtttttgtttttgttttgttttgtagacagagctcaatcttttgcctaggccatagtgcagtgtacaatcagatttcattgcagcctggaactcatgggctcaagcattcctcccacatcagcctgccaagtaggactacagttgtgcactaccacacctggctatttttaattttagtttctgtagagacagagacttgctgtgttgcccaggctggtctcaaactcctggcctctcaagccatcctccagcctcagcctcccaaagtgctgggattacaggcatgagccaccccacccagcccatgttaattttttcacctacaaaatgaaggctacaatatttactttgcaggattgctgtaaggattagaaccaccgtctctaaggcattcagcatagtcccttagggtaamatgagtgctcaagaaatagtaaattttartatgtgtctcatttttttccagatgctctggggtcactaccaaccttgcctttcaccctacctgtggatctatgaccctgtccttctcagaacaccactcagtacttctgggttccccaagaggtgcctcttgagagtttgtaggaaactgtgctttagtaactcatggtttctgccctcagcttctcttgcatggggccttcctgcttgctcctctgctcacaatgacaagtgaggactcccctccatgccttttgatgctggtgcccatcaccccgatcacatgaacgtctatgcccaggtcccatttcctgacattcccaacatctctaccttctccgggcctagggcagggatcactstttcagaaacatgagcgtatggaagccccagtgtgttccttgaagtcccgatgcgtgatttgtccccatgctgtgtcgcacttggtcatctggaccctggggttgcctgagtgtccctgttacaaggcccctcctgaaaccagattggtgtctatgagggtcatctgggaaacctacctctggcagaatcgctgtcctgccagtttcctctcccccttacaagggacatttatgctttctccctctacaaaacctgcatgcaaattatctgatggaattgacccatagtgggtgttctccactggttcaacacacctgaattccggattcaagatgcaatcaccactactgttgttgtgtaagtattgctagagatggctgcagaatacctgggaaagctagctaagcagtgactggaggaaggccccagctctttggaacgaactttccagccgagaatgctttccaaaatgggaacaagatcccaaccccttatcagaaactttgggggccggatgtgtttcagaattcagaagttttcaaattttaagaagagaatacactgcgtattctgtgtattacaggggtcagcaaattcacagcccataggccaaatctggcctgtttttgtaaataaagttttattgctatacagctgtacctgttggtttacgtactgcgatggctgctttcagctacgttggcagagctcagtagtcatgacagtaaccatatgcccacaaagcctaaaatatttactatctggctctttgcagaaaatgcgctgaaccttgcrtgttgtgtcacccctggaggtagcaccttgtaattaagcacatgaatatctcacatcagaatgaatgaatattcacactcagtgggacaaacaacttctgtcagctgtagactgcttttgccatcaaatggttattgaaagaactatctgtgttgacagccttttgggtttcatacagtcctttccagcttgggcagtatagataaatagaygcacaaagcagagggaatcaagtagaataacatggtttatttgtgtgtgtattgttctgtttttggtaaaatcatgcttatcatatcttcartgcatcatttattctgagtccacattgctgcctttgagccggggccctgaggtatctcctatactctggctggggtgagggcggcaggtcctctgggccagcccagatccaccctgttcacggtgtgtgtcctgctgggctcacttctgaagctgaccttggggagcagattgaacacctgttgatgccattctcttaatttcaggggaatgtgtgggtctttgagctagagagacataggtgtatggcagatgagggaccaccccctccaccttagtccagttacagggcctcgcctttttgatactaacgctacatgaagagggacggggccaacagcaggctcttccttgacgtgttttatgtacactccagaaatattgacagagttgtctttttgttttggtttttaaatgtttttttaagttaacttctggaatgcatgtgcagaacgtgcaggcttgttacataggtatacatgtgccatggtggtttgctgcagccatcaagccatcttttaaatccattcttagattttccttttccatagctctttgtgatgcttgctttaatcagttgatacatgtttaatcacgttttgctctgggctgtgttatatacagctccctccctaatcttgctagaaggtagggctaatgcattgtcaattcagaaatagggggtgttcctgagtctggggacactctagtgaaattctatgkgtaaaataatttgtacaagtttatatttttagctaaattaaaatactcacattcccattattttttagaggttgtaagctaagtaataacattctagaaactctctgttttttgaaaggkcatcaccactgttgaaggcgctaatgggagatcctaagtttcaggctctgctacagacgtcaggtcccctaggagttgggctgcctttgctctcctctccgcgactcggtacctggtgtatagttggctaaaaagaagttgttggggctgggtgcagcacctcacacctgtaatttcaacacgtagggaggctgaggcaggaggatctcctgaagcccagaattcaagaccaggctgggcagcatagcackacccatctctactataaatttaaaaattaactgggtgtggtggtgcacatctctagtctcagctgcttgggactactagaaaggtaaggcaagagaatcccctgagcccaggagttggaggttgctgcagctatgttcgcaccactgtattccagtctgggcaacagagcaagaccccatttccaaaaaataaatgaaataaataaatacataataaataaacagtagtggttgaaagaaagggaaggaagaaatgctgttttaggaaatcaataggataatttttttttttttttgargcggagtctcactctgttgcccaggctggagtgcagtggcacagtctcsgctcactgtaagctccgcctcccgagttcacgccattctcctgcctcagcctcccgagtagttgggactacaggcgcccgccaccacactcagctaattttttgtatttttagtagagacagggtttcactgtgttagccaggatggtctcgatctcctgacctcgtgatctgcctgccttggcctcccaaagtgctgggattacaggcgtgaactactgtgcctggccaggataatctttaagaagaagataacattagctattcttctcacttcctacgtagaattccmtaccctgtgtctttggcctggaaagggtattggtagcaattgtcttcggctttccctgccatgtgtatgcattcccacggccacacaagcacacacacacttttgtggttttttttttaattatataagcaagtaggatgtttgtcttagtttttttgggctgctataacaaaatgccatggactgaataatatataaacaacggaaatgtatttctcacaattccggaggctgagaagtccaagaggaaggcactggcagattcagtgtcyggtgaggatttgtttttgatctcataggtgtccatcttgctattttctcaactagcagaggcaactctctggggtatcttttaaaagggcactaatggccaggmgtggtggctcacacctgtaatcccagcactttgggaggccgaggcaggtgtctcggtggatcacttgaggtcaggaggtcgagaccagcctggctgacatggtgaaaccctgtctctactaaaactaaaaacttagccaggctcggtggcttgtgcttgtaatcccagccacttggaagggtgaggcagaattgcttgaacctgggaggcagtggttgcagtgagctgagatggtgccactgcactcctgtctgggagacagagggaggagactccatcaacactaataataataaagtaaataaaagggcactaaccctactcaggaagccttcactctmatgacataattacctcccaaagtccgcacttcctaatgttaccactctggaggttagaatttcaacatataaattttggggggasacattcagaycacaataatgttttataatgttcmttttgctttaacaagagacacatgtcagatagtagacatgatctgagaagacacaaaacccagcgtggtgattttggcagccttgccatgcatctctaacatgcacrtggccagaaaaatagcttggacattctgttcaaccctccacatsaactggtcagtttagtctttaaaaggtgataggcctgttgtsgtggctcacgcctgtaatcccagcactttgggaggctgaggcaggtggatcacttgagccccggagttgaagaccagcctgggcaacacggtgaaactaagaatagaaaatattaggtgggcgtggtggcgtgcacctgtggcctcagctacttaggaggctgaggtggaaggatcacttgagcccaggaggcagaggttgcagtgagccgacattgcaccactgcaccccagcctgggccacacagagaaaccttgtatccaaaaaaaaaaaaaaaaagtgaccacactgtggctttgctgctttgcctaagtatttcgtgaaattgatcgttcattcacaatgctcagtgcagtgactttgccgagcacaagtggtggacttaagaagccacataaagaagcacccacgtctttctctgaggacgtgcttgtgtgtgttctgaggaaagcaggtgatgatccctgaggtgtatcccccaatcccaaactagaagtgagtccccctgctcctcaagcttgcatggcgctcaggtattccagtgggccccgctgcattcttcccagtcccaggaaatctttgtgcatggctgtcttttctgtgccatcttgggcatctcacgcattggccctatmcacatgttgcctccagcatcccaggaactccgttaatgtttatttgaatgatggaatgaaggtgtcttgctatattttgacatttctgtcaaaatatgaatctrtctttgcctagcatcttttcatgtgcacattgcccatctttataacaaagtgtgagtgggaaaggacttttaatcttcattatattatcattcatatgaataatgttaacaattagtgtttattgagcacctgctatgagccagatgtagtgttcagtgctattcatgtgttcttgaattaaattttcatggcaagcctaagaggccatgactgtccacattttgcctctgagagacgcaaggcttggaggcaggaaatsactcactgaaggccacagcacaaagtggggacttgagtcccgatctcactgattctaaagtccttgctctccaacctctgtccatctgaaatggaaaagcactgacgcagttctcactctggagcttgttttattttgcttgggctgctgtagaaataccacaggtcaggtggcttaaacaacaggaatgtagttcctcacagttctggaggttgggagtcmtagatcaaggtgtcagcagggttggtttctctctgtaccattgtccctggcttggagatgaycatcttctctgtcttcacatggtcttccctctgtgtgcgtttgcatccttatggcctcttcttgtgagggcactggtcatattggattagggtccaccatataatgactttattttacctgaactgtctcttaaaaggctctgtctccaaacacagtcacattgtgaggtactgggggtttgggcttccacatacaaagtctgggacacagtacgytctcataagagacctcttctcaacaggatccatgtttgatccgggggaataaagctagagttgctttmwtccttgtaatatgtataatgactcatgagagaattcyccactgtcttccccacctgagacctgagaggaggagaaggaagcttggagtcgctgccctgtggcctgaattggtcagtgaccaatcactcagacccagctgacaggctatacgcggacaccttggatgtgcccagcatggatcttctccaagtaggaggccttggagtcagagaaaggtgcaactcccactgctgctgcaagaacaaagactttaagatactgaaatttctgggcaaagtttcctcaactcttcatttaagtgttaggccaggtggggtggctcatgtctgtaattccagcactttgggaggctgaggtgggaggatcactggaggtcgggaatttgaaaccagcctggccaacgtggcaaaaccccatttctactaaaaaaaaaaaaaaaaaaaaaaaaaaaagtatatatatatatatatatatatatatatatatatatatatatatatatgtagccatgcatgggggcctgcccttgtagtcccagctacttgggaggctgagacatgagaatcgcttgaacctgggagtcggaggttgcagtaagctgagatcgccactgcactccagcctgggcaacagagcaagacgccatctcaaaaaaaaaaaaaaaaaaagtgtaatgcaagtagaaaagggcacacactccaggtgtatatctcaacaaatttgtacacactgcatgcacatgggtgacccgcacccacatgttatacacagaataattacaggaccctgccaacctcctcctatcccctttcagctcctgctgtgatgccacttctaatctcaattttattatacaatttgttaaatacagaagtaaatggaggcaatagtgatagtraaaagaaccatgtgaaytgggcgtggtggctcatgtctgtaaagccagcacttcgggagtccaaggtaggagggtcacttgagcccagsaattggagaccagcctgggcaacatcatgagaccccatctgtatccaaataaaagcaacaaaaaaatgagacatgggggtgcatgtctgtggtcccagctactcaggaggctgaggcaggagaatcacttgagcaaaggaggttgaaccatgattgcaccgttgtactccatctagcctgggcgacagagtgagaacctgtctccaaaataaataaataaataaataaaaataaaagtaacagaaccataggccttatctttatctgagttcctgtagcatgtgcactactcctgattaaccaagtgaaagagaaaatgagactaatctctaacstcagcttccttttctgccaaatggaagatcatctctaattaataatgagttagaatacctaggacagtatttggcacacagttgatgaggatggtgtacctagtagctaatggtgagtaggatgaataataatactataccttttggtttctgaaatgagaaatctaaggaactggcttaaccaagaagcagcaagctgttttaattgtgctgttaggagggctgtttgttaaggtacagaagaggattggcccatggctttctgctaagaacctgctgaatgtctgtatagaatccctgcattgtgcctcctatcaatcaggtgcttaggtttgacaagtttcctccaacagactcgtgtagaagtttctgtatcaactggaaaaaaccatggtgcttgggacattcaaggccgaaacttggtccctggatgggagaagatagctgtatcattggcagagstgccttggtcatgtaccctctccagactagacactagatagtgggtagggtgggacagttttatgtcctctgccaccttatctgggactcttgtcccctgagaagtttgaaaatttggcacattttagtatttgtcagtgtacttcctgcttcttgatgcacttgtactgcacaagaattgattttcaggaaatatggttttttttttcctttttgcacagcgatgggttagcaaaatgcatatttgcatagaaataatctttagtgagctctgctggcaagtgtgtcaaatttataaatatcactactataaagacatacttttggatatggatttcttcctcagtttatttcttctttsattttttcatgtccaggtcactacgtattgcgtatatttggttggaattttatttttgagcaattcayttacccagattgtgtttctggagattaaagcatctcactgtatttttakttttttctacattgcaatttcaaaataatccaactcaaaggctgttgaaaggctccttctgtttaaggtaaagcctgtggcagcctttaacttcctttctcttctcctgctgccaccttggtccacartttatctttgaaaatgctgggttttaatgggcagggtatagtgcagaaaccagatggttttaactcacacctgtgaaaatgctggggatctgcgaaacattaaagttaatggccagaataaggctgccaagctcggtggaattgtacttaactggcatatcattctggttaactgaactttccattaactcacagatctatcttttcatgcccccttctaaccccctactcaccacccacccagttcctcctagtgggcagtttgctgctgctgtcttacctcctcatcctcacccctttcacctctcccctggtaactgatttatttttccctcttggagktgcttattcttttcttcttccagttgcatctctccctctacttagatacacatttccattttacttctatttggtagtctcagaacttggcttttattggccagtatattcaatgattcacttgcacctttaaccttgtgttgttctaatcyttttttttttttttttttttttttttttttttttgagacagagtcttgctctgttgtctaggctggagtgcagtggcaccatctcggctcaccacgagctctgcgtcgtgggttcatgccattctcctgcctcagcctscggagtagctgggactacaggcactcaccaccatgcctggctaattttttgtattttttagtaaagatggggtttcaccatgttagccaggatggtctcgatctcctgacctcatgatctgcctaccttagcctcccaaagtgctgggattacaggcgtgagccaccgtgcccagccttcttgttttaatcttttagacaactggacacaggtttgtctttgaaattgtmctggtttttcttgatgttttagtgctcctggatgtccaatgtcattcttgggctagttgaargaaagttttggctacccagttgttagctgctgaagtttaactgtgcattctaagcacaccagtattttattacatcatacctgggcagcagatarttttagtaaaaccttgaaaagatatgactattgggaagaaatttgggattctatcctttttctctccattcttctctcctgcaccaagtttctaagctcgtgattaaataaattctgaccctactctgataaaagtgaacccttgtggctggtcgcagtggctcatgcttgtaatcccagcactttgggacgccgaggcaggcagatcacctgaggtcaggagtttgagaccagcctggccaacatggtaaaaccccacctctactaaaaatacaaaattagtcaggcgtggtagtgtacacccataatcccaggtacacaggaggctgagacataagaatcgcttgaacccaggagacgggggttgcagggagctgagatcgtgccactgtactccagcctgggtgacaagagtgaaactccatcttaaaaaaaaaaaaagtgaacccttgtagtttcttcctctgtttgacagayggaccctaagacggccccagtgataccccacctcctggtgtccaaggcctgatgtgatcacccttcccccaccttgaatgtaggtgggacatgggacttacttctgaccaatagaatatgaaaaagataataggatgtaactgtttagattcggttacactatatggcaaagcaaagggattttggaaataccattaaggtcttacatgagacagattttgagttaatgagcagggggatcctcctgggtgggcctgacttagtaaggggaaaatcccttaaagaggagctaaaataagagagtctctctctccattgctggctttgaaaaagtaagctgccttgcagtaaggaactgcatttggcttctaggagctgagagtgccctaaggaagccagcaagaaaatgaggacattagtcctataaccacaaggaaatgagttctgctagcaacctaagggagcttgaaggtgattgaccatccccagtcaagcctctgatgagaccgcasccccactaggcaactagatttcagcatggtaagamcctggatggagaacccagctcagccatgcccagactcctatcctatggaagctttaagataataaatgtatgtggctttaagctgttaagcttttggtaatttgttagatggcaacagaaaatgtgtacaccctggatagtagacagagactgcatctttctttggcatttggctgcacagcaagttctaagttactcaccaggtttcagaggagagatgggaatttgatgatcttataagaaacctgtactctttggccagacayggtggctcatgcctgtcattccagcactttgggagaccaaggcgggcagatcacctgaggtcatgagttcgagaccagcctgggcaacatgctgaaaccccatctctactaaaaatacaaaaatcagccaggcatggtggcgcatgcttgtagtcccagcgacttgagaggctgagggatgagaatcacttgaacccgagaggcaggggttrcagtgagtgcggtggcagctgggacattaaccaagttgtgaaaggagccatgatgttattagctgagtyatgtcactgcacctccagcctgggcaacagagtcagactctgtctcaaaaaaaaaaaaaagtgtactttttgaggaaagttctatttttcattattttccactatgaatgaagaagaaaataatatacatacattactkggattcatacggacattatttagacacacttccacctacagagtcacatattgtatagaataaaatatcatcaggagcagctcatgtgaccagaatgtgrcaaagtctttgctctacaggtcaagttgggacttactgaggagaaatgaggggactkcaaagtccaggttgcaccatccactttatagatgaggaaagtaagaacccacagcatcttgcacgtagaattcaatatatgtcctgcttcttgaatcacattgacctaacaggtcatatgatttccatttgtttgcacaacaactcaagggcaaaagtgaaattggaatttttgcttttgaatttctgaaaccttgttttatttatttattttctaatcttttttttttttttttcgtggaatcatgttcccttcggaaaactccctgggtgccccagcattatgtggtaaaggacatgtatttccaactggcaggggctctgcaaagtttctctgcctcctttgctmaccaaaccctaaataattgtctggatgttccttttattgtcacctctgaaacaagacgaagatttggacggtttgctttagagtgcattaacttctttatcacattaatactgactcatatcttatttcccacttgcaataagaaaaccattcaaatcttkccctcacaggacaatatctttaatagcttctgtgtgtttcctatttttggctgtttctgtataaacagactaatctaatagcatactgaacccatctaacttggcagaaattcagaaaatcactcatttctatggcaagctgagatgctgagaagggggaaaaaaccctcacttttattgcagcaagatttttctcaaagttgcctttcatgaacataatatgtctatcatttggaattctccagcaccctggctggaaattatttattgcagaacgacacaatggtgaacgagaaggtattattccctgtacgatttctggcttgaatttgtttgcctaaaggagcagatatcgtatgaacatgattttgaatgctggcatggtgatgaaaggtgatgttcacctggagtctgtacacacaaaaccctgttcattttacctaaagggtaagaacatcatggcccccttcatatcctggttaatgtccccgctgaccctgagttctgcctccatcactggaacaagagcctgtctttgggaagaggtgtsttccctggcactcgtttgatttgtagccgccacacatggcaggtcccaagctgtctgaagtcttggctgccattcctaagctactaaaactttgctggagaacatcaccaatcacgctgagggatcctttgacaactcagcttcatgaggacagctgcagttctgcgtttaggctggggtcaccggggtcgctgccccagccccactctttagcctcagtccctctgtggttcccctgactgagctcctcactaaaggggaggaatccctggagcctccccatccaaggccagcgtgttccatttgagggtaactggatccctgaaattcacccccacacaatccacaacctactactagaatgccatatgcttttctatatgctgttgtttaatttcagttggtacatattttattttttgaaacagacttcgttagaacatctttagatttaaagaaaaatcaagactgtagtaccaagttcccatgtgtgtaacagccagtttatcctattattttaacgtcttatgttatttggtacatttattaagattaaattattgatactgaaatattaggttgtgcaaaagcaattgtggtttttgccattaaaagtaatagtaataataatactcggttggtgcaawagtaaatgtgttttttgctattaaaagtaatgcggttttasttctgcagtttttttgccatttgccaattacttttgcagtttttgccagtacttaaaagtaatggcaaaaactgcaaaagtaattggcaaatggcaattgcggtttttgccgttacttaaaattgcattacttaaaagtttttaagtaatgcaattacttaaaacttaagtttttaagtaagtttaagtaaaatttgcattacttaaaagtaatcgcagtttttgccattacttaaaagtaatggcaccaacctaatattgttattactttttaccaacctaatattgttattaactaaagtccatcgtttatcatattgccttaggtttttaaaaaattttttacctaatgacttttttgtgttccaggagcccatccaggataccacttttatttattttttttttctttttgagatggagtctggctcttttgcccaggatggagtgcagtggcgcgatcttggctcactgcaacctccgcctcgcaggtttaagtgattctcctgcctcagcctcctgagcaggtgggaccacaggcatgcgccaccacgctcagctaatttttgcaggataccacattttatttaattgtcaggtctccttagcatcttcttggctgtgacagtttctcagaattgtctttgtgatgaccttgacagctttgaggagtgctggttgggtattctgtaggatgcycctgtgttgggatttttatgatgtttttctcatgagtttactggagttaatgaatttcagggaggaagaccccagaggtctgttttcatcacatcgtatcaagcattccaccttcatcatgactcttcactgttgatggtgactctgattcacctggtcaaggtagtgttcrttaggtttctccactgcacacttagtctttccctctactttccacactgctgcctttggaggagtgttgctgtgcccagctcaygcttgtggagtggggatttaatgttctcactcttcgagggtagagtatctgcataaactacttggaattctrcatggaatatttgtgtcttctcccccatttatttatttaatcatttatttatatcacagtacactcatggacatttattttatgctttatgttataatcctatactactttrtttattttgttgcttaaatttttccagatggaacaatttggtcttcaaaagttgctgctgttggctcctgtgttcttgtgatgtacacacatcatggtgtggtgtgtttttatctttggttttgttttcacttcttttttgctttttgtgcctcctcttccctcttccccccacctcatacatacacaaagggcagcatgctactataatttctggaatctcagccatattcttcttttttttgttttaaataaaaatcatactagagcagtaggcagtgtgggtgagttctcccactttacattttactttgcataatttaggcccctttcaggccactyttccccctgtgccccaggtgtgtttgctaccatacctccccaggggatagccctccaaacytgattggccamctagtctggtcttaaagtcccaaagggaggccatcacaaactactcagtatggagaagacctgaatcctaattttggcttaaccccaaacttgggcgattcagttttacctgtgtcctctctataccatagtttatgacaaggggttttctgtggctggtctccaaggcctcttccaatcttgacattctrtgatcctgtaagtctttgaataatggcccaggatgccaacaagaagtcaccaatgagagttcaggtgttctgttggaaatctttgtaaaatcacagagaaaaggagaagaaaaagaataaagaggaaaaactggacacataaataggaagacaaagaatgaatgtggactggggagagaagagtcattgacagggacaagaaataaataactttgatgcaaatcctgggaagactctggaacaacatggaggcacctatgttaactctatttcattttggaaaagttgastagacaaaaggtgcagagtagagtatgcagtgatttcagggtgttgggctctgacaaratratgccgacttagacagtgttagtcaacatcaaatgtctggatcaagagaggcaagaatcccgtggattkggcgttggccagaacttgtctggaatcttgttttctgccttsagtgtcacctgttgagagctctgttgacaaactggcatttgtccttgggagagtagcctcaggaccaggggtgaagagttcagtaaactgtgtttaacccaaggaaagatacagggtgtgtcagattttgtaaggattttcaaggagcagtagatagtggccctacagtggaatgaaccttcacaccgaggatctgcttcctttgttggaggtgggaaagcaaaagctggatgcttggaattgtcatggctgccgtctgagtgatgctaccttgagtggacggtttggccaactaaggagtaaggcctctccctcatgtcacattgagtggtgctaatgtttcctgaagtttccctttcttttcagttcagtgtttcagaatctcagccttccagcagaatcccctttgtttgctctaaatatacattcccaagccccgtgtggccattctgatttactaggtctggggttgggggattgtgggtgccgagaatcagtatttctatcaagctcccaaggggacctgatatatacatggagctgaaaagtacccacctaacagacttgccagctccttaaggataagaactatattttcttcctttttttgtatgcctccccatgcaaggataattacacagaataagcactgagatgcctgttgatggatttattccagcaattttwtttttttagctctctttgtctggaactttgcaaaataaacaccatggtcactccgtgctttgtgagtgacgtgctagaatggaatttcactgttttaaattcagggttaatttcttgctttcaaatgaattatgaaaggaagaggagagacctttggaaaagtctgaatgttgatgccgacgactagccaggcgcttcccttccagctggtttcgtgagggattaagaggccactgttgtgaatctcccattagtgatggtcccaggccccctcctcattgtgcatttatcttacaagaggcatatttaggagatgtttccgttctattttatctgcagaattactttccattctcaggtcttttatataagtattcccttgaacccgttccaaaaactggatttttaacccaatagaccataactgcagtgttttattgtgcttacatatttcaaaatgtgaatgtaagtagatttagcaaagttaaaataaaatgaaaacttttcaaagggcaccactgctcgcattcccatgttggagttttccctttggggttcttatgccattttaaagactctgaaaacaggaagactttttctcttgggtattttwttttttttttcctctgcaagggatggggtcataagacattggtgaggttaggccttcctttgtctcccaggagcacacttgatagcaatgtagggtgaattccaaatctgtgagttagtgccrtatatagcagtgttgtcagtaagatttctcactggcatctctgcttcccctcttgactctcttgaaatcccttcttcaggcagaagytggagtcatttctctaaaatagaaatctgatcttgccaccaccctacttgccactccctgcttaatcccttcactggctcaccatatcccttaggataaaataacaaaatcctttccagggcctgcaagacccctgccaacctctgcagcttactttgtaccactttccccagaaacctgctacctaccctgctccttgccacagggcctttgcacaggctcttgtctctggctagagtagtcttcccatcctgctttagctaatcaactctttctcatcatttaggcttcaaatggatcatcactttctctggggtgcaggggtctttcatataagtatttctttgaactcattccaaaaaagtggatttttagaaatagaaaaaactaatttagaaatagaaaattaattgagttttagtttttagaaaattatctaagaagtagatttttagaaatagaaaattaacgtagatcacagaaaattatccaaastcagttaattttcccttttccagcaactgtatttgtcctccccacttctcttccctgccttctttttttctccttagcacttacaatgtctcactcatgtagactcgaagcttcacaagggcagggattttagtctatttcattgaaaatctgtcaccagtcactggcccagagagagtcctcaaaaataattgttgaatgaatgaatgaatgaatgaatgatgatggcgtgatgattgtgtattcctcatctggctgtaagtttcacaaggccaggcactggggtcctattttgctcactgttgctgtgtgggaaagagttagtacagcagactgtcgcaagcttggctcttggctgcatctgggaacttggaatttaggagggctgtcaccattcccagatcagataaagatggctcactctgtctagactgcttgtaccaaaaatagggctcatgtggaatacctgctttcctttgtggaggctggaattttgttatatgctacagagagggtgcctacgtggccaacttccaataaaaactgtggacactgagtccctaatacatttctctggtagacaatacttcatatatattttcacagctcatttctgggggactaattaaatgcatcctgtgtgaccccactggaagaggacatttggaatcttgtacctggttttctccagacttcgcctcattcascatttccctgtgctcattttgccttgcatccttttgctgtgataaatctcagccatgagtgtgaccgtatgctgagtcttatgagtcttccttgcaaaccaccaaacctgggttggcgtttcagtgcctgacacagttgtattcctaagacatagttgggaccagacctcaagaaaatagccaacaaatactggstgaatgaacgaaagasgccataygcagtcagcccccctctctctgggttctacatatgtagatttaactaatgacagattaaaagcattcgaacaaacggagggtggtatctgtactgaaaatgtaccaactgcttttttttgtcattattccttaaacaatccaacataaccactatttatatcgtgtttatattgtattaggtattataagtaatctagagatgatttaaagtgtacaggagcrtcacatacattatatgcaaatactatacaattttatgttagggacttgagcatttgtggattttggtatttgggggggttccttgaaccagtcccctttggatactgagggacaactgtacaaatcacatttaggagtggatgcaggtcagtcgtgacatctcatccaccccttcctcacccaagattctccgtggcttgtgtcaaggcctcaccacatcagaatatttctgctcatggttgctgagacagagctggacaggtccagcatccattccccaaaacagaactcaaactgacgatcatcaagatattccagctatggcaaactgcggaagaattaggacagatgtatgacttatttcatataaagctaaatcagtttaatttatatgattgtcctttattmtgagattatgttcaacagatattttcagtgttaaaatattcttttttttttttttttttgagacagggtctggctctgtcacccagggtctagcacagtggcacgattttggctcactgcagcttcctcctcccaggctcaagagatattcttgcctcagccctccaagtagggctacacgtgtgtgccaccgtgcctggctattttttgtagggacagggtttcaacatgttgccaaggctagtctctaactcctgggctcaagcaatctgctcacctgggtctcccaaagtgttgggattataggtgtgaaccaccatacccagccaaaatattcttttcaaagtgatwagaagtaggagaagcttgctctctttttattggcacttctgtcttacatgcactttttgattkaaattattctgkcttctatgaaatgacagtgattggaggtggtttatttttttttaagtctgcttactcggaaaaataaaacaaagttgacaacctgatttcagacctcccaattttttsttaaaaaaaataaaagtcttcttggtccatgaaatccagaaactggagaccaaactagcaaattcgcaaggagctgcttgatagaaaaacacttgagatcaagagtcagaaatagctgggttgaattccagttctctcatattaagtgacaagttgcagaatgcccctgtctttctgagctgtttttatatctgtacaatggggttaatactactagtatttgmttccagggattgttttggaggggagtgaggaataaatgatataattcactaaaacacgtagaatagtatttgacacagagtaggtcagcatgcccaaagtatcagagtcattattgagttattccgctacctccgtatttgagtcctttcttttgggctttcctacttaacgtcgcagatgttatttttttgaagagggtgtaggccaagaaaggggtgggagaaacgagcaaggtgttgatagaaccccttagtgtcctcctcataccacagacactctcttcccccacttacttggccaawtttttttttttttttttttttttttkggtggagtctcgttctgtctcccaggctggagtgcaatggtgcgatctcagctccctgcaacctctgcctcccatattcaagggattctcctgcctcagcctctcgaatagctgggattacaggtgtgcgccaccacgcccagctgattttgtatttttagtagagttgggatttctccatgttggtcagactggtctcgaactcctgacctcaggtgatccacccgcctcagcctcccacagtgctggggttgcagctgtgagccactgcgcccggcctacttggccaaattcttgcctgatcgcctctccacccctgctacgtgtaatagaaaggtagggccatgttggagagggatccaacatttattatccccattttacagatgaagaasttaaggtggccaggcatggtggctcatgcctgtaatcctagcacttygggacactgaggtgggtggatcacttgaggtcaggagtttgagagcaatctggccaacatggtgaaaccctgtctctactacaaataaaaaattagccgggtgtggtggcgtgtgcctgtaatcccagttactcsggaggctgaggcaggagaatcgcttgagcctgggaggcagaggttgcagtgagctgagatcgygccactgcgctccatgctaggtgacagagcaagattccatctcaaaacaaaacaaaacaaaaaaacaagaagttaaggattgcagagcataagtatcttctatggggctacccaactaggtcgggacagggcagggatttgaacctaggagctcttggattgcaatttttcattcacccctccctctccacccttcctgtcttcaagcctgagcaggtgatactgcattttgtaccgtatgactttwaaacagaaccacgagttcagaactttggttaggtcctgcccgtgttctctagctaacgcatggcaacgctggtttccaacctttcactgtgcgggtttctgatgagtacgctggcaggcctctggcttcagagatgccactacaaaggtctcctccttttcataaacattgctgcaaggcccgcttctcaagaaagcaacttgtgctacctcctgcgtgcttttatgcttcgctgtgaagtgcaaagttgggctggcaggcctggctttcttctccgacttatgtatgattcatcaagaggactccaggctgtggtgtgcggtgcaacccgggctgtgttcccgagtgcatcaaacggggattgggacctgktttccttcccactcacatgtaggtcacctacgggagcargggaggaaccatctgaggtgtttttttttttttttttagatttctcattgctgagaacagttccagctctgcygaccaaaggctgagtgtccytttattagtctgagcccctagagaraccaaagaggcaaccctcgagccaactgacagccagctgtggggttggaccctgtttttcatacagtgagcactcttgaacccagagaaggtgcaggttggagatgcagctatatgactctgtaccagagagagacctttttgtacatttggaataaaaatttttagcattagagattcgcttttttgtgtctaaatacaaatgtccaggagaataggaatgccatagtggtgagctaagagcaggcagttagttaagtgtatgacaagtatctcattataaatggatgctgaaatgtccaagtgtggaaatgataygcttcagctcttatttttaagtcatccttatctctttcacttattccctcattcaggcaccaaaaatgctgtttgactgggagagcaagtggagctgttcaaagttstagggacagccgggcgcagtggctcatgcctgtaatcccagcactttgggagggcgaggcgggcagatcacaaggtcaggagttcgagaccagcctggccaacatggtgaaaccccgtctctactaaaaatacaaaaattagctgggcatggtggcgggcgcctgtaatcccagctattcaggaagttgaggcaggagaatcatttgaacccaggaggcggaggttgcagtgagccaagattgcgccactgcactccagcctgggtgacagagcaagactctgtgttaaaaaaaaaaaaaaaaaagttctaaatcagtggattctgccgataaacatcatctggacggaatgaagctgagggccaatagtttagaggctcagcacccgactggagagagagagagagagagagagagwgwgtgtgtgtgtgtgtgtgtgtgtgtgtgcgcgtgcatgtgtatacgctggtgtttaggtgggcttgagaaaagtgctgactttgtgaacgaggaggagggaaagggtccagagcagtaaagagcctgtaaataaattcataccagcttcagccccatgctttcgtttgggattcctcatccaaccctgacggcttccctgcgggacatatttccccctcttacagataggaaaccttgcccaatgtgattacgccaggaagtcagatttcaaatctaaatgtgcctaatgccaaaactgtacctcttgccactcaacatctgcagtcaaaggcttcctgactcaggatttgctggggtctggctctgggctattagaattagatgcgtgagaccctttcaatctaaaccttaagtattttgcctgttggacagatgcctggttgtccctttaatccatcgcccaaaaagcctgaggaaggatggcaggtggacttggatctaggccactcccttagatcctgattaggggacctctgcgactgctcatctgggaggaactaggggagcgctaatgtgttgtccttgactgggcaagaagggaaggagaattgtgaaacatgcacaattagaagtcgtgcacctgggttcatatcctggctgggccacttactttctggcgggtggggarggcagacaagttgctcatcctctctgcgcctcagtttcttcatctacaaaatgaagatgttggttatttctttattcaagggttgttgaraggatgaagtgctaaaaatgcttgaccagcattcacacaggcactaagacggtgagtactcactacttakcgctgtcaacatcatctccgtccacatcaatgtcgtcatcgtccttatgaaaagccckgggcatcattttgcccttgagctggatgtccatgttggaaaaacagctagtgraaggcgtgcccaaatctcagaagttggcgtttccttgcagatatcattggtggccattggaggggaaaaagatgctttggaaaccaggacacagagaaaagtgcctcgtattatacagagccaagagaggtcactgtggaagtacagaggaagccttggcctaattgcacggttaatacaattccgtaactcatcctgccaacacgaaggtagatggacggtccttatgctcgctgcggaacactgcctgtgttttcctaggagagacatctgcactctagtagtgattaaaatgcctttgacaggctcttgctattaagagtttctggctccagtttaataaaaggtagtatattataatggaaaccaggttattattgataaggactagacatattagagaccaggttaaagctttgatagtcccaaatgcaaggggagggagctaagggttattgcaaacctactgtgtgtcaattgctctaccagacacctcagagacatcacagccaaagacccccacctttgaataaaccaagtttggcctctctgatatattaatatatttaatcatcagactttcagtgttaaaggagattacagtagaggcatccagttgattggggaatagttgttgcaaatgataagctcttttgaataaactgatactgacttaatgaggttctgctgtgtactatcttttttttcctaatagaaaatagagtagctgccctccccatccgccattctcagtccttttgcttactagtaatgaccctcttttctctcactccatgggaacttttaaaactgataattaatggatttttagcctcaagtttctggaattctaagagggcctgaaaggtaagtgctcacttactgaggtgtgtgaacaaaaacaggcaacctagctcarcaagtaagaatggagtggcatctccccacctgctctggagtcatgtgtttgcttctggaagggaggcaagaggcattcaacctcctgttaatttggttgctccttcagatacgctcttcatggtacagccctgasctgcatcatttaaagaccaattgttaaggaccaatctgagggcctgtgcattagttaaaactccttatctggtcatagagggtggtgtggtttggacgcgttccccttgtctgtgcaattcccaacagaggcaagtgcgcatttgagacaggttgagggttcaagctgtccaatccctgctcatctgcagcacaccaaggaatgtggactaatgaaaaataaactgcatgcatgcartgcccatcacactgcctgcattttctaatcttcacaataactctgtgttgagaaatattcctgtctgtaatcccggcactttgggaggctgaagcgggcagatcacctgaggtcaggagtttgagaccagcctggscaacatggtgaactccccccaaccaacgacccttcccatatctactaaaaatacaaaaattagctgggcatggtggtggggacctataatcccagctacttggaggctgatgcagcagagtctgttgaacccaggaggcagaggttgcagtgagccaagacagtgccactgtgttccagcctgggcaacaagagtgaaactctgtctcaaaaaaaaaaaaaaattgtttctggccccacgttacagatgaggcttttaaagatacccagccaatggtccacagtgatgtaactcatcagtggtccacctgacattggaaattcggttgctttggaaccttctactacatcccctttccttactcactgacatcattcccagatcaaagaaagataaaagaaggaagggctggagacgttgttttcctgtatgctccttgatgaagggctcagagctaagcgcggagtaggtgcttaagcccttccatttgaaaggagctttaaacacctttggtggcagctaagagtgtcaaaatggagggatgtgtaggggacctagggcctgggtaacattgtcccagsccagggcctattgtgttgtgtgtgtctccactttccagcctttgggaacgcagagggggacctctgtaattggtaccagcatcccttccttgcagggtccgtccttcctctgagttgggggaaggggtctccatggtttcttctaccaggtagacccagaatcactttcaacttgctcacctgtctgtgcagtgtttgagttcttccctgggaagcttgctcacatcatccacttctctctgggttctccgtaccgctttccccaatccaagctaagctcttctcttagttattctaataactgcccaatatcaggcactaccctcaacactgtttcccatggcaattattttacatgacagtttaaaaaacaggaatgctcgatttgtattcccattttgcagacaagccaacgaaggcttggaggggttgaatggcccaagtttcctaagtggccaggggcagagtcaggatctgaacccaagacataggcccaggagtctgtgtttgttctttaaacctctctattcagttgcccagctcttttcattccctgtcctttccccctctggctgggtctgcctttccaaccgctaccaccttccaccaccattttttttttgttkcctctgcaagcaacatctgaaaggcccagacccagcttgttggccttgggctctgataagatctgtctgcactccttttgtctggcctgtacctgccttttctgaatgaccctgttaattgcaattgactctcatagaatgtggatagcagtgccasttgacaccagactaatgcttctgacttttccatggtgccccagcagcaggctggagggaagggcgggggcggtcagaggagagatagagcacttcagattccamtcgaatacattagagcattagagcttttctcttcctcagggtgctctctctctctgggttgggaggagatgtggcatttctaggaattcacagtaaaatcagaaataattaggagatttcacagttgtagctcctgtgaagattcaggaattttttttttcttctatttgcaagctttagtcctaggcatggaaaaagaactttgaagaaaacctgagagatatsagtgtaaaacaagagaatgattccctctggggtgctggtagtgggggcttaatttcctaaaggcttactgggtatcagggctgctttcctttataatcttttacccgtcttatgggggatgaacagaaacacactttagtgctagaaaagctgggccyaaaagaccagtctcctgtcccatacttggacatttattgttctttttgggcaaggtgaaaacttgaaaccaaaagtctgttgagtttggaagacttgactcccaggatgtacaaagtacttctgcatgtgcgcaaagtcctgtaggcccaggcatcaatgacacatgcagtgtgggcccaggcatcgatgacacacgcagggaagcaacccaagctgggtcagtccttacaaggagaccggcacctgggctcacaccttgccgtatatgacttcatgggaacctcataacagacctgtgggctcagaattattctctcactttgcagatgaggaaatggaagtgcacagaaggaaagtaagagtgtttgagatcctgtagtgggttcattgctgagaataaacccggagttgcctctgggaggacctggtggtgggtgggatggagagagaggcctcccctcagactccaggggcacagattggattttttttttttccagacagagtttcactcttgttgcacaggctggggtgcaatggtatgatcttggctcactgcaacctctgcctcccaggttcgagtgattttcctgcctcagcctctggagtagctgggattacaggtgcccgccaccacgcccagctaattttttgtcttttttagtagagacagggtttcaccatgttggccaggctggtcttgaactcctgacctcaggtgatccacctgccccagcctcccacagtgttgggatcacaggtgtgagccaccatgctaggcccagattggcttctgtgtgaggatgaagagtaataggaagatagagtggtgatctaatgtcaactgtggagggagtgggaggcaggtgttcgcagggcacagctggtttcctttttgaatcccacacagtgctggggcagtttcatagcctgtgaccacacagataggaaagtgacacagcaacaccaggcagattcattttctttaaatgaggggttcaaaatagaaacacaaagcattgagtattgagaagaaatggatcttcaggtttggagggaggccgatagagagtgtctggagttgccaacgtcctctccttgggtcatgggtgtgtgtgtgtgtgttttcttcttgktgktgggtttttttttttttttttttttttttttggcttttgcgcctatggtgacttttagcgaatggatactattgaaggaatgtttcacttccaaatccagatctctgacttcccttgaaaatttggagtgccactcaagtcggccgctctgagctagaatcctggtgttcaraattggcaggaagggcacaggggcaaggtataggctcacgtctccacattctgcacctcccaggctcctgccattgatgtgagcgggttcctgtactgyatgaagcaggggtttgcatccgaaacaaccacccgtgctgaatatgtaggtgatacgttgatctgtacagcaaaccaccatggcacacatttacctatgtaacaaacctacacatcctgcacattgtaccctggaacttaaaagttggtgaaaraaagaaggggccgggcatggtggctcacgcctgtaatcctaacattttgggaggtcgaggcaggcagattgcytgagctcaggagttgaataccagcctgggcaacacggtgaaaccccgactctactaaaatacaaaaaattagccgggcgtggcagtgtgtgcctgtaatcccagctattcgggagggtgaggcaggggaattgcttgaacctgggaagcagaggttgcagtgagccgagatcatgccactgcactccagtctgggtgacagcgcgagattctgtcttcaaaaaaaaaaaaaaagaagaagaaaagaaaggaaggacagatggaaggaaggaaaagggaagggaaaggaaaggaaccagctgcaaaaattgtcctaactgagcattactgtaacatagaacagctgaaacactcctcaaagctgagaggagggtttgggagagaagcaggctgtggttgtgaacaggtgcctcctccaaaaaaattctcttccttggatttcaaaatgacccccgttgacaacaaagcctttcacgctgtgtttattttttttcaggtctaagtttcccccaggagattttttttttctaaaggaaaaggcagagaagcccccagaccggagccacaatcaaatgcaaatatgacaataggacccatcctggagagaaaaagccttctttttaattagaagcctggaaggacataccctttaattgctgcacttgtagtgtcagggttatcaatatccgtggctctttcattaataaactggcgagtcagaaagcagcaggagtgggaacctctccccacccaatcccctctcacgccccaagctctatttaatcaactgcagactcaatcaaatggggaaaagaacatgtaaatcagctcattcattctgctggccctaaataggtagaaggaagggaaacatgaaagggagccttcatctgttttcctgcagatgcccggctygtggttaacccaagcaagaggtagttaaacggccccgcagattgccagtgactccgggaatgcctargtttatgtatggattaacacagtgatagaccctgagtagcaaaagacgaagactaattacctgacagarctcccctccactcgcctgggtcattgaaattaatttctgctttcaagcttggcagaaagcagctgcagaatttcagttcaatacttaaattaacggggagccgaaattatttctgtgcacaggcagtattagaggagtggcttaccaaatagatcttgatcgcagacacggaaaaaaggattattcctccccttttatcaagagccgtaagtccttggaaaatgcaaagagggggaaaaagaagaaaaacagcaacgarkttattggagagttaamacttaaakactccagtacattgagtgtgacatgcctgtgtaggagactgtctgtcccccaaataattgacaatttctctccatctaacaagaaaatatatggcacttttatatatacttgaattggaatccctaatccagagataatttgtgaatatccattctatagcatcccatgttgtcaagaaggtgttgacttactgcaaggttaaggaaatgggtggagaatgtagggaggaggtggaggataaaggataggactaggaatcagagttgggatttgaacccagggcttctgtctccagattccttgttctgtccctttatgctgactttccttttttgctcaaagtctctctccttgcttctttctctttgggctccctgcttttatttcggccctgatggaatctgtcgactttactgagctccatgtatgtgcaccaggtcagattcaatgctgcctaggtccacagtcctcagttatttgttcctgtgattttcgcgccaccaggagccacttgttggatgagatttccgggcaagttgagtctccatgtttttgtcgtgggctactgccagctgagatatggatgaagactccctttcatgtttcccttctttggtgtccatggcagttcccacctcgaccgctatggtatttcttttgcttctgctgaggctgtgtgtgggtgcacatcaggatacctcagtggggaactcagggcgtgaggcacactcatgacagatgcaggaaaaacatctcttttctaactgtccagctctttaggattaggcaatactttaataatcaaccaaattctggaatcctactgccaaattatggcactcatcctacttggtgtaaaatcctgggatgatagcttataatagtaataataagacctgcttcccggtgattmtctaaggattaaatcagttcatggagatgaaatacttaaactgtgcctggcacaaagtaaatgttagtgctactattatccctgctgctgttaaccccaactagataagccaagataaggtgctctccattgtttacctgaacaggcagaaaagctctatgcagctatccagacccaagaggatccgacagctctggaacttgtaatatttgcagcatgtcttgccctcttaatgtctaagaagtcaaaaaaggacacgtatgcctagaaaacrtgaataattatcatctatcaaatttttaccatgtgccaagcatagtcatatttggctaacgaaaacaacaaaatcaaccgtgacaaggttttattagtaatgaaactgaggcttctggaggatctgtaactgttgcaaatttccagtggctagttcagggacagtgccggggcttgaacccctgtctctgtgtctcccagctcataaggtgtgctaccaagtcacccatgwgtagcaattaggcgacttctaacatgtccagctttaaacctgtgacctcaaggcaaatgacttccacatctcattagcactccccagagccttccagccccctgtaggagagggaggttaatcagccacgcgctgaatctgcttataaggctgtttcatgtatgatttttatatcttggctcctaataatggccccgttgtaaatgattgtctcactatgatatacgggttccttaccttctaggaactgatttaaaaggaagccctagacttcttgtgcctgtagagtttattcatatcactctttgcttgctcagcagttgaaatgggatggaggaaagccccctaactccaaaaaaaaaaaaaaaactttcttcccagcctgagacagttgccataattagtaacctgcagctcccttgatatcttgatgatactttattaaaacaaacaaacaacaaaaaacacagctgggtgcggtggctcacgcctgtaatcccagcgctttgggaggccaagatgggcagatcacgtgaggtcaggagtttgagaccagcctgaccaacatggagaaaacctgtgtcttctaaaagtacaaaattagccagacatggtggtgcatgcctgtaatcccagctactcagaaggctgaggcgggagaatcatttgaacctgggaggtggaggttgtggtragctgagatcacgccattgcactccagcctgggcaacgagcgaaactctgtctcaaaaatgaatgaatgaatgaatgaatgaatgaaatactacttctccctgtcctccccaccctaagcatctgatcagacaggtagtgctggtggacagatggacagacacctaccccatatgtcacctccctcctctatgcaaacaaaaattttaattatttctagaatgacttaggagagcaagtcatgtgggatatatagcgtcagggagcgtattttcaaaccaaaaacctgggcccttattttttttttctttttgagacagagttttgctcttattgctcaggctgctgtacagtggggcaaactcagctcactgcaacctccgcctaccaggttcaaatgattttcctgcctcagcctcccaagtacctgggattacaggagcctgccaccacgcctggctaattttttgtacttttagtagagatgrggttgcaccatgtttaccaggctggtctggaactcctgaactcaagtgatctgcccgcctttgcctcccaaagtgctgggattacaggcgtgagccactgtgcccagccaaacctcggcacttttatccaacaaatatttatttcgtgactattatgagtcaggcttaagaatacaytagtaggtacagcaggagagcatgtagaagaggatagatgtagaaaatcgggacggcatgttaggaatatagataggaattactaaggaaaaktgtatttttgtggaattctttgaactcgttactattagtaaacggtgagttttggttctactcttcaatgagtttaagatgaaggaaatcattaaatagtgctttcttttcttcaaaagttgggttgcattgcatagttaaagttctttaaattcttctctaaaccccaaggctaagcaatatacaatctagttacaatggtctgcttgctgttaccagaatctrtcaagctctttcctatctaagggttttttccatgtactggtttctctcctgcgtggtcttgttctacccttgaggagggtaccacttcctcattgcttagttgtcagtataaatgctcctttctcagagaggcccatcctgaccatctgtgtttttttcctatcaatgctttaacaaatgaccacccatgggtggcttacataccatgaatgtcttctcttaccattctggaggtcaaaagtccaaaatgggtctgtcttagtccttttgtgttgctataaaggaatgcctgagctgggtcatttacaaaggaaggaaatttatttgtctcatgtttctgcaggatgtccaagaagcatggtgccaatgtatttctgatgagggcgtcaggcagcttctactcatggtggaaagtgaaggggagccagcatgttcagagaacatayagggagaaagggagcaagagaggggaggggaggtgccagagmctttaaaagaaccaactctctgggaacaaatagagggagaacattaatctagccatgagggatccacccccgtaacctagactcctgtcatcagccacggcctccaacattggagatcaaatttcaacatgagatttggaagcaacagacatccaaactatagcagggtctccttgggccaaaatcaaggtgttggcagggctgggctctgggggcttctggggagaatttgttctgactttttcgatttctggaggccacctgtgttccttggctggtggccacatcttccatccttaaaaccagcagtgcagcgtcttcaattctgtccctggctctgctccttctctccccctcctctccccctttgtcatctttttaggtttatttgtgaccttttagatcctttgtgactgcattggtcttccttgggtaactgcgcatactctcctcatgtcaagaacttacatccctctacaaagtcccatctgccatgccaaataacacctttgcaggtttcagggtagagcatggatgccttttgattttgatttggttgtttttggtagagatgatatcttgctctrttgccaggctgatctcggactcctgggctccatcaatcctcttgcttcccaaagtrctgggattataggtgtgagccagtacacttggccttttggcaccattattctgcctgccatcctgtcctaactaaagaaagtaaggtccctccatcctccatcttagcccttctttccttagcctcctaacactcaacgcaatttatatattttaattttttttttgagacaaagtttcactctgtcacccaggctggggtgcagtggcgtgatcttagctcactgcatcccctgtctcccggattcaagcaattctctggcctcagcctctctggtagctggaattacacgtatgtaccactactcccggctaatttttgtctttttagtagagactaggtttcaccatgttggccaagctgatctcaaactcctgacctcaggtgatccgccctactgggcctcccgtagtgataggattacaggccattgtgcctggcgtatatattttaaattttatttttcagtttacttggttttgcctccttctagaactagaacataagctctctgaagtcagggaccatgcctagaatcgccttccttttatytcccatcagccgaaactaactctgctrtgtcrcgctgtgttaggctgtgttggctgtgagtaagagaagtctcacccaactagctgaagcgaggtgggttggaggggggatgccttgtggaagtgacaactctaggcacgtaactggctcagactctgctgggcccagatatacagatgtcatcaagagtctttctcttccttttgagcccagctctccctttgtgacccagcaacttccttccccgatgatggccaagccttgaggatgtgaaactgcccartgccccaatctggartccaccatcctgggtctagctggggacatccttgaatcagcctctgggaatcactgaaccaacatgagtcacttgctactgtgagatctcaraacacatggatcaggacagagggcagggctgtttccccaaggaaatccaaatgctttacaggaaggggagtggatgctggcccggcccaggcgaggatgaggagtaactgagctgcagaccattgtttagccctccttccacctgggagactggctgctggttctcattgcttctgtgggtctccaggtttctatcattacacagattagcacayggttccatgatcatggacccgttcagtacacaatgaaatcatttgcaaagcaccttggggtctgttagagaagggaatggatgtctgaggtatgctaagcctaatctccatcttctcaaagctccactgccactgtcccgtaagggtgggcagattcctccccattctataaaataayagctaccatttcctgagggcatactgagtgctgacaggcacatcaacatcagaccatcaccttcttatacctcaraatagtctgcagggtgactcagaagctcctggctggtaagtggcagatccagagatgaaacccagatctaactggacccaagacagaaatttctagaacagaagccacaaacgtgttagctaagtctggttatgtcaagtggaatatttctggctttgggggatcccagctctttttttctctctcactctgagtatttagaggcttttattgctatttttctaaaaggcaacattagtaatcaactttgccaaaaatttcatatgaayggtgggcttttctttctcatttgctttcgcttagtattttccattattcatttggcttcttgaaccctccctatctgtaccccacacttactcttattcacccagaacaggtgtgtgccaccttggagaagatgaagccagagagaaaatcagtcagacaggaattatgttgaaaggtgamtgaatacattaccacctcccaggagttgaatgaaaaacggctatttctttaggacgtcaaaccacctttttcctctctaattcatgcatatccctatacaaagacccaaggtggtgaggggctggtttttagatagtctggaggccctctgagaatgcgaggcccttgttgtaaggaaacgctggtgggtgctcactccttcatcaggagccagccggctcccctgcacttactgctttggggaagagtttttgtcaagatcatttttgcagatggttgtaaggtaaacagtcactggtccctaggatatcttgctaatgagacaccaaagatacacatggacaatggccagaccatattttgtcacagaatgccgacccacaagctctggagcagtcaactcagaatggtcaggacttggtcagtaatgcccatttttgctaaattttgtccccacttccaacgcaggaycaaccagagaaagccacatatgctccccaaaccaatcatacaggatgtcctggtctagggagcccacctccggcttccccatgtccacagcctccaatcggagcatactggaagtcatccactttcttttttgtttaaccataaagctttctttctctccacctcctttgagcctctgccaaacacaactgatggtggctgactgcctggctgcaggaagttctgaataagtgacctctatttgttattatttgggtyccctttgtttatttttacactagctttgcactaggttaattttttcccacatggcttttcctgtttgtttctttgattgtttttaattaataattagtttgcttatttatttgtttattttttgagagggagtctcgctctgtcacccaggctggagtgcagcagtgtgatcttggctcactgcaaactccacctcccaggttcaagggattctcctgcctcagtctcccaagtagctgarattacaggcgcccaccaccaarcccagctaatttttktggttttttttgtattttagtagagacgggatttcaccatgttggccaggctggtctcaaactctggacctcaaatgatccaaccgcctcggacttccraagtgctgggattacaggcgtgagccaccgtgactgacctgtttttaatttttttagagacagagtttcacactgtttaccagattggagtgcagtggtgcaatcctagcttactgcagcctgtaggtcccgggctcaagcgatcttcccacctctgccacttgaatagstgggactacaggtgggtaccaccatacccagctgttgaaaaaaaaatggtggggtattactctgttgcccaggctggtgttgaactcctggcctcaagcratcctcctgcctcggcctcccaaagtgctgggattacaggcttgagctactkccccaggctcttcccccgtttgttaatacataccatgaccttggcctttcccacctcttaggttttgcttactttcccttctgtcctttacttatgactctgcccccttttgacctctgctaaaattatttgttactgttgttatgttattatttcatgtgttaagtctacagtgtataacttgggtttacttatctcatttaacccttaggaaaaccttacacttaaatactcaaagccttgattttgcaggtctgattgatgggcatacagaggaattaaatgaccttgtcttccacatatggtataaggcacagtagtggaagcaggatccaaatctgtgtctgtgtttggatcaacagccctggccaccatcttgattcatttctcttatctgtaattctatggagggaggttccattgtatatttttttctttcaattacagtattatttgtatattggaagcctattgtactttatctgtgtaactgtcgtagcagctagaggctagtaggactggctgaaatgtcagaggaaggagggaagaaaagggagaaaagcaggacaaatgaacgcagattaaggaaaataaaaaagagtgtttggctaacttgcataaaaaggatctcatttttctttgtaacacattactacatacagtgaccatagtgtttctctaatttcttcaggacktactttgaagatgaagaagtatgtgtatccgctttttgtctttcagaataacatactgctgtctgtaaaaatacagataatttctctcttaaattccataagctggagacactgcccctgtttcaaatgaatacagattcattttgtcacctgtgtgaaattggtgtccrtgtgccttgcttcctaggctgtccaccatgacatcagcctgcccrtgcaatgcttgagatttgccctgtgactcaacccaaatctaaagcccgagtcgtatgaatccaggacacctgcctgcaaatgcatttttcatgtataggttattcactctggtctttgagattatgtaattagcatatgttgtcatagtgatgtatttattataatggaggtgttctcaggaaaccagatttaatacttttaaatcagaggccaacatggacttttaggaattccattcacagtaaattttatgcgtggtgaaaggttatggaatgggtttccatgccatgtctccccctgtcccacaaatctcagctggcctgcaaaggttccactgtggatttttgccagccagccacgctgatgtagacagaatatttcggatttatattattgcttacttggcacatcttccattggaaatggaatagagaaaaggtggcttggctgtttggtttatgtcctaaaaccttatcgkaatgtgattctccttaacagagggattcgtaagcttargamtgataragawttggcttttctgctgttggattgatagctccttgactgctgaagccattgcccatctgttcaactgktgkattcacgaggaggttagacccctgacccaaggcccaggtacctggctttcctcagttgggatcagaaggccacaaagttttcttatattttaagcatcaaagtagcaccactgtacagcatctttacttaatctgccctctttcacgtgtgkgcatccctggcatgcttaaacaagaaaggcaaatgagagagagcgagtgagtgygagcgagagagccctgaggtgccagaaggctgtggttcctttgtgtctacagaaaagatataacgattgaattagactcttaaatatctgtggatgtcaggttgaatacaagcagctattcagtgttttactctggcaggagaacaagtcccctggaggtcagaagccatgcaggtccctggaagtgtgagcagattgttaaaatggtatcaaagatgggctggcatgaggccagagtctatccttgatgctcacctgaggtctagggctaaactcttgcctttacctgttccatgcttagccgttcctgctttttgcctagaacctcagtgctattgctcacacagacccagytcatgtccccaggccatgaccactgcctccccttctcccacctgtgcaggtgttaagcatcagtacataactgaggagtaggagggcagcagcccaaatctttgatgaagaacctctttcgtatcaacttatgctttggaacgagacactgttggatgggaatctggcttctaacaaactgattggttggactcatgccttattctttcggagccttagttttgtcatgtgtagaatggggagtattgctagctattcccatagggagtgagagagagtgtaagtaaaatgcaatggcaggcacagggatggttgccattatcagttacattattakgaggattattttctacctagatcaggtataaggtggatgtattattggcattcctaggactgttttaaaggaagtacctatgaggcctcrtgataagccagatgtccagaagccagcttgagaccagggctcctggtcacttaaaagatgtttggggctgggcgtggtggctcacacctgtaatcccagcactttgggaggctgaggtgggcagatcacgaggtcaagagatcgagaccatcctggccaatatggtgaaacctgtcactactaaaaatccaaaaattagctgggcgtggtggtgagcacctgtaatcccagctactcgggagcctgaggcaggagaatcacttgaacccgggaggtggaggttgcagcgagtcaaggtcacgccagtgtactccagcctsggtgacagagcgagactccgtctcaaaaaaaaaaaaaaaaaraaaaagaaaaagaaaaaggtgtttggaagccatgtcccatgaattccaaatacaattgaggactctataaaggactataaaaaaagttgtaataaattatgcagacccctcagcagttgactcacctctctggtgctccaggtatttctcagcgtgttcggggtctccctgtgttacctggacagctcctgccatcattagcacacagccaagattcctcgaccacccatgactctggatttatcatcctcaagaattgggggctgtggaaaagatgccaaatttgttcttttcagatttaggttcttctgtgataaaaatagacttggtaaagaagcagatatttctttaatacgtgtatatattagactgtgaatttattcatcttccttattcatcayataagtaaattatatgattggayccaggcataaaacgtgatttgactcccccttgcccatcacagttctggagttcacatatcatttgttactttgaaaaatgaacttttgttatttgattatggtgataaataatatacatggtagaaggagaagaaaatgaagaaaaatttagaaacttggacagaggaaaatgaaaatgttctattaattccactagcatgagataatcactcttaatattttgktgcatgttcttttctttcttctgarkgatagcatttttttcaacaaattgggctcgtaatatataggcacatagatatataattaaaaaaacaagaatttctcatgtcattaaacattgcttgaaaaaacatactagtaatttcctaagattayaccatgtaaatgaattgtattttatgtaaccattccctagtgttggatagctaggccatttataatttggacactattttaaaaaataactcrggcttatttwactatttatttttgccttacactttttgtamaagtaatcagagcagtaataatagatgactccccaaaatccttttgcctctaatgattagtctaagcccataatgctgtgttccttgccagtgattggtttagaaataggtatgtgacccagttctgaccaatggatatggagggtgcttatgaggaaggtttcctactcctaaaagagatacacaggaagagagaccttctgcttcctctggacactggcgcagcctggactagcagttgscagcttgggtttggacaacctccgaccttagttgaaaatgaccctgtgtaggacagaggagcaagtggaaagaacctgggtgcattgtggcattttagagccactgattcagctgtcctatgggcctcctaacccgaacctccactggtcatgaaataagctgttagtttggtgcaaaaggaattgcagtttttgccattgaaagtgatggccaaaaccacagtaacttttagcaccaacttaatattttgagttgggtttgaatcacgttgtctattacatgcagcaggacacatctctaatcacgcgagaggtctgagcaaacgtcttcacatttcacactgcagatattcttacaaaaggcaaagcagagatccagagaaattaagatctgctcaaggtcgtatccagctttgggaaccccaactattgcagaaatttctgaagtcgtcatattgctacttaaagcaaaatgccttctcctaaatccaggtagagagaaactctcaaaggccagggtctggactcaagatgagcacaggatttagaatcagaaagtgtgagttcaaattgccttcggctcttcacctgggtgggcgatttgaatagagctcacagccctgaaaaccctggttttcagaytctttattggtaaatgaagtcagcttagtgatatgagaawtatgaaacataaatccctttgtaaaaatataaaataatcttacaatcatcatcgtcatcctcatcrtcgtgttccttcacaccagcggtatttatggtatttatcaactaactgctgtgtactatgctctattgaaaatgttagcaatatagtaatgaacaaaacagatgttatctctacccttatggtttttatattttaataaaagtggcagaaaagaaataggtaaaacwataaactgagctctttggagaagaggcccacgttcttttcagattctgatttctccgtgatataaatagttttttaggtgatcacttgtttttaatgtacctacctatctawacctttctctctctctctctctctctgtgtgtatgtgtgtgtgtgtataaaattacatatccagtatgaaacctaaaaataagattttggggcctgtgaatttttttaacctttcttaacctacatcctaattatttgatttgacattgtgatgaaacatactgttgttttgaattttggaaatagaccagtgattcttcagtagggtcgtaaggtcccgtcaatgcagcagtcaaattttttcttggtgggggggatgcatatgtgtatgtgtgtgcatgagtatcttgataatttagaaagattaattaaacattgatcatctatgtgaccacatttaaaatgagcaccaccacatccaaatgtctgagtttacattttgtgtcggtacttgctttggcagaactctgtgcctttccccaagtcttctgtgaccttctcacctggcctgcatcctggtccttatcaaccgtattttacagttaaggaaactcggctcaaactagcttcggggactcgctgtggccataggtgccctaggctgcagtctgagagtgaaactgaggtctcactcccttcatastctgctctccgtctctgcctcatctggcttctcagggtggtggggcgtgggcactaatttgatttgatcacttagagacaacagcttacaaaatgctaccgagcagtgcctgtcctttctgagaacttgatataataacgttggcttgatctcctcagcctgtgtcttgagggaacaagtaaattaaacaagtaattagatccataatgtttttagaagttagaagatttaaatatatgaatctcatctgagtgtgcagccttttgtctgctgtgtttcctgccaaaagatctcttgacaggaaataaacattaaaataatctttaatcccttgtttggtctattaccattaacaattgatgcactttaattttgtggggttttaactacaaaatggaacggctaagtagtgataattgggtttggaattatacggtcatttatatcaacagagatgcaaggggctgggagggagggtgattaattatttactatttcctggctgtggttcctattatagaattttctgatatgttcttctgtgaacaattatcaccaaatgaaagtaaacaaatctgtgatttgaagccttatttagaagttagtctatatttaggtgatgtgggcttgattttcacagaccctgtgggctgtctgtgtgtgttccttttctcagtaccccagctctgtattcgagcgtggttatctttgtgcatcttaaaatccacaatgcacagcctggggagaagccttggttttgccagggggaaaaaaagaaaaacacaacattgagtgaggtctagggtgaatgccaaaggtctgttttgaaatgggggtgtgggttattcttctctctttctgatttgcttcagtacagtatgggatggggaagaatcaaaattattatgtcaacatgaggatgaaagttatgctctgttgtttctcataacatttgtgtgtgtgtgggtgggtgggtgtgtgtgaaaggtaggatcacctctctgtgcctcagtctccccatcatccttcggtggtagawcaatgctatctgatgaggccttttttgggatcacccactccaacatgcatgtcctttctctgtcccctcctggtgcctgtattagtctgttctcacattgatgtaaaggactacctgaggctggctaatgtataaagaaaagaggtttaattggctcatggttccgcaggccatacaggaagcccagttagggaggcstaaggaaacttaaaatcatggcagaagatgaaagggaarcaggcatgttctgcatggctggagtaggaggcaaggagcgaaggaggaggtactacccacttttaaacaaccagatctggtgagaactcactcactgtcatgagaacagcaagggggaaatcagccctctgatccaaccacctcccaccgggcccctcctccaacattggggattgcagtttgatgtgaaattttggctgggacacaaatcccaaccatatcggcacccactgagcacatcctcgtggatcttcctggctctccttacaaggggttccttccaaacccaagcgccacaatccttaggcagattgctctgacacagaasactggtgagttctagacttgatgtgtttcatgggaaacaggaagacatttaggggaggctgtagatacacagccgctctgtttagggaaggctgtcgatacaccgctgctctgaccatcatggcgtctggtccatgctcagattctggagtgttagggtcttcgggcacatggtggatgagcgttttgcttcgtgtactcatttatttctgaaaataatgcagccccttgtagggctttctggctaattgagtggtgccatcattcatgcarttgcrcaattcacacaccaggctgccactttggcccctgcgtcaccttcaccaccacccaatgtgtcctgctcatcactgaggtttgtcatttttactytgagtctgtccattgtcatcatctccaccatcaccccttttgttytcattgccacccttgcctggggtgagtgaagacgctcttctctggcttccacccttccaaatgcccttaacccacagatgggaagaaaatgaggtggggggaaggggactttcttgcttcctcatagttctcccccatcctgtaaaggagcctrtgcttcccgactcccagggccctgcagcatgtcaagaacaatattggacaagcttgtcagtgagggtccaggtggttccctgccactacgatgcatgctggggtcagtaaaaggagaacacagaagaatcagcagacccagagtctaacccctcctctagttaaagacgtgaccctggccgggactgaagccagaggcccacagcctactggacctttgtttcttgcagtcaggttctgatgacagattttagtcccctcttgaatttccttggatgtgatggaagtgattctcagtggacaagaggtcacattgccttttctagcttggaaggtggcgcaaataactgcttgaggctccctctcttgggccaagcttgactctggattttcattgktgkccttttttattaaaacaggttttgkttttttgtgtgtgtgttattttgttttttgtttttttgtttttcgggggctggagtagtgtgcaragcctggcggtgattgttctcattaraaagtatagtgtaatactcaataaattacttttgttctcaccttgggaagtggactmagaggccaagtgactttgatttttcactttatcctggagtttctcaaccttggcactattgacattttargccaggagattcttkgttgggggggatttcctgtgagttacaagacattaagcaacatcactggcctctacccactagatgccagtagcatcttctatttcctcaagtctcaaaataccaaaaacatttgtagatactgccagatacccctggggaacaaaatcacccctggatgagaacccctgctttatcctcttacagttttggttctttccatgagaaagtatttttaatagcaaagtaatgaacaagaaagtattaataagacccaaataataatataaactactmctttactaatggtcattatgtgccatgccctgctctaaacacttgccatgtagtcactaatttaatcctcacaagaattctgtaatgtagtgtagtttcccagggcttccttgaaaacgtgccatagactagatagcttgaaacaacagagatttattctctcacagttttggaggccagacacctgacatcgaggtgttggcagagttggttcctcccggggctctcagtgaaagcctgctccgtgcctctcctccagcctctggtggctgccattaatccttgacattcgtcggcttgtggcagcagaaccccagtctccgcctccgccttcacatggccatcttcactctctgtctttgctcccttttcctatagggactcaagtcattggatttagggctcactggaatccaggatgacctcattttaccttaacaagttgcatctgtgaagattccatttctaaataagatyacatgctagggctgggcacggtggctcatgcctgtartcccagaattttgggaggccgaggcaggcrgatcacttgaggtcaggagtttgagaccagcctggccaaaatggcaaaaccccttctctattaaaaatacaaaaattagccaggtatggtggtgcgtgcctgtagtcctagctacttgggaggctgaggcagaagaatcccttgaacctgggaggcagaggttgcagtgagccgagattgtgccactgcactccagcctgggcaatagagtgagaatccgtctcaaaaaaaaacaaacaaacaaacaaaaaaaaaacaaaacacatgctggtgcacacataaatttggaagaaatgctctttaacccagtatgagcacgtggkattcttatcctcattttacagatgaggaaattgaggcacagacagattcaataactacgtgactcacagagataaccgtgtagcagaatcaggaattcagcccagttttttcagttgcacagcctgagctcctaaccatcgcgcctggggttctcaaaggctcgtccccaagcgacaacatcagggtcatctgggaacttgttagatgtgctcaccctcaggctcgccccaccccgccagacttcctgaaccagaaactctgggagtagggctcagcaatctagttttagccctccaggggattctgtggtgcctaaagtttgagaacttctgatcaaaaatgccagataagaaaaaaaaacctttcgagacatcatttgaatcaattatcaaatgtttccaaagtgcrcttgctttgcaaaccactgtactactcatctctgcctccatcggagcgagttcaggagagttgtgtttacttttctaaaggagccttttccttcccattttaccagtgcccaaaagtcttagaaaaatgacaatgttcatatatttgcccacatgaagatagaaagtgtcatgtcaaagataaagggagaacagcattttctttttttacaagtcactcttacttaaacacacagcatgactctccttacacatttatttcrgaagagcaaagtccgggtccccaggctcaactatcagccgccttctcatcccaasggctgtcaccaccagaaatttaacatgctgttagtgcatgcaaaaaaaagcccagtaattgtagsgctcatcagtacattgttaattgatcctcatttcctattattttacctcaaagcmaacacatcattcaccatagtgacaccagagttgtttatcttctctgtgcaagtgtgtgctctttttagcaagctttttggatcctctgtttcagagggcctttcccatctgtttactattgtggactgtgctgctttttttgtttttaattacaggttatataaaatattgtcagcaggagggaggttattattaccttaaagaataagtggtagatgcggactggccactgtgagcccatcactaaaatgcacttccgtacactaaaggtccctcttccctggcagacagtggttcattttatttgaggaggtatgttgtgggcttggggaaacagaaggaaattggagacattgatatgcttcctgagaggtggaaggggccacttaacacagctttcatttttcagttgccartgggagaggagctggggtgggcatataatgagtaacattcaaagctccttctgtctttttttcagagaattcacaaaacaactcagggcctcctggtcctgcaaaagtgtttactgtttatttgtgttgtttctgcttgttttgcttgccaccagctccctactcacttgggggaaaataacccatcaaaggaatagaagctcaggataaacgtttcagacctttcagtaagatagtaaaatttctttcattcccagacctctctccaaaagaggcagccatcattaaaagtttgttatggattcttccagaaacgttctatgcatttagcatcagttgcagatatggatagccttttcaaaaaatgcatgcaactgagactattggctatgttttgtttattacctactttttccatttaatagtatcttggagattatttggtaccagcacatgtagctcaacctcctaatactgcatgacggataatatgccatcacatggtgtcatttaatatattcattcctatttatagacattgaagttagatccatgtcttactatyacacatgacttagtaatgaatgttcctgcatgtatatttggtctgcttgagcaaggatattgggagggaggatttccagcagcagaagtggtggaacaaaggcactgtgtacacctttgaaacaattaacttcaccaaaattactaaactgtcctctagaatggttaaaccaatttcctctctwccattcacacgtgagaatgcctgtggccccccagaaattatctccagcagcagcaacagagaggactggaatgccattgacaggtcccacaagtcagcaatcagcacgccattttttaaaattwatgttgctattgtatcgtaaggttcttctgaagcgaccacttcataacactgtgtagtccaatccctaagctgggcaatttttttttcccctttcaawacatcacattgattttctgtatgactttatctgcttaatacaaagtgggattgaacagttatttgtctggatttgatcattccttattaaacatttatgatttagctttcaccgcggcatcttcttgtaaggtgtttcttatttttatcattttccgtaaaggtaggattgtgttgacagccctgtaataaatgtctcttggaagagatgtgttgctgaraggtggggarggggtgggggctctgtgcatggaatggggggaaaagcttcagggaagggcagtgcaaattgtttctggactgatgccatctyytaataatagtagttaatagactgggtacaatggctgacgcccgtaatcccagygctttgagaggccgaggccggtgtatcgcctgagtccaggagttagagaccagcctgggcaaacagcctgargcaaaacctcatctctacaaaaaatacaaaaaatcagctgggcgtggtgatatgcatctgtggtctgagctactcaggaggataaggtgggaggatcatttgagcccggtagatggaggttgcaatgaaccgagattgtgccactgcactccagcctggatgatagagcgagaccatgtctcaaaataatgataataattgtagtagtagtagtggtggtggtggtggtggtagtagtastagtgaatgccctgactttggggtttgcagtaagctaggattaagtgcttcacagtgaggcacagtggggagctactctgaggatgaawtgcctartaaataarkgaggtttgtataaccgaggccagatcttagaacctcctgctatctgtacatagaagaatgttttagtcagaggcaaggcaaggtcaccaggattcactgagagtgttggtcagcatttcatctgcatatacaggactggaaaataagagagcgyaatgagacatctagtttttttctctttcgtttgttctgtttcccactgagagaattttctagctttatgtggagaaaacagtattggaaattattactcagttcaagaaaacctcactgagcacytaccatgtaggtgctcatcccgataccactatcaggmcctttggaccagttgcaaggatgcaggatgaggaaggcaatgtgagaaaacagaaggagcaccaggcagtcgtgggcttgatttttattttactattttttaaaaaacataaaacaacatacattcatcattttgctttctttggatgaagaattgagcctggttcagcatctcttgcaggctgtaattgagggtggtcattgactggggctggattcgggaaggatccacttccaagctgcacagttgttggcaagatgtagtgttttggtggttcctgggctctgggactcagctttttggctgttggttgttggctgttgccacatgggcctctgcaaaaggcagcttgtaacgtggcagctgacttttgtccaagtgagaaggtgagagtgcaagaattggtgagagagaccgcagccagggtgtttttttaacttaatcttggaagtcacatcctatcgctttggttttttgactgagattattcagtactgcaatagtctccctttaaagtggacaattcattggcttatcgtatagtcacaaacttgtgcagacatcaccactatctaatttcagaacatttttatcacccctaaaagaaaccctgtacccttcagccagcattccctattttatacccccgatctcttgacaactactcattgactttgtttctatgactttacctatttcgggtaattgatataaatggaatcatacaatacgtggccaactgacttctttcatttaatgttttcaaggtttgtgttatttcrtgtattaatattatgttggtgcaatcacttttgaaccaatctaactaatacttcatccccttgtatggccaaataatattctattctatcaatatattatactttgtttatccattcacagttcatgtcattcccactttctggctattatgaataatactgcgatatgaacatctggttacttctggctcttatgggtaacacttctataagcgttgccacaggttgcttctgatttctattatgagtaatgctgctatgaacattcatatacaagttttagggcagacttctattttcattccaatatctctttatggcatgtcttagcagtgatgtctatgacatccaggatgtgtcttgacatgtctgacatcatttaaataaaaataaagtagggaaagaaaacagatagtgattgtgtgtgtgatcagtgatggcttttgaggaggtgacatttgaactacaccctgaatgaagagagccatgcaaagacctcagcaaagaaaatctcaagcacaggtgcagcaagtgcaaaggccctggggtggaaacacactcgatgtgttcaagggagagtaagtggtgaatgggtttggagccaacarggataatagacaacgctatcaagarggggsccaaccacacatgtgcagccactgtatgacgtctggattttccttgasttatggtgatcactattgggaggtggtaagcaaacaggtgacataatttgaatcatggktttaaaagacgccatggttgccatgaggaggacaatgcgtaggaggcaggagtgaaagctaaaggatatgctgggaggtgaccctggagttaaagaragcaactaaggtgaccaggtgacaataatggagatagagaaaacaggatggattcaggaaacatgaccacactgagcatattcaaatgtaattgtcagttttcgtgtctccctcccackggaccacaagcccctaactcttcatgtacacaccctgactcccagtgtgggctggccacccaggaggcacccagtytatgtgtgctgcgtgagtgatgtggaatgactgcccacgtaggaagtggcaggttggagaaaaagcagtcacagctcctggctgctgtggctgctttgagcttcttcctcgatcaggctggatcattaccagcctgtaccctcaaaggatgcccttagtcctgtcccctctcactagcagggattccaagcttgtaaataaagtctcccacttaaaatgtgagcagagtgaagagctggcagtgtcaaaactctgtgtccagatgttttatgattttcccttttccagatgagcccggtgtatccgtatcagtgtgtctaggaagaccaagcatgccgaacggccagcagagtagaaactctgtgtgcccatccattatgtactccctgaattaggctccttgaggctcaattattaaagtgggatttttcttaattattaacagttaaaaataggaaaatagatttcaaggggaaaaaatttgcaggcaacaagagtccaattctaaatgtgtgcatgtgcgtaaaacggaatttgccaaacatgaataggcacttacaatgtgactggaattggctctgtcatgtgtcagcctaatagcctaaaccctggttcaatacaatgaacttgggaaggtttgcttaatgaaagaactgacgttttctgtgcagcggctgcattcatcagcctgcatcctgttcattacactacaaagggctgccaatgggaattggtaggatcatctattaggtaaatgcgatggggacaaaagatagcagagcccggggctttgtggaattttctgtggtggtccgggttcctggagtagggagctgtgatgacgggcaacagatttccaagttggcacgcgggcttctggagtcacgggctgaattccggcactgccacatcttgccacgcacatcctaagggagtgtagagaagagagttttcagttatgcatgacactgccttacccattgtggattcagtagggatattcataactgtgaatttgaatataactattaaataattgaattattattattgagttactgaatataactattgagttttccctctccatctgggcacatgggaaggccgtactttcctgacatgtgatttgctgtggcgagtggaatctgggggcaagagacgtgtgtctccttgaggcagaaactttaacagattccagcctgctgcatcataatctcctttccctctaccacgctgactggcagtattccagattccgattgccctgtcagggtgggtcctagtggtaggacaaaagcaagaatcctgagctgacccaagacacacatggaaacattaattgtgcttctctgatgtggctttaagatacttgctctgtcgcccaggctgtagtgtagtgattccatctcagctcactgcaacctccacctcctgggttcgagtgattctcctacctcagactctcaagtagctgggattacaggcatgcaccaccatgcccggctaatttttgtatttttagtagagatggagtttcaccatgttggccaggctggtcttgaactcctgacttcaagtgatctgcccaccttggcctcccaaagctctgggattacagacgtgagccgctgcgcctggccaagatactgagatgtgggggccaggcacagtggctcatgcctgtaatcccaacactctgggaggctaaggctggaggattgcttgaagccaggagtttgagaatagcctggttaacatagtgagagccccatgtttctaaaaatttaaaaaaattagccgagtgtggtggtgtgccacagtagtcccagctactcaggaggctaaggcagggggattgttggagcccgggaggtcaaggctgtatagtaaactgtgatcctgccactgcactctagcctgggtgacagagcaagacactgtctctttaaaaataaataaataaattaaaaagacactgagatttgggggttacttgtaactgtgtcataacctggctccttactgccatcggcatgcctagagggatcccagttttacacatcagaacaacccaagccccagtgtgtcacgccattacatgcttacagcctatttttacaaagtttgaatattgtaatttgcctttaaaaaattgttttaaagatctgcctaggtcarcaaattttatttactctctagaaccatttgattggggtactgccttaagaaataaagcagattccttcagtcgcatgtgggcctggagtcactggaaaatgcagacaaaacaagatctgctgattggcaaggtcatcttgggaagggccatcgtgcagtaaagagcaggtccattaattcaggggggatttacatcagttccatctgcctctttcctaatgggactgtttggttgtgttctttcctggagagattagtgattgaaaggaggagatctagaaagaagagataaaagtttacatttaattttcatgccatgcagcgttctacgaaggcttcctaaggaggctccatactaaattcagacataagtcagaaggcagcttctcccaagacactgttgatgtccagggggtgacagttccatcacaaaagggggttaaaagggtttaggggaagtttagttgtcttccttttatctctaactctaaaacccaactgctggctgaattaaaagtctcttacataatgrtcagaggagttttgagtatcggatctttgtgtacttgytttttaaattcagtcacgtcttaaatagtacttttcactctcctcctctccacaccactttatgtgtttgctagtagcttccatgaaactctatgggtgaacatgtctgcaactctttggcatttaaattttaggtttctgcccctcgtagcagactatctttctagaagcagagctgtaagtctcttttaacaccattttcaagcttggacaggctgacatttttattgaatgggttatctcaatatatatctacttttttgcatcctactttttttagaaaattaaaaatgatatgatgggtgtggtggctcacgcctgtattcccaacactttgggaggccgaggcgggtggatcacaaggtcaggagttcaagaccatcctggttaacacggtgaaaccctgtctctactaaaaagtacaaaaaattagccaggcgtggtggcaggcacctgtagtcccagctactcgggagactgaggcaggagaatggcatgaacctgggaggcagaggtagcagtgagccaagatcgtgccactgcatcccagcctgggcgacagagtgagactccgtctcaaaaaaaaaaaaaaaaaaaaaagataatgatgaaaataatagaatattgatgagaacacccattactctgctcattgttcaaatgaactcatttgagagctctctcctttgtttctgtctttctctcgcatcagcttgcatctgtttgcctatgctataaggcatcagtggttaccaggcagtgttgcattttttccatcccatacctctgtgtgtgttccttatctgtttctaggatgtgcyctctgccccgtcacatcacaytctgtgctgctctcagccaaagctcttcttaaatacactagccatcaaaaccatacaacttggctgggtgcggtggctcacacctgtaatcttagcattttgagaggccgaggcgggtggatcacttgaggtcaggaattcaagaccagcctggccrccatggtgaagccccgtctctactaaaaatacaaaaaattagccagctgtggtggcacatgcctgtaatcccagctactcgggaggctgggacagragaaccactggaacctgggaagcggaggttgcagtcagccgagatctatgccattgcactccagcctgtgtgacagagcaagactttgtctcaaacaaacaaacaaaaaacatacaacttaactctcatacccccacgcctgtcttttctcctgttcgacttgactcctcttgggaattccgtaagtactttgagggcaaggaccacaagataaatgtcgtaaggtaaccaggaatgacattccaagattccattctttcctttgtatatccactcatcattcattatattcttactctgggctaggccctgggaacagttgagtaagaacaagcaggaacaaacaattagaacatttagtgtggcaaggggcgtgacaaagttaccaagagaggtaggtgagagacaggagttgttatctgcggggaacaggtgaaggagtgacagcagggggtgaggataagaaggaggaagctttacccctgagaagagcaggcatcagatgggctttggaatctacatgggtgtttgtaggtagaccaycctggaagttgagtgatggggaataaarggaagaaagtgcattctgaacagagggaatagcaggtacagcagctcagacatgggcaccttcagagcgtgtctgagtcttcctgatgagacacgtggtgttcacttgataactccctggcaggttctcttcatcgggcctccacatagggtatgcgaacctcttcatgtttttaaaagggagagatttaataaaggcaatttggkacttaaaaattgttagaagagctaaaagagtagttttgaggttgaccttcagaacggcttcctgaataatacagaagtgaccctccaggaaggcccttccactgaagctacaactggagctaagcagatggataagccaaaaccacctccgttgctgtggccccatctccaccacaaggaagctgragaagggaccccagaaccggaagacaaaaaacttccttcacacactcccttgctaagaggagaagccccaaagaagctggatatggcccttccctcacatttgctgtcccaagtgtcccatggcagtgcctaagcaattggtgggatggatttgtgtctataaacaaagttgcaagggagtctggaaagggagttttaactccaacttcttcaactagaatggtaggatccaggggcagcattgctccccaggggatgtttttacaatgtctgggatattttttagttgtcagaactggaagcaggaagaagtgctactgtcatctaatgggtcaaggccagtgatggtgctgactatcctacaatccataggacagtacctaccacaaagagttacctacccccaaaatgtcaacgtgcccaggttgagaaacgtgacctagctggaaggtgaacaggaactaaatgagtcagtttcagatatccaacacaaatacgtcacttgtttctgttccaaaagtattataatttttgtttgagctaaaaactagttacagttcattggataattgcctttcatcccttcaatatgtgttcccttgaaatttgcatccatgcatcccacatggcacccctattgattatttcagtgactcagaagacttcattattcaaaataatctctaataagatgtttagggagaaggaaaaataaagtttctctccacgttacgtttttttcttgcacatgtactgctttttcataagcacaatcttattaatagaacaagtcctctcaaaatggttgccttttctcccttcatcctcccccaccagtaatgtagagctgttatttggctcgtttttctttttcctccagaggcaggaagagggaatgaatggtggccaagaattttaaattcctgttcccggccgcccccggaagctccatctttgttgtgagggcttctctgcgtcagtagaggccagctgagctcttattcaccccttattctctggttccctttcaccagcaggtccagctctaaccacagctggagtttaggaaggccaggcagcgtgtgttgaatgccagccactcttctacccagggtcatatccttggatgtttttctgtgcatctgtctttyccgaccctcccgtgattctggaaggaaacacctttccaagctccccagtgaccctggttcatcccggaaatatgcaggaaaagcattatgagcattgcagtgccacatgctgcattggtgtgttacgttatgagaactattagggctgatctctgagaaacttaccagtggtgtgtgatcggaaatcatgtcaccctctgaatgtgggttatgggataaatggctaggtacacaggcttcagagtccagccagccccaggtttggattacagatggttgctgtactagatgaataatgtccccccaaattcgtgtctatctggaacctcagaatgtgacctcatttggaaataaggcctttttaattaaaaaaaawtttttatttaaaaaacagagatagagtcttgccatcttgcccaggctagtctcaaactgttgggctgaagcagttctcctgctttgacctcctaaagtgctgggattacagacatgagccactccacctacccagaaataaggtctttatagatgtaactgaaataaagatagagatgtgaatgtgatcgtactggtttagggtgggccctacatccaataagaatgtccttagcagagacagaacagagacaccgagagaggaaggtgatgccaagacagaagtaaagattggagtggtgccatctaccagccaaggaatgccaaggctgtggctacaccagaagctggaacagagcctgcaagcatttctcctgcagaacccccagaagggactcagcctgcagacactcagatttcaaacctctggcttcctgaactgtgaaagaatraattgctgttgggccaggtacagtggctcatgcctgtaatcccagcactttgggaggctgaggcaggtggatcacttcaacccaggagttcgagaccagcctgggcaacaaggcgagaccccgtctctacaaaaaataccaaaaaatgagccgggtgtggtggggcatgcctgtagtcccagctacttgggaggctgggatggaagcatcatttgagcctgggaggtggaggttgccgtcagctgagattgtgccactgcactccggcctgggtgatagcatgagactgtgtctcaaaaattaaaaaataaaacataaataaatttctattgttttaagacaatttgcctgtggccctaggaaaccagtatagataacttgtgatggtttagcttatttagtacaacaaccctgccccttctagtttttatgataacctcattaattgccggtactctcagagccctgattttcttacctataaagtagagattccctatctcatttggaggtgattttaaggcacaaatgagacagtgtatgtaaagcatttggcatagtgcctgattcagagtaagtgaccaataaatagctacccttactatttagaatgctattatttagaacataagtatatttaagaaagcaccatcagtattcaatttgccttgctaataaaaagggatcaagatatggattgtaaagtagaaaaatacatgtcaattaaatggatttacatcttaaaaagtggtgaggtagacacacaggcactactcacttcattccttctcatctcaacccgttaggatttggccttcaactgggtagtggaaaaaatatgatccttggcagtctactacgcaaaagcaggaacatcatctgcttttgggtagttaagagttaagtatcactttgagctacaggatcatgattaaaaagcattctgttatcttacttcacaactctccacttttgtaaaagtttaggataccggcagggcagcaaatacctttaaatgattttatttaaatgtcagatttaattaaatccatgaccagaagacaaacccaaaggaaattttcagggagctttagaattttccttttccatgttcaaggtgataaccgtagcataaaactgtcccaaccacatgcaaatgcaagcaggggcattcatcatgaaaatacagctctcaaggcggaagtgcttgttaactttgcactctatagccaagtgcgatgatcagaaaatacatacattgaagacaccagaaaatagtgtatggattggtgattttgactaaractggaatgtgggtgtgtgcactcctcatgttccggtttctgtgatcattcaggcatgcacaggtatcctgatgggtarccaggtcattaggmccaragtcggcagtgtagcatggcaagagaagtcattgcatctccaaactgtgcctaaattgcctgtaatgggttctttgcaacttgcagaaccagatcttaccatttgcaaggagaatagctgaaaagatacttaaataaaagtgatcggatgaaattttaaaaacgggaatgaccaaaaagattcccagaggaccgttactggtctgcagccccccattttagggtctggcatttgtactgattatggcctgacagctcttgagtttccaatgataacagccatctgacttgatcggagttctatggattttcactaaaatagaatcatcgccttggtgatggatagaaaaagtaaagcaatacatcctgataaatgctgtgccttcctccttcgtctcyctggcggtgaccttgtgcaatccataagagggcaaggctgagagccccggccaccgccgccgtgtgtcagaacttggaaatttaagtagctttgaaacccgtcaatggggtgaagggggaatggcctgagaaagcaatggatcatgcttagagggctcagagggaaatagggtacgctgaaggtcaacgtgcagacatgtcctgaaggaacagctcaagtcctcattctcattcacgggaggctgcggccctgtgaggtgagatcagtagaagagtacaataaaacaggaattttcagagcatgtaatttcttcttggaagtgaaaggcactggagaatggtgcagaataagyactagccttagagagaggatgccctgccccagtctctttctctgagtagcagagagctggctgtgctaggaaactcttcgcctctctaacaccacgtttattctccagcccagttatcttagccaactgtgaacattttgaacactgttgatcatcggtaatgacaccagcaccataacacgaaacccctctaaaacagggcttccaggaaactcacagactagttacatccccaagccttgcatacttgattggaaagagaagcttctggatggttgaaggggaaaggagttagacgttggcaggcacccattagtgttggttacgacttgctaaaagaaaatattaagataaaaattagatcataaatttggagccaccattacgaagcctaaagtgcaaattgccaaacaagtcaagagactcattagcattttatgtaaatcagttattactgttctccacttccttaattatccatgttatttcaatacaaccctttctttgatgtcccaattctatatttaaatagtgcaagatttctatcgtatcctcccgcagaggtttgtgccatgcaaaaaacatgccaagagcagctattttagagactacagggaaatgtttaattggttcatcccatttgagttatgagggtgtattactgagcacataaaatcagaaacatggaaagtactagcttggagaagtttactaaaacctgcaagagaccgcttgaaattttgcccccaagactttttggattctcgatgggaaccgactcaaagagaaatttcgcaaacttcatggaattttgctaagtgattgatttataattgaaatatttggaaataaaatccaacagctctctttcctttggctcagagacttattgttttggttggatgaagagaacacttgtgacagagggaggaacatagggtgcataagagagatgtggggaagcactccccatccaactcgttccaaccagttcatcttttttttttttttttcttttttcgagaaagagttttgctcttttccccaggctggagtgcagtggtgcgatcttggctcactgcaacctctcccttccaagttcaagcaattgtcctgcctcagcctcctgagtagctggaactacaggcgtccgccaccatgcccagctaatttttgtatttttagtagagatggggtttcaccatgttagccaggctggtctcaaactcctgacgtcaggtgatccaccctcctcagcctcccaaagtgctgagattacaggcttgagccacagcacccagccagaacttcatagtttactcttattattttctcctaaccactaggttccacacttctggccacctgcctttatctcctgccccataacctaacctgttttaaaatacttattaaacaaagaaaaataaacaagaacaaatggagaatctttcactatgactgcaactgaaaagaggagtaatggaaggacatgtactcttcccatatatttttaaacaattactgkatctgatttttcatttttcattttttttttttctggaagaaagagcagatctggataaagtcagtatacaatgtggtctttggtgmcagacccaagttcaagaccaaggtgtatgcatgggtttgttcaagttgtctacccttattatcccctcagtgaaacatgattaaccatgcttaccttgaagagttatcttaaatatttgtgttaatattatatatgtacattacatggtaagtgctaagtaaatggtacatgtgagtctttgctctaggcaaggcgctgtgctgaatgtttacatagatgatcggatcctcatattggatcctcaaaacgttcatcaaaatgggtaggattatttttatgtatatttaacaggtaaggaaaatggggtttctggaggtgagtgactcactcaagatcacgtggaatcaagcagagaagctggggttttaattcagaagttctttaagctacagctgtaattgagacaagaaccgtacactgtagtaagattaatgtaaagatttaaaaaactgttcatatcgttcatctacataaataaataatatttacagaaactcatctctgcagactaaagtactttaaatatttaatctaatttattggttatttatttaacaaatacttttatgggccttgccatgttccaggcacggttgtaagcacttacaactagtgactcatttaaccatttcacaaatatttattttgagagcaagcacgggggtttatgtgatggctccacagagcagtgaaaagactcccgccctactgctcscaacctcaratgtccctggscacwagcccatctgtatgkctttaaaaaaaataaattaaatttttaaaaacatgactttctggccaggcgcagtggctcatgcctataaccctgcacttagagagggcaagacagaaggatygcttgaggccaggagtttgagaccagcctgggcaacatagcgagaccttgtctgtactaaaaaattattaaaagaaaatatatatatttttttaaatcatgacttttctgatcatacctgtggcatactcattatagaaaatttggaaaatgtaagaagtcataaagaagtgggaaaaaatttaaatccttctctgtcccaccacaaaccatttaaatcaatccaagattttagtggaaagggaaagcatatgatctagtacaaagaattttttttagcttcttctccgctgcttgtttaagaatctcagagtaatccagacgttactactccataagcaaatctgggacagtaatcagacaaccagacaaccagactgagagcccccaagggttcaaattcctgagcgccgtgtcttctctatagcttgctgtcttgttctatttggatataaagctaccatcaagcagaagaagcgggatgctctctacagagtccgaaacaaaacacagaaaattaacctgctaccatcctctaaagaagcgagggtctcagactttgtccccttttgttcctgcattgccctccattcagatcttgtcacttaggccttggtagcatgagctattaacagccctccatatttactatttttttttttttttttaactctgggasttcctgttgcagaaattggatcacttacctaaaaagctccccacccccacctttggtgactggtgggtttcatcaccaggaaagcacattgttccaactcaaagtctacagtctaaaatcatcatcatgtattttcatcaggatgaaatatcgggcactctgctcagtgcaaggttttattaatgatgtgctgtcaggggctggatgttctgcatatttgcatattaaacagctgagtgaagaaacattgcttttattgctgcagggaataaatcagtttaaagcaagttctcatcatttatactcgtttcagctaagtcttcttttattgaaataaattgttgaagtgctttgctcattctttgaatactgatgaactttaccttgataggacctcaggaaaaataatattttcttaaaggtgcagtattgttccatttttgagtattactttaatacattattgataagttaatttagaagtatcaagtgaaaggggaagaaaaacagttttgaataaaaacggwgtttcctctggactattttgccaaatgcatttttattggtagaacgtaagcaaatttaaaaaagcaacaaaagcagtttttatgaatacctagcgtactttttttttttaatgaaccatgagctgtttttgcattcaaattctcgtaggcattatattgcatctacacataaggacacagtgtttacagaccccaaagcttgctgtcccctgggcaggtgcatgagggggtcccaggcaatcaggctcttctcaaacctgaattatacccggcctcarggtatargggtcargcagctgtttgacargattcttgcaaatgtttttggtttctctgtctactcattacgtacactctgccagaggttgaaaactcaatgttgagatyacatacatcctgaaaacactgkttaaataaaattttggcctgcatcctgtttttgaaaacttgcaatggcttgccaacgttttcaagttgagaagtttcacaaaaaaaattcggatttccagcttctttcaaaaacacaggtcaaacatcctgagcctgttctgtggtcagttactcattagcagcctctgctctaggaggaatagttatgggtcctttcagacatgcaacccccmaaactccatgttgtttacagtgtgggacacctgactttcaccttttatgatacctgcctggggcatgcatgtggtgactttttccatctctggtctctatcttatctcttgtgatgaactcaggtctataaagcatttgggcactgcctggcacataggatatgtccagaaaacactagctggtattaaaacagaggaaacatgggaactgagggtggtcagtgacatcacattgtatttcctttatggtgtccttctgagtacagaaccaaacatttcttaggcgtacaatttcctgcctccaaattaatgttatttctaaaaagtagcccgttccactcctacaaatctttgcccaaatatgtccttttcagggatgacatccttagccactgtttaaaatagcaaatttctttccaaactctgccgtccctgaatctctaccctgctttatttttctccttagcagacatcatttctctgtttaatctgtctacttgctaattgtctcactgccctccccctccccactggagagtgaatgaaggcttaaggttttgyctgccttggtctctcctgggtcctgagtaccagtggccttacgtggcatttggtagattacatgcttaatgaaaagtgagtgaatgggctgggtgtggtgggtcacacctgtaatcctggctactcaggaggctgagacaggaggatcgcttgagcccaggaggtcraggctgcagtagggtatgagcgggccactgcacttcagcctgggcaacagagcgagaccttctgtctaaaaatatttatctatattgagtgaataaatgaatgaatggattattttagtttggcctcaatctttatagaaactcaattcaacaaacatttgagcacctgtttgttcagggccacgtgctggttgcaacctggaaggaaaagctgggcaaggcggagatccagtgctcaggaagctgagtccatgccaagatgtgataattgtataaagaactacaataggcataggtacagatctgtaaaatatgaaaacaggaaaacacatggagtcttggagggtagggaagtcttgatgagtaagattgggtctgagataaacctaaaagagggtcaagattttgacrgagggctggaagggaggaacgataggaaactgaccttttttcagatctcttcttgtgcgtggcctggggttaagtgctttacatgcatcccctcattgacttctcagagcagctccataaagagtccctgtgcttcccagtttactctggagacgactgaggctcacagaggttaagccacctacccaggctggcaccgcacactttgttcagagtgggcytggcatacggcatcagttcagcctggccctagacccttttcctcccacaaccatattgcccccagtggagagacaggaaagcagggaagggggcaattgccaagcctgtttctagaatctcaaggatgccatttggtgaagctgaggctggtgcagttactctgtggagacaccagcgtcttggacctagggatggattcagggaggattgtgtcccccagtgacctgctttgtgaaaggtagagaatagattacaggtgcccgagatcctagaacccgtttcttaccatgatggcgttgaggtagaggtagaaagatgggtgaggtggctgggtgcagtgggttgcgcctgtaatcccagcactttgggaggccaaggcgggtggatcacctgaggtcaggagttcgagaccagcttggccatcacagtaaaacccygtctctgctaaaaatacaaaaattagccaggcatggtggtgtgggcctgtaatcccagctacttgtgaggctgaggcaggagagtcacttgatcccggggggcagaggttgcagtgagccaaaattgcaccactgcactccagcctgggtgacagagtgagactccatctcaaaacataagtaaataaataaaaaataaatataatacagacacaggcttttctccccacctcttttaattcttgaaagraacagtaacaagctcctattcctgtttccttgccaggagaagtattgttttcatataaatcatttgtgacagaagctccttatttttaagtggaaaatgcacatttaataacatgagaataatgtccaaacatcttctcattgatggctgccaagagaacagcagcactcttgctgcctgcagaaagagacactcagagtcaactgttttaggggccatgctgtcattgctgccgcatttgcttaggtgggctctgagcagcagcttcccagacactccgtaaccaatggcagctgagtgcttttgtgccttgcaaatcctctagtcagagcagacctggcttaggaccccagccctaccactaactgactccatgcgctcctatcggttctttattttacctctgcaagcctcagttttctcatctgtaaagtagggataacattagcttcagccctcacaggcttagagtgaagtttaaataagaaaaggtatctaggctgggcgtggcggctcacgcctgtaatcccagcactgagggaggctgaggctggtggatagcttgagcccaggagttcgagaccagcctgagcagcataacgagacccgtctctgcagaaaatacaaaaattagccaggtgtggtggcatgcatctgcagtcctggctactcagaaggctgaggtgggaggattgcgtgagcccaggagttcaagaccagcctgaacgacrtaaaaagacctatctctacaaaaattagctgggcatggtgtcacgtgcctgtagtcctagctactcgggaggctgaggtgggaggatcgcttgagccccgggaggtagaggcatgatcatgccacttcactgcggcctgagctacagggactctgtctcaaaggaaagaaaacaaacaaacaaaaagccatgtagagctgggctatccaatacttgaaggtagccagtggacacgtggggccatttcaagctaaattaaattttaaataaaattaaagattcaatctctcactcacacattacaagtgckaaacatccggacacatctagtggctcccactgtgggtagcacatacagaaagaacgtttccgtgacagtagagtgtcccattgcacagtttgggtatggagcacttagcccagtgttgggcacagtacctgctgtgatggttaaagcttagttttattggccaggcatggtggctcatgcctgtaatcctagcactttgggaggatgaagtgggaggaaagtttgagcctaggagtttgagaccagcctgggtaacatagtgagaccctctgtctacaaaaaactaaaaaaatttaggccatacttagtggctcacgcctgtaatcccagcactttgggaggccgaggtgggcgcattgcctgaggtcgagagttcgagaccaccctggctaacatggtgaaaccccatctgtaataaaaatgcaaaagatagttgagcgtggtggcgcatgcctgtagtcccagctactttggaggctgaggcaggagaatcacttgaacccgagaggcggagattgcattgagccgagatcatgccacagcctgggcaacagagcaagactgtctcataaataaataaataaataagctggacgtggtggcatgtgcctatggtcccagctacttgggaggctgaggtgggaggatggcttgagcccagaggtagaggctgcagtgagctatgatcttgccactatacatcagtctgggtgacagagcgagactctgtctcaaaaaaccaaaacaaaggtcaattttttttccacattcatctataaaacaataaaggaaacatcctagacacttgaatcagagcccttttaattatgacttcaaaaaacagggctcgtgccacccaagatttcctccatatacaaaaaaaaaaaaaggaaaaagggaagaagcaaaggggcaatacagggctctgcccattagaatctctagggacagaccgaggtttgagagttcctgctcctgatctcaggggaatcctgaattacaggtgttaacctgattakccccagcccagctcttcgttaattacctgaagtgaatgggacagtttccaatactcagcacaaaggcgtgcgcagtgactctgtggcgtactatctatttggccttggaaagttactctctaagtcagggcttcttttcttcaactttggtgtgagactccgctggagagctggttagaaaaacacaagtctcgggccccaccccscagagcccctcattctctagttctgggttggggcccaggagtctgcttttctagcaagcgcccagatgtcactgatgcttacagctctcagaccacagttggagcagtgatttttaaaagtcttttcatttgtaaagagttgttctccatgctccaaatgactgtgacgactgagaaaatgcatgtatgtaaagtctgcagctggtgacattgtagacactcagcaaatggcctttggtgttactrttattttatttttactaattattttttacacctacaaatcaggatctgctacaatcgcttgatatttgaaaattgggcctaacccactatgccactcttctgtcatgaaataacaatcttctatttaaactagtaaacttaatagtttaaaatacttggtagtttaatagtttaagtagagccactgaaagatggctcacacctttcagctcagtttttttgtaccagtgaggatgaatgtttctgcatgtgggtagttggcaccagtcttcaatgaattatttttcctttagccgggtctggtggtggcgtgtacctgtaatcccagctacacagaaggctgaggcaggaggataccacgagcccaggagttggaggctgcaacgacttacgatcatgccatggcactccagcctgggtgatagagcgagaccctgtctctgaagatacaagaaggccacatgtggtggttcacccctgtaatcccagcagtctgtgagactgaggcagaargattgcttgagaagtttgagattggcctgggmaatatagcaagatcccaaccctattaaaaaattaaaaatgaaaataaaattttaaagaaaggtatttctccccttcacggtaatttggagccartacttcttgcaccattcatttgtccacagcatgggacaaaggataatgccttaatgcctgctgcaaatagaacagtggtgcttagcagctttagataatgcattgtaggtgttttgcaaaaacatactttcgtgactaaacatcataagctccaagtgagtgatttccccgcgtaaatgaatgattctgtgaggataacacttctaagatgtgagatttcaataaatgaatctgtaggctgctgtgatggatacctttggtggggtaggaaggatcgtcatttagaacctgggttctgactccagatgacttgttttgttctatcccagaaatattcctaaaatcgatttccagtttccaaaagagcaggtaaggaaaacactgagtgttacttggtctttaaaattttttttaaattcatttttatttttaaaaaatagagacaaggaggtgggcgcggtggctcacacttgtaatcttagcactttgggaggctgaggtgggtggattgcctgagctcaggagggcgggtggattgcctgagctcaggagttggagaccagcctgggcaacaaggcgaaaccccatctctactaaaaacattaaaaaaaaatttaggcgtggtggtgtgtgcctgtaatcccagctactctggaggctgaggcactagtatcacttgaaccggggaggtggaggttgcagtgagccgaggttgtgccactgcactccagcctggctgacagagggagactctatctcaaaaaaaaataataaaaataataaaaaaaaaattacatgaaaaatagagacaaagtctcgctttgttgcctaggstggtcttgaactcctgggttcacgtgatcctcctgcctcggcttcccaaagtgctgggattacaggcacgagctgccacgcctcacctcttgttttcaataccattgataagttgtggtcttcagggacttgtgggcattttcaagttaaatatccaacagtcgtgatttagggcatgaagagctcactcatcaagatgtatgtaattcagattttctgagtgtttaattcggcgtctttggtcacaaggaacagagktttacttgtgccacctcttctaagaaaaaggtttactgtaagagataatgttggcaagctgaggaaaggaggcagttttgggtaactgtctcttgcgatcccctcctgcacaactgtggcgttctctttttctgactagctgattctgctgctgctggatttattcattcttctccctcacarttttggctcgcacatgcttcctttttagctcatgrccgtgcarttcaactcaacctcatggcatctttttatcagctgtccctgctgcaacaggcttagagttggtttcccaattccctagcgcagaaatccactggcatgagtcatctttcccattggtagattgcagagcaaacttctggacagatttgcccttggctcatgtatgattggacctgcggtctgtccaggtgtactcagagtggggaaggggagcggtggcaggtaatacaaaacccacctaagtagaaggacctatgaaccatgagggttttccttagcagggagtgccagtgggtagggatgactggttttgcagtttagggccaagtgagttggaatgacagctgtggcgtgttgagtcagatcaagtccagaattcctctccaccccacccatttgcagttccctcagatttattacgggacctggatgtgatgcaagcatgcccgctggctcaggctgtgcctcacagctgcaacatccctggggtggagaagccatgtgggacctcacagaacactccaccgtccctgctaatggctgagaaaggactctgccctcatggatggggttgggggacctgttatcttcttccaggttaatcttggtttcagctgctttaaactctactttttagtgggacgcatcatactgaactatggaagcaccatagttgtcacctagttgagcttctctttgttcccatatgtttcagtgaagcagttatagcttcagaaaagagggagccaggaaatacacttgtaattcatcactccttttatagtcmgagcataggaacactcatagtatgtatcagaaactagtgaacacatgttgttttacagctctgtctgcaaaattgcatcgtgggcctctttggggagtgttctcaatgtgatttttattctggggtgtcctttggccacaatcctcaggattattttttctctgtgctgttcactgtaacatcgtccaccctctgagatcttgcttttcagtctactggtatctccacttctctctgcagcgtgatgtctagtcagagtttccattctgtttttatgaccctgggaggactgggasagatctgtgaggtcatcttrtccaccctcagccagggcaggagtattccctaatggtagagtcaagtgtttggtttggtcttgtttctaatgactcaagtgatgaggcctggggacgtcccttgggaagctattctgcagcctaataactttcattctgtgatttttttttgtatgtgtctaatattcagagtctgacacaataaggccataaagagctaagtctgtctatggtagatcttcacctgggaatgttctcctaatagtcacttttgttataaatcttcacctagcatgggagttaagtgcattttaaaactagacctggggactatgtrtcctaaaatgcaaaaatagcccccaaaatgaaaattaatgttgagaatctagtcaatctgccagcagtacgtacataactgttctgtgtatatttcacatggccatatatgttttgcttgtgtggtgctaaaygcaaaggcagagaagcttctgctattgaatgcttagcacagaactcctgtcctccctctttgaaattattccgacagttgcccctcatttggcttgccaaggagtaagatcttggcttgtgtgtttctcccatgtgtggtgtatctgtaatctcggtcactgttgagagcctggtgggaggctgattattgttgagggaaagatctgagagcagggccaagaaagggaaagagagagagaggaaaaaaaacaaaaaagaaaaagaaaaaagagaggtgggtagggagggaggagagacatggayccacggggaatgggaagagaaatagaaatagggaatttgaaatggaaataaaacaaaagggcaggaaaggaagaaataaagagaatgagataaaaggaaaagaaagtgcaagtagatttgggatctatagattggggaaagacattcatacagtcaggaccagatgttcactggaagttttttccttctggatccttctttggctataggaatctggttctcaaagtgtggctcccaggccagcaacaccagcatcactcagaaatctgttagaaggccaggcgcggtggctcaggcctgtaatcccaggactttgggaggccgaggcgggcggatcacgaggtcaggagatccagaccatcctggctaagtcggtgaaaccccgcctctactaaaaatacaaaaaattagccaggcgtggtggcgggcgcctgtagtcccagctagtcgggaggccgaggcaggagaatggtgtcaacccgggaggtggagtttgcagttagcagagatggtgccactgtactccagcctgggggacagagcgagactccctgtcaaaaaaaaaaaagaaatctgttagaaatgcatattttctgttttcaccccagaaatcctgaataagaaacactaaaggggagtgggcccagctatttgtgtttttggargaactcctgttttaatttgttttttcggaagtcctccagtttgagaaccaatgataaggacatttttccgggaatccagttgttttaggaaaggcccagtaggcatttatgtttataagcaactccaccctgcactccatatgccttctgtagctatctaacagagacagagttgacttgcagaaactgttttctctggccaggagacaggcttcgttttcgaaactcacccaggaaggcagtgttcttcttttcaaaaggcatttttctgttgactgtgcaygaagccacatagtaataaacagtttccatatccaagcagctaaggcttgtgccttgcaagttaagtggaacatcasgatctatatctcagttttccttatgtttccccagttggcacatcatggccaacaagagagtagggatcattaaggagtttattttcatctttattttatcatttaaaacacatttttttttccaatgagagtactgatgacataaaaggttatacattgaataaccacccaaattagcagtgtttcatatttacactgttcaacacagttctcttgtstctgttcatgatataacagtaaatccaagttgctttaagtagatattggaaatatgaacccaatatgttcttaacatctcyatgtcgtaattctaatttaaaatcaaaatctcatcaaattacattttagattaaagsattgtacctatcgaaagaagagaatcgaaaatgcgaaagtccttcattttcagtgtggcctgagattgttgaaggatttgttctattgcatgctgataaatatttatcacggttaagtgaacaatcatttggagacagacaccattttatgatgcagcttctcagggcgtcctaattgtgactctgccttgccattctatgttttatcggaatacgcagacatatactttatgaggttgggtaatgaagagagagagaccccaataaacatattttctaagagtaatggttatctatagctcaggaacccttggttagcacagcctctattacacagtactaggcaagcagttcatagctcaattagatctaacttgcttcatttttaggcattatgttattctaaattaacactgtatttcatattctccaggtctgactattaaccagattttggaacctttagggcttattatttagtaatccctgaagctctcaagtaggcgtttttaaattcatgcattagaacagattaaaaattagctagaaacgcatgttaaatggcccactccctttcttttgctaattgtgctagaaatgaaaaagaaaatgcaagtgaggtcagatctagtgtggtacaaatgaacttgctacttggtttgctgccaattgctgccgaaacaggagttatttaaattagtaaataatttttgaaatcttcttagaatgtcacagsccacaattcaaattcacagaccaggaatggttattatttctatatatcttaaagttttctgcaatagaaatgcatttcaaatataagctagaaaaaaaaaatgtgaggccttattgtgtagataaaagtgacaagatgtccaaatgttttgaaacgcagtgatttatttaagttgtagaaagcttggttttatttcttgttgcatcgtctttatccttagatcttaatcagaaataggaaaattttctgagagaaaattcacgagatcattcatgatgagtcactatatcagttactttaaaaaaaaaaaaaaagatcctgacaaatcctactttttcaggtcctgatgcactaagtctcattcacttctttctatttttcctctctctattgcatattaacccaccatattgagagaatagaaacttttgccttcattatatcacctttacaccccaggacaggtgccctcctcagcggagacaactgtccccctccatcckgcaggagtwttgcagmcatccttccagccactgcttctctaccggggcaaatyytcccccaagggataattgataatgtctgaggcatttttaattgtcacaacttggggaaggggcaagggattgagggagagtgctcctggcatctggtgggtaggggttagtgatagggttcggctgtgtccccacccaaatctcatcttgagttgtagttctcataatccccacgtgtcatgggagggacccagtgggaggtgattgaatcatgtgtgcagttacccccatgatgttttcatggtagggagtgagttctcacaagatttgatggttttatacgatgcttttcctcctttgcttggcacctctccttcctgctgccgtttgaagaaagacatgtttgctttcccttccaccatgattgtaagtttcctgagacctccacagccatgccaaattgtgagtcagttaaatctctttgctgtataaattacccaggcttgcatatgtctttattagtggcatgagaacagactaatacagtcagggatgctgcagaacatctccaaacacacaggactcccaccctctacttccaccccaccaacaaagaatgattcagcccaaaatggcagtagtgaccttgttgagaaatgctgttcaagccatacgtcaccattggaaggttgccaaactgtgctttgcacacacatgctgtctgcacgccttgtatttttctctttgcttagtcctgctcatgctctctaaacaccccagacatcatatctctttaagaaactctggctgagtcccataatgttctggggcaacttctgtcttcccttttccctctggcaaagaatccttgaccaaactttagctcagctcctcagagcccacttctcaactagaccttgaccttgctcctctctccttgctggatcttcatagtccagtctttgtaagagtcattctaagtcagtctagagagaatcccttcacccttcatgtctgatcacccttgcctgccttcagcaaaaatcctgctaacttggttaagttggaatactcctacccttgtggttccttgtagtaatttgcatccactgaccctcccactcccctgctactctgttccttgactataaatctccagctgkctttattatatttggarttgagccctatctctctcccctattgcaacagccttgacccctgttgaaataatcctgcataaagtcttccttaccattttaacaaatgtcaaggtaactttgttttttgttttttttgtgtgtttttttggagacagggtctcactctgttgcccaggctgcagtgcagtgatgcaatcttggctcactgcaacctctgcctcgcaggctcaaatgattctcctacctcagcctcctgagtagctgggattacaggtgcccrcccccatgcccagccaatttttgtatttttagtagagatgcggtttcaccatgttgaccaggctggtctcgatctcctgacctcaggtgatccatccattttgggctcccaaagtgctgggattacaggtgtgagccaccgagcccggccaggataactttttaacaaccccccctccacactgccaactttttgaggaccatgtgttgtgtagggccggatatagtgcacatggtgaacacataaataatgtttgttggccaggcgtggtggctcatgcctgtaaccccagcactctggaaggctgagtcagaacgattgcttgagctgaattgttcaagactgccctgggcagcacagtgagaccccgtatctacaaaaaataaacaaacttagccaggtgcggaggcattcacctgtattcctagctactcaggaagctgagatgggaggattgcttgggccctggacgtcaaggctgcagtgggccatgatcgtgacactgtactgcagcctgggcgacagaatgagaccctgtctgaaaattaaaaaaagaagaagaaatgtttattgaatgaagacatgaaagcatttggtggaaatagggcacacacatgaatatattcacagttgcaaactcagaaggatactcccaacctggttctttgkcttgtccctccatctgggtgctttccagtcacagcctggatgcatgtatgaataaacttctaccattaagtccctgaattatttaagcactgccagtgattctatataaaccgttcagtaaaatgaatkgcatatgcgtatgtttcaagagctccagcagcctacccaggatggcttgatgttgtctcttarcaccgtatcaatacctgggggttttcaaatattgcaggtggccgaagcctttgtgttgaggtttctgtagtgtttatccatttgtgaaaccaggcctcaatctatatgtccaacgccattcgtagaccccctttgataatctccactaagcagacatactcgatacatcttcactaatgagttctgacttcataaaawgtattaatgacttctttttgaaagtaagagtgctttgaataccagtcrttattgctttagaagttcataaaagcaaaagcacagtatttcccccagtgtttgtgcgataagagaatagatgtaggtccagcgcctagaattttagctatgcttctcttgtttgtgattccaggtttcagactgcctggtagaaggaggtcacttctgattgtcagtgactttggtgagttcttaccttgtaaaagatttacaattatttcattttcaacatagctttatcttatgacaaaggtgacagaaaggaaatctcctaagttggcctacagggtgctttagaaaacatctggctgggcatggtggttcacacctgtaatctccacactttgggaggctgaagtaggctgaagtgggaggatggttagagcctaggagttcgagaccagtctgggcaacaacgtgagatcctgtctctacaaaaaataaaaaaaattatctgggtatagtggtgtgcacctgaagtcccagctaactgggagtctgaggcaaggaaattgtttgagcctaggaggttgagagtgcagtgagccgtgttgctgccactgtactccagcctgggcaacaggacaagaccgtgtctccaaaaggaaaaaaataataaagcactgtctctctctacccttgcagtatccctgtaggagagagttactattagctcccagtttataggtgagtgatatggtttggatgtgtccccacccaaatctcaacttgaattgtatctgccagaattcccacatgttgtgggagggacccagggggaggtaattgaatcatggggcccagcctttcccatgctattctcataatagtgaataagtctcatgagatctgatgggtgtatcaggagtttccgcttttgcttcttcctcattttctcttgccactgccatgtaagaagtgccttttgcctaccaccatgtttctgaggcctccccagccatgtggaactgtaagtccagttaaacctctttttcttcccagtctcaggtatgtctttatcagcagygtgaaaacggactaatacagtgaggaaatccatgtgttaggaagggagtgtggttgtacttcaacctggaactgtctaactcctaaggttttattaatatctagtccatttctctcaatctaatagtaaatggaagagaagcaacaacttttgttttccaattccttttgaacatttgaaaggttttctgaaaggacttaaagaaaccatagcttccttaccagttcccaaagcttcagtccttaccaaagtgtacattgcctttaaggagatttgtttccatcaatccctcccatttacaaggaattacagaagagtgatgcccccttcaaagtggctcacacctggctgacatctgttcattaagaatgcctgcctttgggttctaagacgtccaaggagctcttatgggtaacacctgtagatttatagacgttcctctctgactgtaagggccatatgcctgaatctctcacccccatgtttataaaacttaacaattgtggaagcaatgaattgaaggactagggtcaccagtggagtcccataaataggttgtttatgatccctgtgaaacaagaagaccctyttaatttcatgcttcttaaactggggtatgagtggccccaggtttccctgttgggggtactgataccagagttcatttgaagtcattggaaaccaaggcatattttcttaaagagacaactgtttttggtgaataggccatgttgtttatagtaaaaacaaacatgaatattctgtaatagaagatatcgtttgcatggtgttttaaagctaaaacttgagttattaaacacccttctctccctggggatgccttttgctatggggttgcatccacggaagagtttgaaagcccaaccatatggacatcatattattcatttttatttgccatccagagcttgccagcaaccttttagatctctttccttggaaggttcagcaagatgcttgtaaatgtatgttgctttgttgcagacaatgtatatttaaaaagcaattatttgcccatctcttgttcaactcagatattgactgcctttctgtatttctggctgggcattgtttatctccacctcatggtttttactatggttctagaggtctagcctacaaagagaatgcttcccgtccccaccactacccacaggaccctctgcatatctcagaggaatttctcagtgttccagttaattttctctctgtttcctttattacttctaagttccattgcaaaaatatgctgcctgctctgtcagccaccctatatgcctatttagtcccagttttccagcttctatttttttccacataatccctaaccatgataatacaaatataatagaaataattatgtttgtttaaaatatacacagaaccaaatagtcatagagtagtatttcaggtggggggccctcctctagggcagtggagacaatgtcacctgtcgggaacatttggcaatgtctggagacattgttggttgtggtgcggtgacataactattggcatcgagtggatggagggcaggtgtgctactaatcgccctctattgcacagggtggcccttaccacagagaactatgcagctctaaacatgcgcagccccaaggctgagaattgttgatctaggggaagatgtgatttcattcttcatgcttgtaaattattatttaagctgtgaataccctctcttttcccactgaagttgtggttgtaagattctcagagttgagcagactcggcaacattacagaaaaaaaatcaagatgtaaaaaggatttagacgtctggacgtggtggctcatacctgtaatcccagcactttaggaggccgaggcaggtggatcggttgaggtcagagttcaagaccagcctggccaacatggtgaaaccctgtttctactaaaaatataaaaattacctaggcgtggtagtgtgtgcatataatcccagctactctgtaggctgaggcaggaggcagaggttgcggtgagctgagatcgcactacttcattccagcctgggcaacagagagaaactgtgtctcaaaaaataaaataaaataaaatggatttagaaatggtacagtcagaggttaggggtcgggtcaaagcgatccccccagagacctgtggaaagtgtggttctgtctacaagctgcgaccatggtctttactgcttctgcaaatacttgacaaaaagggccacactcttagctggacttttcctccctttcctgaaacaatgcccttcccattgtcaaggcagaagcagcctccactgagaagcgtcagacaccacgtcagtcttgctttccattgctttgctccagtatccatttgaaattcagtgcaaacccataaattccactttgcctctggtagcagcctgcatggtgtgtatattgaacactagaaacacagtaaatccagcccatttattcacattaaccagcaaaggcattctgcatgcccatgtaaatactggaaattactgacatggccttctagaccatgaaaagacagaagcatatggcagaattcatatgtgaacagattgctttttctcataagaacgctttattggaatatcaactattacagctttttgaagttactcttcctgctcttgatttaagtcctgaatcaccccactactctttttttttttccgctgcattctgctatgtatctttacatctgcttcctgcactttctaaatggcctacttaaaccttgaggtaggtccttcagtttcccataaattaataacacatctatgaatatttcccagccagtcttagaagccccagtctattccaataccaggattgtaaacacagggaatagatgaagcaagctgcttctttcaaatgctcttccaatatgaagcaaaatattattgatctagactgcctgctactttcatttaccatgttactrctcgtgggattacaggcacaaaggtttcataaatttcaaatgaaatatgaacatttgktgtcaaagtactgttaaggtatgaaaaccctgctagtattagttcccttttgttattattctattattattattattattgtgtttacatccacaggcaatcacatattttaggttgtggggagcaaagcagcttccccccactttttctctcactccaatttgaatcctcccatatgtccctccctcattttttaagcaggaaacaatgaatgagtttttgctcctcttgccctatttgccgtgtctcttttctgtgattcgggagcacattgatacccttcttttggagcagagaagcttgtctttcatgatagaagtaggtcatgggggcggttagytgacttcatcagagagtagcatgcagatcccacctgtgaggctatggtctgccaaggagagttcagcgggctggatcagagagagcagagccatgctggcaagtcggagtctttgtggaaagcagccaaggtcacagctggaaataaaactgtgtattccaaatcagaggggcaatgcaggaatggatcaaaggaatgaaggatcaagttgtcagccaagagaaccaagagccagacacagggaacctgtgacaaaaacgaaaaccaataaaaacatatattgagcattgaccaggtgcccaatattttaatgtcccatgggtgtgcatcaggtacgctgtggaaggacagatgtcattccttaaaggggctgcactgaattagaccaggggttctcaaagtggggtccctggaccggcagcatcaccatcacctggaaacttgttagagatgcagatcttgggccccgccccagacctcctgaatgtgaatctctggtggggagggagacgaagtgggagcctgtaggctgcagtctgtgttaagctttctgggtgattctgatacacggtcaagtttgagatgtagcaggagaagcaggaaacataggagagaagccactaggggtgggaatcagaaatacggtgtccctgcctacctaggggctacattcctccgggcaagtctttttaactctctctgcctggcaacttccttaacaaagagtgatactaatacctgccttcctgtctttgccacatcacgggattttctacagctcatattggttacagtgatagcagctgagatttaggctgcacctgagtaccaggcagggtcctaagtgacttcagactctatagacagtccctgacttataatggtttgacttagattttttcacctttgggatgctgagaaaaccatacacatccagtagaaaccgaactttacattttgagtttcgatttttttttttcacctgggctagtaatacgtggtaggatactctctcacaatgctaggccacagcagcgagctgcagctcccagtgatcacaagggcaaagaatcgatattctaccaggcacggtgttgcctgataaccttgcccagctgtaggctaatgtaagtgttcttttttatattttctttaatttttttaaatttccacctgttttggggggggtacaggtggtatttggttacatgagtaagttctttactggtgattggcgagactttggtgcacccatcactcgagcagtatacactgcatccagtttgtactcctttatgcctcacccttttaccactctttccctctcagtccccaaagtccattgtatcattcttatgcctttacatcctcatagcttagctcccacttataagtgaaaacacacagtgcttggttttccattcctgagttacttcacttagaataatggtctccagtcccatccaggttgctgaaaatgccatcagttcattccttttcatggctgagtagtattccattgtatatttataccgtagtttctttatccacttgttggtagatggccatttgggctaatttcacatttttgcaattgtgaattgttgtgctgtaaacatgcgtgtgcaagtatgtctttcatataaggacttcttttcctctgggaagatacccattagtgggattgctggatcaaatggtagttctacttttagttcttcaagaactctccacactgttttccatagtggttgtactagtttacattcccaccagcagtgtagaagtgttccct

SEQ ID NO: 94055 - DNA, 95659 bp, Homo sapiens
  misc_feature (1)...(95659): n = A,T,C or G
tccagaagtagtagagatctttaagaaacagctgatgaagttccgttatcctcagtccattttcagtacctttgcttttgctgctggacaaactaccccacaaataattttaccaaaacagaaggaaaagaacacttcttttcggtaagaagaaagacaagtctgttaatttcagccctcccgtaattgattgcaaaaggagtaacctatcctttgtgtccaggtgtaagcgattgctgttttcattcactgttctgtttctgtcaagcccatggggccaagatcataaagttacggaacagcagcattgataaatgtagcaagtttcaaaaactaaaagctaccagaggctttgactgtcatgtccattgctcacaatgcatttttagaatgtgaaattctattttctcttttttccatattgatcactttctaaatgcttttgaccaatcccttcagcttttattaatatccaggcccagtggacagatttgcttttatctagaaacaggaggctatattttctgtttttcataactcttgaacatttcaaacttactgaaaattcataacagtagaacaaagaatttctgtatatattttacccagattcaccagtagtttctactttggtccatttgtttatcattctctctctcatatatacacatattttttttgagccatttgagttagatataagatgtccctttatccttaagtacatcacaatatgtttcctaagaacaaagacattatctttttatgttttttattttattttgttttttaaatttatttattatactttaagttctggaatacatgtgcagaacgtgcaggtttgttacataggtatacrtgtgccatggtggtgtgctgcagccatcaatccatcatctaggttttaaaccctgcatgcattaggtatttgtcctaatgctatccctccccttgtccggcattatcttatataagcacagtaatcaaagccagaaaatttaattaatataaaacttttatctaacccagagtctatattcacattgtgttaatgatccttttttagtttagtacctaacttttttattcctggtccaggatctaatccaggatcaggcattgcatttagttgtcatatttctttagtatgaacccttattttctagaaagtttttagaaatttatgttgaaagttttaaacttcagttatgacgaaataacaatagttttaagttatcttccatcggtgataaaatataagggctaaaatttcattcactgttaaccatgtagaattcgggcatctgccaatacaaattacaatactagggagagctttgcagactttggaaaagaggcccttcctttgcctgaaagaagggtagattggggattatagaaaatttgaggttccagacagtatattatttctcagttgcacagctagccacctgtctagctttgcttaccaggtaatatccaggtatggtatgctgaagcatgagcaagttcctagggatttacagcagtggaccaagcatcttgtcttagcaccatagggtcggagaggagcctatgatgtttgttatctcagccttcaatggaagagacaaagctttgtgtggtattttacatttagaaactatcagaaacatgtatatttatattagtttcagaaatatatacctgtatcaagcctgttatatcagctgcaacagagatgtagcaatttaaaaattttaagagttgcctgggtatatgaaacaaaagatatatatagctttagctgggaaaaaatttcaaaaatcccattgagtttaagttacacctagtgttacagctcttttagaatttgtctagcagactttccagtttttgccagaaagcccactaataaaaattaaaaaataaaagttacacaagtgatttacaataagtttaatttaggaaatatcagtattttatgattcccagctgttatctcaaacatgtttcataaccttcaggtttacattgcaaataactaaagatggagtctggtgaaactatttgataataaaagaagccttatcactttttactgaatggcaagaaaacaccagaagagttctttgtgatagagaagaatataatcaagaacagtcttcagagtcttcacctccatctgattagtcaggaaataggttctctgtttaattctctggattgcctagattttctgtcagcaagaagggttaaattgtttgaataaataaagtacttctaggtccattacatcttagtttccctttaattaaagctgattctcaaaaggatactcaagtttctgatttcttatttttctccttcaaaaaaggggaattatattatttttctatgcttcttaaagtttacagctaattagagtcaggacatcacatatacacacttaaaacagttaagaaataagcaaatgtgttgccaactatgaaggccatatgatctcaaagaaaggcttgtgagttggtagaaagagagtttgagtaagtagagaagtgggcaggctggctttccatgtaggaggactccaacaagcatgctttgtgggaactgtggtagggacagtggcatgaggataaccagagtgggttcagggcagtcctccccgacaagctaaaccaaggagtttagatttggggtgataagtagtttgtgtctcactttacattttcctgcacgtttttcctaagacagtatcctgatgacagtggtgttttatgggaaattagtctactgccatattaaaagtaacctaaagaaggagaggcttaacaagagtctggaccagtagtggctgtgggaaaggagaagaaacaatttgagctaagtaggtgtcaacaatacaagtagtgcttttatattaagttgacattctctttggttttatgacttgtagtaccttctcaaaaacaattgtgaaaggtgccaaaagggcagggaaaatgacaattgggcggcaatatttactgaagaagaagacagggacaattgtggaagaaagagtaaatcgtcctggatggaatgaagatgatgatgtatctggtatgtgaaaacttgaatttccttcattattcaactttatttcttatatgaataagagactcagatgtagttgcacttacatcttgattcacaaaaacctagatctcatgagaagatggaagcacttaccagcttcttagaactgggggaaaaatattttcccaatatcccattgttcaggtaatattttgttaaattatacttctttactaaattcatacagctaattggtcatttttatgtgtgtctcattaaaagaagaaagaagggaaccccactgcatgggaaatttaggtatagagtagtcccctgtatcttatccttctagaataagaatttaaggtaaggacattgaacatttcaagttgaagatttcagtttttggtaagaacattgttggtgctcttaatcaaaatgggggacctaagatgaaggaatacttaggtcataagaaaaaatacttgctaaatatttgaaagaacagctacaatatctctcagtgggaaaaatagaggcagaaagctagtagcaaaatctctgagtgactgtttcccattcttaacccagtatcaaatatgctatggaatcagcactacagagaagctgatataatgggaggcagaatgccattacaccctttttttcccctcaggatcttagaatcagtcaccggtggttttgcaaaaactactactaacaacaacaacattttaaaaaagaaacctcatcttcagagaaagcactggctaaccggtctccattttcagttgctgggataaagaacctatgtgggccaggcgcagtggctcatgcctgtaatcccagcactttgggaggctgaggcaggcagatcacttgaggccaggagttcgagaccagcctggccaacatggcgaaaccctgttgctactgaaaatacaaaattttagccaggcatggtggcatgcgcctgtagtccctactgctcaggaggctgaggcatgagaattgcttgaacttgggaggagaaggttgcagtgagccgagattgcaccactgcactccagcctgggtcggacagagcaagactctgcctcaaaaaaaaaaaaagaacctatgtggttttgtatgtatgtatgcatgccctgggtgagaacatgtacatacaagcttgcctttggggcagtgaaaatacccaccattatatcactgaaataacaccacacccatttgttggaaccctgatcttttcacagtcatgtgtcaaaccataaaaatattatcgctacccatcactattgactcttctaactcaattttttttatatttcatggaacaaaacctattattctatgataattattctactaaaagaccaaattatataatgttctttgctcctctgaaaattaaaggccaacacagaattgatacctgatgatattgcattgtgaagttcacaaatggaaacatgaattgaagttcacaaattgaaacacttaattgttgatgttctgcttttttaaaatatattttaatgaaagagggccatatctttgcctgcacattagtactttgagtacattttcaaaaactttgaaagcttgatttgatgtctcttactttcaaaataaatagggaagtaaattaggacagtttttaacatggattttttttttccccagttagaacatgcagtaccaattaggaatgttctttaaaaaaaaaaaagcctccctaaaatatttgattattgagtaaattcttccacatctaaaattgtaaaggattctgtaacctgtgattgtaaaactgtgaggggatttcccacgtacaccacatcctctaacaaaaatatttccaggaaaaaagtgtaactcctttatacctctctgaggaaataaagttatttttccctctagtgaacttctggttaatccagaaatttctaataaaagtttatagtctgaaaagtaaactgaaatctggatgatgagtttgtatagtgattttatgaaagataaattttactgatgggttagcctctgacaaactttgggtgtttttatagagtcctaaatagaaatcactgcaatttgacaataagcaagccttcatgaaacagaacagtgtaggtaatgaattcaaaattatattgtttttagaaattatttaaatggtattattttcctgacattttttagttgaattactgatattttatttcttgactattcattacacttttaatttatgtttatttaagtgtgattcctcacagaagttacatgatttaatttgtgatatacataatacttgtcatcctaatataaacctgtcttggtgtaagagtcttcttcaaaagtagcgggtttgtttttttttttttttgcggctgggggcggggtttgagacaaagtctcgctcggttgcccaggctggagtgcagtggcacggtctcagctcactgcaacctccacctcccgggttcaagtgattctcctgcctcagcctcccgagtagctgggattacaggtgcctgccgccacacctggctaattttttgtatttttagtagagatgagatttcaccatgttggtcaggctgctctcgaactcctgaccttgtgatccgcccacctcagcctcccagtgctgggattacaggcgtgagccaccacacccagcccaaaaggaagtttttaatcctgtgctttgagctaatcatttcttcaatatctgtctctaccatcccagtttcagatgagagtgagctccccacaggtactaccctgaaggcctcaattgctttgagctaatcatttctttgatatctgtctctaccatcacagtttcagatgagagtgagctccccacaggtactaccctcgagaagtctacaatggaacagttggtggaaaaagcttgtttcagagactatcagcgtttaggtttaggaaccataagtggcagctcttcccgttcaagacccgagtattttagaattactgcctccaacaggatgtattcactctgccggaggtaagtgtgtcagtgggctccaaaaagaggtcttcyttcctttcttcttatttgaatctttaataggccatttgcatccatagccctgagatagataaaaatgcctgaaaataagaacaaggtctccaggatacgagcaagcatctcaytggcattctcggaacaattaccttactgaaagtacctctagtaggtgagaaggtgaaaggtaaagtactcaccccctatgaatttctcttgtctttctcttcccagtttgcttcttttctagcatgactaaagataacttgaagaacaggattttcccagcccaatagaggacatgaaagtcttttgtaggctggggagccacaaactctttctataaagggtcagttggtaaatattttcagtttatgagccatagagtctcttgttgcagctattcaactgtgccgcaaaagcagccacagacagtaaggaaatgagtaggcatggccagttttggcccacaggctataatttgctgacccaggtgtaggcaaggctttcttatgcggtctaattggaatgttttcaagggaatattacttaaaggatgtaaataaagaggcattttcttttttcagttcttgtcatctctcactgtttttcaaatatgttgagtcttattccatgctttactatatgtaaatatatattttctaaaattacattttcaccatccacaagtttagtcattttcatctccaggtaagatttttctttgcatttataaattcctgcttaaacagctctgaaatcactttgtaaattgtaagctttgtacatattttagaaagttatcttaatgttactttcaaccctgttgctcttgaagatagatatgtcattttaaatggcaatttaagtttacaaatattaatatgaaacttcagaaacaagttgggaatatagttttgagattgtggccaaataaacattttgcatgaagttctgaaaaattggcactctgagtatgcagtaatttttctggaattctccgtcattctaactaaattttctctgaagatgagtcatgttgtcggggtgtgatgtcctgctgtttggaaagtttgctatcaaaattatgccagccattgagaaaacagactcatttatcattccaatctgtcagaagtaaaataaaattttaatagatgacttattagaacactggttataaagcatttatgatggtaaaaagtaatatatatccattaagttattagcaggaaggaaatggaataataaaaaataatccaaaagaaggcaagaaaggaaaaaaaaggggacatagaacaaatggaataaataacaagtagtaagatggtagatttaaattcaaatatatccataattgcattaattattaattgactaaatgttccaattcaaagaaagagatcagggtttgctttaaaaaaaaaaaaaaaaaaaaagtggctgggctcagtggctcaygcctgtaatcccagcactttgggaggccgaggcaggcagatcacgaggtcaagagatggagaccatcctggccaacatggtgaaaccctgtgtctactaaaaatacaaaaattagctgggcatggtggcttgtgcctgtagtcccagctacttgggaggctgaggcaggagaatcacttgaaccctggtggtggaggttacagtgagccgaggtcaagctactgcactccagcctggtgacagagcaacactccgtctccaaaaaaaaagctttctgctgcttttaagggacaaatctaatatacaagtatataaaaaggtagaaagtaaaaggatagaaaaaatataccacgcaaaactacctttaaaaaaagttgttgtcactatatgaatatcaaagtagactttaaaagcagtaagaaaggatggttgataatgacaaaaggtttattttacacacagcaattcattaagatcaagtggagtttattgtaggaatagagtactggtttcacatctgaaaatcagtcagtgtaatttaccacattaacagaattaaaaagaagtttattatataaagataagcattttgcaaatgcaaagtacacttatgagttttatttatgtaaatttatttatgtaaattctgtattttttgtcacatttgtgatctttagaaaaaagctctcagcaaaagagagtaagaatgagctcccatgagtagcgccctgaaggcctcagagaagtctacagtggaacagtgggtagctccttaatcttctgtcttaaaaatcctacacaggaaattacttatcttagaaataaataaaatattaaaagctttttctctgaaatcctgacaaggatgcccattatcaccatttctattcagtgttgtactagaggtcttaggcagtgcaaagagactagaaaagtaataaaaggtataaaaattgaaaagaaagaaataaaactgccattactcacagatgaccaaaatgcacatgtagaaaatctgtaggaatctgccaataaacttttaaaattattaagtggatttagtacaaggtcactgataaggtcactagtacaaggtcatttacaataattatatatatactaaaaacattattacaaaatgaaattttcaaaaagtgatgctattttggtattattcctactatttacagtagcactaaaaaacattacttagggatgaatctaataaccagtgcaagacctctacatggaatacttaaaacaatattgaagatcattgaagagctaaataagtagatatttcaggttcttagattagaatattcagtattctaaaactgaatttcctgaaattgttctatagaatcagtcccaatctcagcaaaatgttaatggaaactgaaaaggtaattctaagagttacataaaaatgtggaaggcagagtagccaagatagtcttacagaataatactataggatgtcaagagtttttataaagctacagtaattaagacagtataggactgacacaagaatggacaaacggaccagtggagcaaaatagggaatatattaaacagaaacaccccaacatatgtggatacttgatttaagataaaaataacacttaagagcagtggatagaagatgttttttcaataaaggatgctgggaaaaattaatcttgacctattcccattgacctatagatctatatgtaaaaggttaaaacaataaaacaataggtttgttattaaggttaaagcaaataagcttaaaacaataaagcttctagaagataagagaatgtctycatgaccttgaggtatagggaaagatttcttgggataggaaaaacattatctataaagtaaaaaattgataaatttagaacttctgtatatcaggagatatcatcaagagagtaaaaaggactataaattggttaaataactttggaaagttgtctaatgctgtctaaacatttaaacatctactgaacatattcataacctaattcctagaaattctcctcttaggtggagtagaatttctaacagaaatacatatgtgctcccaaaagacatctacaagaatgttcatggcaacattcttaataattaaaaaaactagaaactactcaaaatcaacaagagaatagataaatggtatcatactcmcmcagtgaaatacagtaatgaaaatgaacaaactacacgtgagtacaaataacacrgatggatctcataaacataatattgagcaaaagaagccaaacatgaaagaataaactctgttgattccctttatctagaattcaaaaagaagcaaaattcatccmcattgttagtcaggatagtagtaatcttttttttttttttttttttttttgagacaaggtcttgctctgtctcccaggctggagtgcagtgatgtgattccaactcactgcagcctcaacctccctggctcaggcgatccttccacctcagctttctgagtagctgggactaggcgcatgccaccaaacctgtctaattttctttttattttatttatttatttttgtagagaagaggtctcactatgttgcccaggctggtctcaaactcctaggctcaagccatcctcccagctgggcctcccaaagtgctgggattacaggtgtaagccaccatgccaggcaggatagtggtaatctttaagaaagaagaataaatagtgacttggaggaaatactagatcttggatgcttgtagtggtcaatttcttgacctaggtggtagtgatatcacctaggttttgagcatttgtatgtgaattatgcttgaattaaaaagtttccacaacagcttctgaagcctagtctacctcttgagagttaactgtggagcccagagctgaaggctctgagtagtgggttaggatgggtggcagggaaattgatatctttcattacgaaatgagactggtactgggagtagcttctcttggtctttaggcttcacacaatttgccccagcatgaggggctctccagctgtcaygcaagcccatgtcaggaagcaggagagagccatagatcttgtatgtaacagaggatggtctgtgtgtagtgctcattcacagtggaaggagatggctcactacagggggcagggagtgaaggagtgtgctcgttctttaccgattattgaagtagctcctggaaccattaaacattatttccctgtctaatacacattgtatcttgaagcaagttgggaaaaactgatattcaagtggagatagagggtcctaattatggaactgccttttcagtcttcatgagtgattatgtctatagcttggtcttttcatcagtttgtggtattacaaaaattcaggccacagcttcctagatcaccaaagccctaggctttcagaatgcttccaagttatcattggttaagtatggaaagttaatttggcattcagtaaagtagttgaaggttatgatttatgtgaccataaactagatttcctttccctcctgtcagcactggttcttatcaagataagggataagaagttctggaaatggatagtggtggtagttgcataacattgggaatgtactaaatgccactggtttgtacacataaaaaaggatagcatgaatcctagcactttgggaggccgaggcgggcagatcacctaaggtcaggagtccgagaccagcctgaccaacatggagaaaccccatctctactaaaaatacaaaattagccaggtgtggtggcacatgtctgtaatcccagctactcaggaggctgaggcaggagaattgcttgaacccaggaggcgaaggttgcagtgagccaagatcgcaccattgcactccagcctaggcaacaagagcgaaactgtgtctcaaaaaataaataaaaaataaaataaataaaaagataccatgggccgggcgcagtggctcacgcctgtactcccagcactttgggaggccgaggcaggcggatcacctgaggttgagagttcgagacagcctgaccaacatggagaaaccctgtctctgctaaaaatacaaaattagccaggcgtggtggcacatgcctgtaatcccagctactcaggaggctgagaaaggagaattgcttgaaccccggaggcagaggttgcggtgagctgagatcacgccattgcactccagcctgggcaacagtgaaactccatctcaaaaaaaaaaaaaaaaggatagcatgataaattttatgttaggtatattttcccaaaatttataaatcaccagctgggcacggtggctcatgcctgtaatcccagcactttgggaggccaaggtgggcagatcacgaggtcaggagatcgagaccatcctggctaacacggtgaaaccccgtctctattgaaaatacaaaaaattagccagggatggtggcaggcgcytgtagtcgtagctactcgggaggctgaggcaggagaatggmrtgaacccgggaggcggagcttgcaatgggccgagatcgtgccactgcactccagcctgggcgacagagcgagactgcatctcaaaaaaaaaaaaaaaaatcaccaaaaaaaagatataggattagtggttaggaggttataaatataaaatctgttytgtgtaatatttctaattaaactaaaaaaaagaaatgactctgaaacctgcctrtcttcttgcatttattaatctgtgtgtactcttacatgttattttcccagcatcatatcctgtaactttataagctaatcttttaaaataagtatcaacatgtagtgttattaactatttaaactcatttgacatttgaacaaattgttctcatgccaaaaataatttggttttggtttttaagcctttcaccatctcaggcagtstaatattggcatgctgtattctctaatgtcatctcagtgatctatgaattgtttacaatttgacttgtcattctcataaagttgacattaatctggtaatcttacgatctttatttcaagttgtggaaaagtaatgtataaggcaagggaaatagttcaacagaggccttttaaagaattctacataatatttttattttctaagtttattcaacagaagtctgcaatatcagtgaatggggctcttttcaaaaaagactacagatcagtggatgagttagctattttcaccatctagggattttcttctcaatccctgaagaattcagaagttgaaactaagttccatatttgaaatatgttggccaggcacaatggctcacgcccataatcccagcactttgggaggctgaggaaggaggatcgcttgagcccaaaaatttgaaaccagcctgtacaacaaagtgagaccctgtctctacaaaaataaaaataaaattaaaaaagaaaataaatatatcttacccttcaactaataygtttctgaatcttagaaaattactatgatattagtattcaatttcttatattctctgtctccctcttctctcatttcctttccccttttcttcccctctgttccttcccccaatcattctcttctctattctatgtctctgaagctatcctggccttttagtcgtacctcaagctgtacaggacagtagtttaccaagagtagctcgctgctatcgacacaatcgcctgcctgttgtatgttggaagaactcaagaagtggtactctgctcctccgatctggaggattccatgggaagggagtcgttggtcttttcaaatctcagaactcccctsaggccggtaagcatctctctataacacaattaccacccgttcacataaggacagtgctaaaaataaaggaagtaaaatctgggaatggtgccttttcatcaagtcttgtctcacacacaaacttttccactttgctacatgcaacatgtacagcttaaacaagaactatacttgatagtgtgaggctccacattgaatttgacatcttaatatgtctggtctgtacttggattttaatagaaattaatataataaagtctttggtcctaggcaattttcattccagcaaaccagagtattcacagatggaaactaggttataccaatcttttttctttytcctgggaagcatccaaatacatttaacagcttcagaggtaagatgagcttctgtgccatgtgatatgagatatccatcctcactcttacaagtcatacgcacacacaagacagcaaactaatgactgcaaatgctgcttcaggatctttcaagcaaagaggtttttaggaagctagcgaaataataagtacagctgtcccatattctgaggatacttgtgagtaccatgtctgaggtcttgaagtcaggagctgtattttgctgacctttctcatagcttctgcctcataatagatgctcaaaaaaaatgaaacagtaggccactaagatatcagatccgatttagggatggctgcattcttccacctttggaaatgaagtaaactcagaatctgtgattcaccaggtacaaccatgtgctttttgaaagtcagccaatgttttgatcattaggttgactgagggcagccttccacctgccttgaagtctcactactggtgtaattgaaggcaattggctgtttactatttctcctctgaaacactgtgtgctcccaagccacctggtgggtatgttagaacataagaaggggccaggtgcaatggctcatgcctgtagtcccagctacttggaaggccaaggtgggaggattgcttgcgcccaggagttcaagaccagcctgggcaacatggcaaaaccccatatctacaaaaaaatacaaaaattagccaggcgtggtggcacgtgcctgagtcccagctattcaggaggctgaggtgggagaatcacttgagcccatgaggtaaaggctatagtgagccacgattgcaccactgcactccaccctgagtgaaagaataagaccctgtctcaaaaaaaatgaaataaaataatagtaaaatagaacacaagcatatatgttatgtaaaatgagtgaatgattttrggagcaccgataagygtatcactaagcttttagttggaaaacaattgaaacttattccactggttgctgatttttttaaatctaatttaaatttactatatttcatattcaacttccacatttactcacaactaatatctttagggtttttttgttttttgttttttgttttgttttgtttttgtttttttttttttgtttttgagctggagtcttgctctgtcgctcaggctggagtgcaatggcgcaatcttggctcactgcaacctccgcctccaaggttcaagcgattctcctgcctcagcctcccgagtagctgggattacaggygcccgccactacacccagctaatttttgtatttttagtagagatggggtttcaccatgttagtcaggctggtctcgaactcctgacctcaggtgatctgcctgcctcagccttcctaagtgctgggattacagacgtgaaccactgcgcctggctgacaactagtatctttgaaattgcaatgcatcttacaattgatgtgatcagaaagaatagtgtcatagtttaaatggcagttttttaattgataagcagtttttattgttaggcaataaaataacagtgcgtcttagaattgatgacatattaaagttgataaaatacaataatgctaattatttattttctattcaagttgtaagaaaatttatgaatatctgttgtccttgtagtgagtccatcccctgtcctctttaaactgtctgggccratttcagtgattctgttttgcttcacccaaaccaggcttatatgcccatcaacccagaattgctctcacaattgtgtatactttttgctcctcatttagaaggaccagggattggcagtagttgctcctatcttctccccatcttcttccactcttccctctacaaatctttataggctcatgtcccctggtgggcctgtgtggcagaattgaaataaagttgctggtattggaaagttcttaactctacccattctgggatgtcaaaggaacccactcccaagcaataacctggtcaggatggttgggggatatcatcaaggcgttgttgttcatgaatcttcattttgagttgcttggataatgagaagctatgccctgtgctttcaagcccaatctrtgcttggaagggtagccctgtgctggttttccagacctgggctctttctggaagyataatgaggcaatcaagaagtaggtgtggtaaaaccagcattacagtggaggattagccatttaatagactggcaatttaagtggggctggtttctatatttgggtgtggtaacttgtagactatatagagaaaaataagcatagatagataggtagatagatagatagatagatacttgttttgttaacacagagacagtttattttattcaatatattttccttttatagctcctacctcctctttagaatcttccagtagcatagaacaagagaaatacttgcaagccttactgaatgctgtttctgtccatcagaaactcagaggcaacagcactcttactgtcaggccagcctttgctctatctccaggtaagatttgataatacttttcttcttgacagcttctaatgaaaggtcagttctgttcctagggttatttgtactgttatttgttatttgtactgttccttcaccaagacttcttaaaagttttaccctgaagggttataagtttaactccttttacttagaaatctaccactattaatgtctagtaaatagtaacttaacttagagattcagttttttcttttttgttttattttcttttttttaagagatggggtctcactgtgttgcccagtctggtctcgaacttctgggctcaagcagtcttcccgcctcagcctcccaaagtactgagattacaggtgtgaggtgtgagctcagttatttccttttcaaaagagtaattggagaggaagtggggaatataaataaagtcaccctttattcccatatttatcatacccagctcagttatttccttttcaaaagagtaattggagaggaagtgggaaatataaataaagtcaccctttattcccatatttatctttcatagactttaaaatattcttatgacatggaatatgtaagtggaacatgtttgttaaatgtgtatttattaaaatcatcatttataagtttgaaattcccaaaatatctgcagcctattatgattttcagtacaatttgttttcactggatttggatgaagccattaagacttgtactaatattctgtttcagttatcatgtgatggaaccccaaagggttcatgtagaggtaaccctaatgtgttagacacaggagcatgtgacttgagaagttggtctctttggcttaatcagctatttgaattagctcaacataagcagaaagtggcttttcttgtaaaataacaccatgcatgccttgctccatttatcattaaattctctgattgcacttgccaaacctaactctctataatcttgcaaatgtgtgttatctctgattaataataacattgccttgttatctctaataaagctttgggtacttaaaagtacaatgtttggcagcagttaaacatgctacacctgaagataactttttgtcatttgagtaatgttaacccaaacaacatggtttttgttcttctttttggctgactttagggactgaaaggaggacttcaagaatgtccactgtgcttaagcaggtagtgccaggacatttggatgtaaacccatccaatagctttgctcaaggaggttagtaagattgattttataactgagcactgatgcaagcttaaaagcagaaagcatttttctagatagttgatattttaaatcaattaattatgattcaaattgttcttaattaccctcttctgaatgaatggtcaaatgtattactagcatgatgacagatgagcttagccttgtgggacaagaagtataataattgctgatgtcatatatattgataagtttgggagcattaagaggtaaggggagcatgtctaaatgatgagtcagccctgggagtactccctgatactccagatttgcagggcagaaagaccaatctatcacagaagtatagatagttaaggagaagtgattccagatcgaaggaactccaagtcctgttatttttgctcctgtcctctgaaatactggtttggaggataagacatcatgatatccaggtagctgctgacatgaggaaatagagaaaggctaagtattcattcttttaagctccaaaaggtcatccactttgttctctggaagtttatgtgagattcttttcactctgcagaggaaattccagaccagattctttttttttttttttaagacagagtcttactttgttgcccaggctggagtgcagtggaactgtcatagctaactaactgcagcctccaactcctgggcttgagcaatcctcctgcctcaagctcccaaggagctaagactacaggtgtgtgccaccactcccagctaaatttttaaartattttttgggacagagtcttactatgttgcccaggctggtcttgaactcctggcctgaagcagtcctcccacctgggcttcccaaagtgctgggattacaggcgtgagaaagcacctggccccagatatctcaactgtgaagtcccactgtctcacaatggagtcacagaatcttagactcttcctctcacccccatataatgatgaattcccttaaaaagatactaagtaggccgggcacggtggctcacgcctataatcccagcactttgggaggctgaggcaagcagatcacctgaggtcaggaattccagaccagcctggccaacatggtgaaaccctgtctctactaaaaatactaaaattagccaggcgtggtggtgcacacctgtagtctcagctactcaggaggctgagacaggagaatcagttgaacccgggaggcagaggttgcatagaccgggaggcagaggttgcatagagccaagatcgcaccattgctgggcaacaagagcaaaatgagccgagatcactccagcctgggcaacaagagcaaaactccatctcaaaaaataaacaaaagtgtgtgtgtatatatatacatacacacacacacatacacacacacacacacacwtatatatatatatatatacacaccacacactaagtaagtaatcttgtttctgcttgaacatcatcagtaatgggaaactcatttcttccccaaaataatcccttacatttgtgagcaactctatgtgttgctttctcatattgaccaccacttttacatattggccctagctctatcctctgaggttagaaagtaagtgtactctcccacacgtaaaacccttcaggaaaaactcttgtcaggcttgctttctacaaaattcactttttacaaaattcacttttttcccttttgaaaaccatacacatcttggtcctttggatactttcttttcctgcctttagttaactctgaatatccccagttsaaatggttgtagtccactcaccatccttatcactctgaacactccacagaattgaacccagcactctaggtgttctcacagcctaaaactgcattagctatgggcagccccatcactaggttaacccatgtggagattaatatcatttgaaatccctgtctgcttcacatgtgctattgttcttaaaaatacactggccttgatggttgctttttggacccmctagcagtgttacaactaggaaatttcatgttttggggtgtggactggyattttagaccyttggaccctgattctgtctaccagtgcatttgctgttttcaagccttttgtcatccatacatttgatcattgttctcatgtgattcttcgtttaaaaaaatgttgaacaagccagagctaaggacaaagacctacagcaaaataatataaacccctctgaagaaaaagatcagtctgttcatctatactggttatgagtcttcccactaaaactcaccaggcccatatttctaaatctctgtcaatcgttttaatccactatttgccagtctttcaaacaattcactgcatcaccaagggttttatggttattttgctgtgacttattatacgaatcagtgcttttttttaaaagtaactatgaatagtccattgatactccattcctagaatttggttcagaatcaacataaagattctactttacaaaattcacttttttcccttttgaaaaccgtacacatctcctagtggtcatactggttttttggatactttcttttcctgcctcgtcagaactttctgtaattgcaggatttcctaagagctttcaacctccttgagtcatctttccaatgagtgtgtcaggccttgaagtcgttgtattggtttcctagggctaccgtaacaaagtgccacaaattgggtggcttaaacaactattgtctcacagttctggaagctggaagtccaagatcagggtgtcagggagttggttccttctgagggctgtgaggaggaatctgttccatgcctttctcctagcttctggaggtttgctggccatctttggcattgcttggcttctggaagcattacctaaatctctgccctcatcttcacatggcattctccctctgtgtctggctccaaatttctccttttataagtacaccagtcatattgaattaggggcccattctactccagtatgacctcatcttaactaatgatatatattctgaggcactgggggttgggatttaatataaattttgggagggggacacatttcaacccattacagccatatatatcatttttctgaatttttagagtactattattttaaagtttaagatacacgcttcgttcttctcatcatttctttctcagtgaatttgaactaaaagatggtacagtgatttttttcctaaggttcctagtatttcagttgctaagcactcttgtcagaatttggttcgagattgcatttccccttactgctttatttaccatatgaaagtttacattgtcagcaaggaaagtcagtaatttttccactcaacttttagacagtgcaactttcagcagatgtctagttaattgaaaccctcccaccccacaacctsatcttgtattttgccattgtacacgtcaccatgttatccattccaacatttggccaggtggcctataatataaattgtagctgcacagttgtctcctcctattatgttggtactcaaggttcatagattttcaacaatctttttctttttttcttttttttttttttttgagatggagtctcgctctgtcaccaggctggagtgcagtggagcgatcttgatcttggctcactgcaacctcagactccctggttcaagcaattctcctgcctcagcctcccgagtagctgggattacaggcacgtgccaccgtgcccagctaatttttgtatttttagtagagatggggtttcaccacgttggccaggatgatctcgatctcctgacctcgtgattcacccacctcagcctcccaaattgctgggattacaggtgtgagccactgcacccggccttaacaatctttttcaactacactatcttcttttttaacactggcctccaactcttggcttcttttatacaagggaattcccagtagtggttatattcttatgactccattctttgctaatcctaaaggcacccagaaggctgtatttaccttttcagattaaaatctcctatttaacttatgaccactmtgtgcatatctgaggctataaatattatttctgacacccttctcaaatactttctgctgaaaattactgtgaatttggcttgtttccttatgacagttttttactcctaaccaggtgcttgtcattatggtatcttaagctaaaatccagaaacgcaaatctcattcttttactccatctcttaactcttcactcctaaagcctccaaaaccttgtgaagtcccagtgataaactggacaaagagatactgctgtttcctgacaccttcaacattctctgtgatctctagagctgctttctgtgtttcttctgatagtgtcattccttctcaaagtaggacgaatgaactgaggcaagcaagttaagggtctcaaaagattctctgttatgtgaacataccaggcagacacacatttagactggccagggcaagactaggtataaacatgcccatgccttgcaagtaattcatttccttgtaccgactcacagtacagagtctcttcattcttccagagttagataccactgtgagaggagcctcctatcatttaattcttcttcttctttttttttttttttaccctaacccctagttcttcttcctagcctttttctttttgctcccctattttcacaatttttttcattcttttcattgtcgtacagtcttagttccaagttttcttatgttatttccactgtgtgtctctcctggtctgatgagccagggttaaaattgaccttcacctctttttcagtcagggtgatcactttgcattcagcatgcatgttggtgagttcctaatacaagggctgcatccttttttacctaagaatcattttaaaagcaagaagtgaatagatcacattgtttttcatttaaaattaaagtagcatttaagcccaatggggaaacacatatacttacaacttggataaatttctttgttgagtagaaaaatgccttgagaaaattagtactgcctctcaaataccaaaatataatagctgggtatatttgagaagtagccacttggaggcagctttttaatttttcatcctttacattttaagtttttctccatgtattattttattcttgaaataacctccaggatatgtatttaaagaggcccagggagattaagtgacttggccaaggctgcatagcaaatattagtataactgggactagaattagttcagtgttgcatcgtatcagtgcagatatatttactgaatacatctagtgtctcatgcactgggccaggtataagatcacagtgatmaataaggccccacatgtgacctaagcatctcttttccctctcccctttcgtcagaacagagtagaggaaataacaccagtrcttaggaaacactagttctctgaacagtaacgcattcctatggggaaaatgaactgtgtcatatcttccctgaagcagtccccttagccggttcttactgattgggtccaaggtcacatggttcctcaggaaacaatacattaagagtttagtggccgggtgcggtggctcacgcctgtaatcccagcactttgggaggccgaggcgggcggatcacgtggtcaggagatcgagaccatcctggctaacacagtgaaaccctgtctctactaaaaatacaaaaaattagccgggcgtggtggcgggcgcctgtagtcccagctatgcgggaggctgaggcaggagaatggcttgaacccgggaggcggagcttgcagtgagccaggatcgcgccactgcactccagcctgggtgacagagcgagactccgtctcaaaaaaaaaaaaaaaaaaaagagtttagttacattctaattcaaaccatagtcccactacttactgtgtgattaagcaaattaggaaacctcttaattctcagtgtcttcatctttaaaaaataatatagacttttaaggtagttatgaggaataaattaaatagtatatgtaaaacatttaacttagtaactagcccatagtagcattttaatagatgttagttgtcattattattatagttattgttatcattgccattgcctaatactctgctgaaatgggaagaaagtcgacatttgcatttaaattgctttgagccttactgatctaaggcaagagatagaaggcatatgccctaggtttagccagtgactttcaaacttgtttgatcatgactcgcagtaagaaatgtattttatatttatatgtatatatacccattcattttatatcacaattcaggtagtactaaggcacatgcaaaatgtataatgtatacactaaaacaaaagttctgtgaaacaatattcatccgtaccacatgcagtgctcattagtattttcaactgtaatgtttaattttgaaaaaaatactgatttgacctattagagtgatttcccaagccactaaggaggatcctgcagcttggaaaaacacagcttgagacgttttgctggtgttaagtgcccaggacatctagaaatcattcaggaaatctaagtagacctcaccaccaacaaccaatgcggtagtctaattcctttggttaaaatgacttccagatgggattagaattctcaaagctccctgctggccccatatcagtactggccattttatcattgcggattttctactaattggccaaaacttggcagtttttcattgatgagcctctgtttgggggagtccttaatattttttgtttaatacccccttttcactctttcagtgcaaataattgggttgaagatacaataatgagtcagaacagctcacaatgtattggtttgcaaaaagtaaataatcaacaaattctttgagtgcctgtatttcaggctctcagcatggatacgagaataaacatgattaggtgcctgccctcacaagcacatgtaaaccaaaaagtacctgagacaggtctcaataaattcagaagtttattttgccaaggttaaggactcgccctggagaaaggtctgtgcctttctccaacaatgattttgagggctttaatatttaaacgagaaagagggagggtatagtaatccacatgttgcaagaaaaaaggagcaggtaggggaatagtcaattatgtattcatctgtaaggtaaagtgaacataccagtagctacctgtggataagtttaaccttttaactgtagctgtttgtttaggaacaaaaggaaaagcagcgtcttgttatgtctcacctttcagcctaattttttccttttgacgtagtgaactggagtcctgagtttttattttcctttcacacacacaatcttgtagagtgaaagaatatacagataatcgacacaatgtgatcaaagttcaaatagagctcctcagcttgggagcagtcaggaatgcctttaagaggtgctaatattgtatctggatcttaagggttaagtaggaatgtgtcaggtaaggaaatgggggaaatcattccaggcagtaagactagcataagaaagtgtgatgtgttaagggaacagtatctcagaatcaggaactactcaagcatcactgtcatcatcttagtgtcccatattcaataggaaagttcaaaattttggcagaaaggagagcagtcagccaacacagaggaggccacacagtgtgycttggcyatgtcccaagccttcgttccatcttgcagtcacattctctgtctgtcatcagccagcacctctgcagcccttactttctggcttcctttggccaccagagccatcagtgcccttcattttctgcttccaaaggagtgaagtgggagtgaaaactcacttgtaatgatttttgttatgtcatatgttatacacttttgcattttataacttaatactactattaaagattgtaatcctgaataaatataaaatcatttcttctaattgacttgagcaatttgtttgcttggaaagtgctaaaactgctcacaatttttggtttgccatcatcataaacccctttctgttggaaaaaaatatattactcaaattacaaaactattatctctaatactgcctgtcattttggtgcaagtagggattttaagagaagtcattacttcagtcatcacaagctgtattattagtgatattgggtattgtcacaggattatgaatttttgctgctcgtaactaattatggaaaataaatataatttccaaatgaaaagagaagaaggaagatagcgtggcaatgcttaatgctctactgcaaaaacatgcccttagttattccaaatggttgctagagcttcattgtttcctggtgtgatgaccttgctcaaagaacaaacgtgttgtacaacatgcagcattcgccattctccttcaatatgaggaccaatgtattcctaacattcacccatacacaccccaaattccttaattttattataaaaatttgtttctgactgaatgacaatcttcaaaagcttcttccatttggtataattttttagtggcaccttctgctgtgtgctgtccatttcattgtgcttatagtatttataaacaggtgctgaaatttcatttaacaggtactcaatacatcttttttttgtgactgtgcagctttttgtttgttaattaaatcttctacttttattatatttacatttttcccctgctaattttaaaaattaaatagcctattcttctcttactcaatctgctctgacatttgctgctatatacattttatttctctttctgtctttaatcttacctaccagtgcatgggtacagagataaatgttttactcagtcaaatcccaaatcttcagctaagggaagagtccataatcaaggtactgtattatgtgtcctgatatatcactcttttaaaccatcttcatgtgaaactacatatgttacaagtaatttttttgcatttgtaaaattatatcctttattctcatctgcattctgaatttcctctgattccatttacaaaaaaattaataattgccataatgtctaagaaaacctcgtaaactacgtagaaagattcatgcagccgggtgtggtggctcgcacctgtaatcccagcactttgggaggctgaggcgggcggatcacctgaggtcgggagttcaagaccagcctgaccaagatggtgaaaccccatctctactaaaaatacaaaaattagccgggcgtggtggtgtgcacctgtaatcccagctactcgggaggctaaggcaggagaatcacttgaacccaggaggcagaggctgtggtgagccgagatcacgccattgcactccagcctgggcaacaagagtgaaactccatctcaaagaaagattcgtgcatgtgaagctgaaatgaccaataaaaacttttcttgrgaactggtctcctgaccccgtaaatgcttataaagagaaagagaagcagatgtgacatcatggtgacttctggtcacctagaaacatgactttaatactaggaaaagactaaagcttctcaaacaggctttctagatctaaagaagaaaacccacttgagggaggcagtaggaaagtcctgtatccctgtgaccccatcaatgagataaacaccacagttctacaggcatttatgagggcctcttgatttgaaggtgatacagtgctagtcaaatttgagaattagtacatgcctttgtgtctggatgtttgatatttaatagtctcacttgcatatagaaatccttgatttttctaattaatataactaaggtcatcttatctcattgagactctgctagcattttagcttgccctttctcttagaaggtatctgcttctggctgggcgtggtggctcatgcctgtaatcccagcactttgggaggctgaggcaggcagatcacctgaggtcgggagttcgagaccagcctgatcaacatgaagaaaccccgtctctactaaaaatacaaaattagccaggcatggtggtgcatgcctgtaatcccagctactcaggaggctgaggcaggagaatcgcttgaacccaggaggtggaggttgtgatgtgctgagatcacgccattgcacaccagcctaggcaacaagagcgaaactctgtctcaaaaaaaataaaataaagatataggcttctgactgtacattttattcatttattttattttattttagagacagtgtcttactctgttgcccagtatgtagcgcagtggcgctatcttggctcactgcaacctccacctccagcggtcaagtgatcctcccatttcagcctcccaatacaggtgtctttttgtagtttttttttttttttttttttttttggtagagacggggtttcaccatgttgcccaggctggtttcaaactcctgggctcaagcgatctgcccaccttggcctcccaaagtgctagtattacaggcatgaggcactgtgcccattactaaacttataattctcattcttcatggatactgaaaaatataatataatcttgtttagaattacatcgttttggcatgatatacaaatattaattccaaatccagcttcagattttagtagacttatgaagtttctatttcatatctttaaatgtcatgttaaattgaccaaataagcagaagaatgttccttacttttttcatgaagccctgagaaattgcataactcagcatttgccttcctagactttattagtacctcctgccagcatgttttgttttcagtatcaatgtactgtttctgcttaagatcttagtatttacttttaaatcctgaatttacatcaaaatataaaataggattgatttgggggatttgctaggtcattctgaggctaagattgtgtgattttgaaatgctatattggataatgtttatgttacagaagtagcaaatgaccatatgacttacggtttttagattaatcagcttgctatgacctctaaaactgtagctccagagcatgcacctttttccttagttagtggcattcccacattagattatctcactccacgactttggcttttgtgaaggtgtgtgggcaagtcttcgctctagcactcgcttgatcagctctccaacatccttcattgatgttggcgcccggctggcaggcaaggatcactcggcctccttcagtaacagcagctacctacaaaaccagctcttgaaacrgcaagcagccctttacatatttggtgaaaagtcgcaactaagggtaagatttcttttttctcacttagaaactttatggatacgctagggctgttgataaaacctgtatcacaaaccagctttgctagaattttttttacagcatgattcttaacctggagttaataatctcaaaaaatttagctctccttttgyatttatttatatatattaatttttatatcaatacatgtatatacatatgcatatttattagccatgaaaataaatatttattcataatagtaaaaaatcaacataaacatcaggaagcgtacatacatacaaaaaaaaggaataaggcttcatcaggctgtgttttcaacagccttgattcagtttccacaggaatctgcccatggcaaaacagatagttttgttatggtaaacctaaagcaggctacagaaacatagaagaatggagagaggaagactgtggtaccatgtatggaggcaaggcaaggccaagtctaggttttctgagtaacacttgttaaaacttcgcaaagctatatagaaagagacacatgtcctaagatgtgtcagaaaattcaaaatactagatgctaatcaactttattcttactgttaaattgttgcgctaaagagcttcaccatgctgagggcccataaattgtaaagatggtcttttcctccaaaagcaacaacaattccttgaatttaatgttttgcaagtcacacattacaaaataaatttcattactaccagtaggtatataggacatgaaagttatctgttaactcagaaatctcaacgtttaatccagtgctccagttggcactggacaacctagacagacctctggctgaaccgtggagcagaaactgtgagcagggtgccattagcaagatcccacatgcttggcccttaagatgccagtaactgagtcatctcttctggagcaggctagtggctttgctagctcttctcccactgcctggactgctgcaaccacttagtcactaacctttagggtagagggcataaaactgctgggtaatgctcaagttttaaatctgcatatgtgtcttctgatacagtagataattttatatccaaaaaatagaacccttttctacagcaatccagggttgctggtgccagtgtcttttccagagcacagactttccatgcttcagcacaacacttactcgtgatccgaatcactctccgaggtttagctccttaatactcccctctgccattctctttgcacataatttctcagattagctatgtgatcatacgtatttgagtaagaaagagttgggatgctgcctttttccttccctctcttcctcctgccctctttttctttctgtctgcccttcctcaataaaatattattattatattttttttaagtttttgagatggagtctcactctgtcgctaggctggaatgcagtagcatgatctcggctcactgcaacctccacctcccaggttcaagcaattytgccccagtytcctgagtagctgagattacaggcacgcgtcaccacgcccagcttttttttttttttttttttttttttttagttttagtagagatggggtttcaccacgttggccatgatggtctccatctcttgaccttgtgatccacccgccctggcctcccaaagtgctgggattacaggcgtgagccactacacccggacaagtattattatttttaaaaatgtaatcccaccattctggcacaatagttgtcagctattctatatattccattcaggttttatcttttattcaattttgtatgtagaatatggctctgtatctgtctgatatgtgccacattctagcttgcacaatgccatccagttacaattccatacctttttctcccaacaaagaaacatgaaagccaataaattacagtgacttattctgaaaataatcttgaatttggcctttacctaggtaaattcacatactttaatactttattattaggaacaaattccttacaacctaatggagtgtytcaatactttggttagtaactcctggtttataagataagcatacctagctcatgtatagttgggaaataggaatctrcctttcctgaaaagtaaactatgttttgtctattataagtttttaaaaataatagaaaggaactcatgtatatcgctaggttatttatctgaagccttaacattatgtttccatgtcatatagtcttcataactattttagtcactattcatcccatgttgttggatgtttaggtttctttatcwtctgtatataaaattacagtcacaattccaagcaaataagttattttgttattttttttaattgagataccattccctgggggttttttcctattagattatttccttagaatagcttccttaaaaatagaattattaagacaaaggaaaaattataaaatacacataacaagatttaccatcttaaccatttctaagtgtatgactcagtattattaagtacatttatgttgctgtgcaaccaatctccagaaagcagttttaatcttagaaaagcagatggtccaatagagtaatttgggcacaatgaaaagaaagtggaaacattttgagaaaattaattcattctttggcatgaaaagttagaggacttttaaatcttcttcagagctaggcaaccaggttattaaaatgaaatataccagtaggccatcagtatagcattctttaattgcaaatgcaacactcataccacacacaaaataaattccataaggattaaagatgtaaatgagaaagtactcaaataaatataggttgatacatatattaagtgaaaaaatattatcccaaagatagaaatgaacaaagcctttcgtggtttttttatgtaatttttttttttaaggtggagtctcactctgctgcccacgctggagtgcagtggtgtcatctcagctcactgcaacctccatctccggggttcaagtgattctcctgcctcagcctcccgagtagctgcgattacaggtgcctgtcaccacgcctggctactttttgtatttttagtagagatgggatttcaccgtgttggccaggctggtcttgaactcctgacctcaggtaatctgtctgcctcagccttccagactgctgagattacagtcatgagccaccgtgcccgaccatgtaattttttattattgacttttaagaagtaggactgggcgtggtggctcacgcctgtaatctcagcactttgggaggccgaggtgggcggatcacaaggtcaaaagattgagaccatcctgggcaacatggtgaaagcccatctctactaaaaatgcaaaaattaactgggtatggtggcgcacgactgtagtcccagctactcgggaggctgaggcaggagaatcgcttgaacctgggaagcggaggttgcagtcagtcaagatcgcaccattgcgctccagcctgggtgacagagcaagactccatcccaaaaaaacaaaaaaataaccacaatgttggtagtcttggggcagtaagaaagtgatttctatttctttctcaatatttatctctaccttttttcatttttattatgaatatgttttacttgcataataagaaacaaatatgtgcatatctacaaactttaatacaygtacagtctggaactccaacagtgtgttacctatcccttaccatatacatcttgggaagacttagtttacactgttggagtaatcatactgtccatgtatcattagtttctctttaaacttccaggttcatggccttataattgacttatatttggtattatgagctccatcaagttccagtctaccagtaggctcttccagttctcagaatgaacgcattcttaggctaagtaatctacctctagtaaggactagatttgccattctgggcaaaccactagcttgtactgaatggctsttcccaccaacactgacacattgcngtacaagattgactttcttgacccattggcagcctctgcagctatttggccccaaataactttgtcattatgcactgccccattggaaacatcactcttttacctatagcacttcatctgcctaattctctgaatcttcatccgcagaacttcaaggtagaatttgctttaaattgtgagtttgttcctgttgaatttcatgaaatccggcaagtgaaagccagttttaagaagctgatgagggcttgtatcccaagcaccatccctactgactcagaagtgaccttcctgaaagcgctgggagattctgagtggttcccacaggtaatgtctgaagcagcttctttctttataactcaaagaaacagaggcccaagtagatatacagaactgtatttgagaaaaaaaatacttygttcccctactccccaacattctcctccttcattgtgtgccatcagtaaaggcctttcagactaaggaaatcatctggtataggaggtgagggagtagaagtcttgatcgctgggtttttatctctgtgtatttaaaagtttggtatctataggacactaaggagaaaattatttttagatggaaatctttgatgtaaatttaatcagcatgtatttacagggctcctgctctgttgtcaatacagtaaggatccagggcagagggcaacttctgcatgactcccaagagctctcacctttcatttgtctgcctatcccaggtctctagattttagatccaccccacactacccaccaaaggcacactggatgcccccaagcctacctaaggcttgaaaaaaaaacacagtgtctatcatctttcagttcagtcaactttgggatattcttaattgaacttttattgagaaattaaagggccttgtctttaagcccctttatttcttatattgcccaggctggtcttgaactcctggcctcaagtaatcctcccaccttgacctcccaaagagctgtgattacaggcatgagctgccacgcctggcccccattatttgttaycaccttgcagaaattcccagtcccctgcctccatctacctccaagcatcctgcctcttgtttcccacagcacattggactaaaaggcaaaaaaaaaaaaaggaaatgatgtcagtactcagggctgtgactgttctcaagatacttaaaccaaagagaaatgccgccacataaatatttggctataaatgtatcatgctgtgttcattattattaaggcaatttagggtgctttgcatacccgtggaaggaactggtcgatactcccttctgtccccaggctatgagccccagctccaaacggacccctccacccaacttatctatccatgtttctgatacattctgtgctctactctttgctagaaagtggacctgtaccaaaagatagggactaaagacagtggaaaataattgcccacttgggatattgacatcttaaaagttaactcttaaagcaaattctttttttaacttttattttgtgttcaggggtacatatgtaggtttgttgtataggtacattgcatatcttgggagtttggtgtacagattatttcatcacccaggtaataagcatagtacctgataggtagtttttctatcctcaccctcctctcacctccaacctcaaatacgccccaggcgtctattcctttctttgtgtccatgtgtactcaatgtttagctcccacttataagtgagaatatgcagtatttggttttccattcctgtgttagtttgcttcagctgtgttactgcaaaggacataagctcattctttttatggctgtgtagtattccatggtgtatatgtaccatattttctttatccagtctaccgttgatgggcatataggttgactccatgtctttgctattgtgaatagtacagcactgaacatgtgtgtgcatgtgactttatggtagaacaatttatattcctttgggtatatactcagtaatgggattgctaggtcaaatggtaattctgttttaagttatttgagaaatcaccaaactactttctacaatggctgaactaatttacattcccaccagaaatgtatatacattcccttttctccacaggctcgccagcatctgttattttttgactttttaataatagccatttcttagaacaaattctgagcccaaaagaattcaggcctggtgatagctatgttgtagaaacagttacatgaggagcttctcattactgagtagggcatttgccttattcctgtgtttaaagtagcctagctctgtttaagagatgggttttttcatttttgttcttgttcagagttggattcaaattgcaaattatgtctgatgatcattaaaatattttttaaaattacaatgttatacatctggttttaaaatctatatactattctcataccttaattgtttattaaggactttgagccaattgatgtggctttaaaaacttagcacaaatatattgaaagtttttttctcatttagtacacagtatagacaaataggagtatcttttttatttttatttttcgagacagggtcttgctctgtcacccaggctagagtgcagtggcacaatcacagctcactgcagcctcgatctcccaggttcaagcgatcctcctacctcagcctcctgagtagctgggattacaggcagatgccaccacgcctggctggtttttgtatgttttgtagagatggggttttgccatgttgcccaggtggtctcaaactcctgagctcaagcactactcctgcttcaacctcccaaagtgctgggattacaggcgttgagccaccacacccagccaggagtttcttttttaacatataattcacttaccataaaatttatccttatgataaaggtgcacaactcaacgctttttggtatgtccacaacattgtgtaactatcaccactatctaattcccaaaaaattaagaatacctgaaataggccaggcgtggtggttcacgcctgtaatgctagcactttgggaggctgaggcaggtggattacctgaggtcaggagttcaagactagcctggccaacatggtgaaacctcgtctctactaaaaatacaaaaaattagccgggtgcactggtatgcacctgtaatccaagctactcgggaggctgaggcaggagaatcgcttgaacccggggggcagaggttgtggttagccaggattgcatcactgcactccagcctgggtgacagagcgagactttgtctcaaaaaaaaaaaaaaaaaatgtctgaaacaaaacttactacatcatggaaaaacaaattttaaatccaataaaattcatctgaatttccgtcttttgttgggaagtccacatagaatctctgttttttgtactctatggaattatagctcacctacttttgggggaatcatgtaaggtaattttatttcattatgtattactagaatgtattgttttaaaatgtgtctacttttttgaagtgtcattttgttgttgttttcattgagatggggtcttactatgttgcccaggctggtctcgaactccgaacctcaaatgacctgcccggctcggcctcccaaagtgctgggattatgggcatgagtcattgcatccagacaaaagtgtcattgtttaatcttgatttgaaagaactttaggtatttaaaacattatgtggttcttttgtgcaagcgctttatccctaagtcgtttgattatccagggttgaaagcaactctctctgacttctgcaytcagaaagcgcttggtctaattgtgttctccttcctgtctcttagcttcacaggataatgcagctggctgtggttgtatcagaagtacttgagaatggttcctcagttttggtctgtttggaggaaggctgggacatcactgcacaagtaaactattagacatattttttgatattttatatttatatttccatttggtcatttttaaattcttcagatgactcttttgtataatgactaatgtgtttatggacagagaaagtcctgtgttaaacagcacctggtatccatcagaaaactccgtaccatgagctcttagcccctacgcagcctggagctctggctccgggcatcaagctctcccatccacagatgtaccatgcaggcttgcggatggagcccttgaccagcagtgtgaggcgtggaccatccttcctgggttttgtcagtccatcccctggctctctataagccccgccttaactcactccagagtgaaaagtgtgagttcagactacattaagacattaatctgcatctgccaaaaagtagaattgattttaactgatcctctggcctctgattaacttaggaaaaggttgctgtcagcaaactggccagttaaggattaaagtctcaattccctgaaagtaaacttgtagccaaaatgaatttgagctttagtttttactggcaagtttacaaaattaattttattggccatcctggaatggttagtgaacaaatttgctgtccaggtaaatttgtgaattagctatcatcagaaggaagtgcttttatcttagtaataggcctttttcagaactaaaattaatgacaatccatcctgcttatgccctaggtgacatccctggttcagttactcagtgatcccttttataggacacttgaaggcttccagatgttggttgaaaaagagtggctctcttttggtcacaaattcagtcagaggagcagcttgaccctcaactgtcaggggagtggttttgctccagtcttcttacagttcttagactgtgtacaccaggtaagtagagcaagcttgagttgacttgatatgaaggaaagaacacaacatactagcattgatggagcattgcgatggtgtgcccggtaccttcctgtcataactctgattaactcagccacaggacatgctgaaatcttagcagtagactcctaggaatggaaaagaaaaaaaattagttggtttctgaaactaggacagctaagctggctgttgggcttgcsccaagtgaagtagccagcactctaaatgaccatcttcaaagaagagaagcaaacttgggcttattacctaagaacaaaatctctaggtaatacgggtcctgaaatcgagcacatggtctgcccagtttgggaggaccccagcttgtgcctgggaacataagaggtaaagcctaacccctggagaaataatcagggcccagccagacaggcatacaggcttgagaacactggtcacttctaccacatggagaaactgtggtacatatataccatggaatactatgcagccatacaaaagaatgaaatcatgtcttttgcaatgacatggatatagctggaggccattatcctaagcaaattgatgcagaagcagaaaaccaaatacctcatgttctcacttataagtgggagcccaggtatatccattcaaatgcagtgagggtaggggagatgtgactgctctaggctccctcctgccttcatcgcaggcacatcagatacagacctctggatggggccttggtcaggattgggtttgagaattggatggcactgagcttgcaagttgaagactgaattggcctaggaaaagcaggcctatttccagctttcatttgaccacaatcccagggttggatgaatgggttctggcatgtcaaacatttgtgggaatggtgagcctctttgaaacacactggcctcaaatatcgattggaaagaaaggcagaactatgttttcaggaaccagagttgaaactaactgtgatgacaccaagttagtatgtggttatgttttattttgtttttattctagtaatcacttgatcaactttccagatcactacataatttttgtaaataacagctttattgaactatatatatcatacaattcacctatttaaagtgttcagtggttttgaatccattcacaaagttttgtaacaattaccacaatcaattttagagcattttatcactccaaaaagaaactccatactcatgagcagtgactttccaacctttcaccccacacacaggaagctatgttttttactgctctaatttacttattaaagacaagaccgattgacgaatttcaattgatctgtccaagcagtaactggaggagctggtcacaaggttaagcatgtacctttaaactctttgcagcaaagagtatactatatttgtkttctgtttgaatattggcccttttattcatactccttttggcaaatagatgagggagaagtttggagaccattgtctctgaaacagaaagcttacctgaggccaaaggagaggagcaagcatctatctcttctcacttctaggcaggtgaaagcatatgagttcttcatgaaagcacttcttatcttgcttttttattatgcttatcaattggactagactatttcctgcctccgtataccaccattactaacaatrattactaatttgtgtcgactgcttactatgtgccaggcactgttctgagcactacacatgttattttagttcataattctttgaatcttttgctgaccctcacgctcccactttatatgtatttctaatgagtcaggtatagacttctttgataacatctatagcactaaagtatgtttatttgtatgtaactattgccctctacttagtctgagaattcttgggaacagggactatgtcatactagtcttcatatccctagtatctaacacaattacagtttcagtctctggaatataatagacaataaatagataatctcaatgaatatatgagaatttgaaagaccacaagtcttgttcatgctcttaccacccttcatcaagaccatctagaatatcctggtcgggcgyggtggctcacgcctgtaatcccagcactttgggaggccaaggtgggtggatcacgaggtaagagatcaaaaccatcctggccaacatggtgaaaccccatctctactaaaaatacaaaaaatcagccagacgtgggggcgcacgcctgtagtcccagctacttgggaggctgaagcaggagaatcgcttgaacccgggaggyggaggttgcattgagctgagaagcccccactgcactgcagcctgggagacagagcgaggctccgtcttgggggaaaaaaaaaaaatctagaatatcctaagtagaattgctggcataatcttccaaaagctcagatacaatccttttattcccctccacaaaagtcttcaaagcaaacaaacaaaaaccttcagtggctccacatttcctaaagaattacccttccacatatccratttgaatataactggggggaacccaaatgtctgtcctacagtaggtgaatggctacacaatctgggatacatccataccgtggacgactactcaacagtaaaaaggaattactggcacatgcaacaccttgaagggatctcaaggacattatattgaaagaaaaaaaaggcaatctcaaagggtccaactgagtatgattccatgtatataatttttttttttttttgagacagagtctcactctgtcacctaggttggagtgtagtggtgtgatctcggctcactacaacctccgcctcccaggctcacgcagtcttcccaccttggcctcccaagtagctgggaccataggtgcacaccaccacagctggttaattttttgtatttttggtagagacagggttttgccatgttgtccaggctagtcttgaactcctgagctcaggtgatctatctgccttggccttccaaagtactgggattacaggcgtgagccaccatgcccagctaatattttaaaatgacaagatcataaattattggttgccagattcaagatagtgggggagaaggaaatgagtgtgactataaaggggtagcatgaaaaacaaaccaaatgtccatcaaccgatgaagagatgaacaaattctggcatattaattcagtggaataccactcagcacacaaagggaatgaaatatttatattacaaagactgaccaatcttgtgatcactatgttcagtgaaagaagccaggcagaaaagactactacataagtttatttatatgacattctaaaaagggcaaaaccatagtgactgaaagcagatcagtgactgcctgggaccagtgaccaagggaggggatcaatcatcatgcaaagggcataagcaaacttttcagcgtcaggaaactgttctgtatcatgattgtggtgatggttacacaactgtgtacagtgaccaaaactaataaaactatacacttaaagtagggaaattttatttttaaataayamttcaataaatctggaggaaaaaataataatctttaattagtaagtccaacatctcagtaaactagagttccagaraaagaaaacagcagctaccttgtttctacggagaagaatttgtctggggcccaraaagtacttgtaggtctggctgcttgctttatggaaacagggcaggaaataggtccagggaaatcccagttcagtaatgcaggcttttcgttttttccatgctattttcagtgtttccactaacccagttgtgtctggtgttcccaagtctagagcttatcaggtttgtttttttgtttgtttgtttttcagaaaataaacctccgatctgttgctctgaaaagggtaatcatatgactacatggggtgggaaaggacctggggtcctttcctgcctccatagacttccagctagtcccacgatagcctccatttcacccctgcattactcaatacttgggcctctgtgccctgagcctttctgggtttacacagcaaatcgttaccttctcaaatcattttcctcctggcaggaatcccagtatagcttctcctcttctatcatttactgctattcttccttctattttccatctttcaaaaatttgctgaattgctttggcccagtgctgtgtttcctcccattctccccactcccttttgggttttttacctcttaaaaattcctttaatgtgggaggattccaggggaatgagcttgtacagccaaatctggcttaagttaaatggactacttaatatgttaaatctctatgttcaacttgcagaattctgcacacctaaacattaggktcagcgaaataatccactcacaatcagtaagagataggaggttctcatgtaagatacactgtcctcaaagatgggaacatcattgtctcccaagtacaataatccttacttggaatgaaattcttctattttattattggggatggggctgggggggaggagtgggagaggtctagatgctggaaggtaacctgtattctgtgagtaccccttaagtggtatgattaaagcaatttaacatacactaagatgtagcayaacttacattcctattatctttagaatacaatagatgctaaaactacaaaagsctaagttaattaaaacaatttggggtatatgcttaatttctgctgttttgttttatttactaatcagctgaatttaagattcatctgtttttttttcaagtaaagagttaaaattcaaatgttttatataaaccagttgattctgaaatcaaaaacagaagttaacttttaattaaagttcgattatttgtaggtgaatgcttcacaaactgtaaaaagtaatattgttcaggatctagagaccctatcagtatgacttcaaatctggctgtgccaaattaaaattttttaaattaaaacataaatttttaagaatttgcctgaatcctcctttcacttaatacctcatacataataacctaagtgcagacaagtcatagcaaagcaagcatatgaccttaattgcagtaagtaaagcatgcttggctaccagaggtatcagctttggtgatgcaaattattttgtgctgaaaagggattgtttattcactcaaaaacagaggaatctaagaagactatagttagcaaatagtttttctgactcttgctgacttaattataaggtagtgtttcatcatcttcgacatactggttttaggcattagaaaatgccttctttgaatgcctttcaagtgaacactagtgctttacatgactctggcttttaccagataattcgaattagtgctgccctcagtctctcagggacacacaacagaactaggcccagaaacatcaaaaaaacaggttcaaaattacacagcagcaagtgaagctttcccagatggaatgtgttccctgcttattaaccatttctaacattgaatgccaaaaggcagtccatggacatatgcctaggcttgtccattagtactaataaagttacaagaaaacagatgaagcactgaacttaaattagaactgcctcatcatataaaaagccattgtttacgccagtatatccaggtgtcaaatgaattataaatgctagctcactgtttcataatagcaacatctggcagattttttgcttctaaaagaaattggcttagctcaaatgatatcattacaggactcccttttcttaaaatagttgagccaaattaaaaaaaatccaatatacaaagattaaatttttatgtaaactttctttttaaaatataatatcaggagaaaacatgaatagtatgaatgaaaacgtgaagaaagcatcccctttatttcggcattagagtaaatctttgagggcatcttagaactttttcagtattttttactgtgatttcaaagtttattcaaattgtaaattgattcactttggtctggctttatgtgattctcctcatggttaccttatgacagcactatgctaggtcctaccccaaagaaaaaagctatttgccttttgaagatatgagccttccttgtgagcacatatgtgagcagctaagctgcccccacacaggttggttattctaaaatttatccagtaatattggcaaaatagctgtagctaatggattgttggtatattcaagagtttctgctgtctgctgcctattcaactgcaaactggcaaaaatgaacataatccaatctgttttataacaaggcaattttgcatcamagcttaatatttaaggccatgtaatatggaaggatgtaacacaaagcacacaatgtttgttaaatcttaatttgtgaaataacaaaaattaatattagctatacactctcctagggtctgtttaaccatatccaggttttcacgtgttgatgtatagtgtctcttgtagctcaatatttataattctgaaagcagaatccagttttaatgtattaaactttacttccaaaatgttgatctttccaggggtttgagtcatagcttatttttataggcctttaaattttacaaagtacttaatggcacatgggcaaaaaaaaagaccctataaattcatgtttctccaaattccatttcagattctcttcttataaataagtgaagttggcaagtttcactccataacggaaaaacaaaactaaaatgcttcatgcagtttagtcttttaagtctgtatactttttaacctgcaacaaaataaatacaaaattattttgaacaacaaaatccagatgatacctgagagaagcctaaaactctattcatcaccatacttagggaaatgctgacatagaattaatttattagctgaaatacctatcattcccaattctacataatataataaggctaaatttatktgaagcacacttgcctttaggtccccaaaatcttgtggccaacaataaagaaaactaatgaaaccaaaagctgttstttgagaatatcaataaaattgataaacctctagctagactgcttgagaaaaaaaagacacatattaccaatataagaaatgagaaagatgacgtcactacagattctacaaatattacaaggctgatcctgggtatggtggctgaagcctataatcccagcattttgggaggccaaggtgggttcacttgagcccaggagttcaagaccagcctgggcaacacagcaagaccccacctctaaaaaacataataaatactttttttggcyaggcacggtggctcacgcctgtaatcccagcactttgggaagccgagacaggcagatcacgaggtcaggagatagagaccatcctggctaacacagtgaaaccccttctctactaaaaatacaaaaaaattagctgggcgtggtggcaggcgcctgtagtcccagctactcgggaggctgaggcaggagaatggcatgaacccgggaggtggagcttgcagtgagccgagactgcgccactgcactccagcctgggcaacagagcgagactccatctcaaaaaaataataataatttaaataaataaataaatactttttaaaaatccctgttaagcaaatgaaaagaccaatcacacagtgggagaaaatatgtgtaaaccatatatttgctgaaggatttatctagaacacataaagaaaccttaaaattcaataataagaaaacaaccttttttttttcctttaggatggaatcttgctccttccctgaggctggagtgcagtggcaaaatcttggctcactgcaaccctgcctcccaggttcaagcaatcctttcgcctcagcctccctaatagctcagattacaagtgtgcacaaccacgcccagctaatttttgtatttttagcagaaatggtgtttcaccatattggccaggctggtcacaaattcctgacctcaagtgatccacccayctcagcctctcaaagtgctggaattataggcatgagccactatgcccggccaacagcttatttttgaaatgggcaaaacatttgtactgatttcaccaaagatatgcaaataagcacatgaaaagttgacatcattcttcattagaaaatgcaaattaaaatcacaagagtctaggtgagttccatttgcaaagaggaaaagaagccagtgaactggacaaactgagtcactggggtgcaggactcaatggagaaagtatgatttttcttgcttcctagaaatctaagcaccgtaagagttcagccatctcatcatttcttcttacatgatggaagaaagacatctcagaaaattccttatgtttcttaatgtcggattctaaacgtggtatctaggtactaatcaacccaggcttgaggtctatctgacttttcyttttccaccaaagaaatgtttacatgcttgttactttattgctgaagagtaaaaaacaaattgctctgcatcttctcttccacttccagtagacctgatcgttaaccccagtttgggggaggtttgtttttcaaccccagttagcgactgcaggtgctcctgtggcacacaggaggacacatgcatagtgcccccaagcgtatacaccttgatgctttctccaagcaccaattccagtcccagtggagtgggtacaagaggccttggaaaattgtctaacctttctagcataactgtagagggcttgtggtgaggccaatatactgggctacgaaagcattttttgacttgtaaagacgtttcacttttaatctgagcacatgatctccctgaaatgcctgtaagttcaacttaagatcatatttccattctactgttacctcagaagtgggtcttcaaaattgtattcctgagtagattaaatrtcagaatcatcaagaaaagatacaagtatgtatgaggtatctggtttctatgaagaatagtcattgagagaaatgttattttgaggctttaatacagttttttgtttgtttgttttttggttttttttttttttgagacggagtcttgctctgttgcccaggctggagtgcggtggcgcgatctcggctcactgcaagctccgcctcccagtttcatgccattctcttgcctcagcctcccgagtagctgggactacaggcgcccgccaccacgcccagctaaaattttgtttttgtatttttagtagagacagggtttcaccatgttaaccaggatggtctcaatctcctgacctcatgatccacccgcctcggcctcccaaagtgttgggattacaggcgtgagccaccacgcctggcccttgaggctttaataaagatttttaaaagaaattttaraacatattgtagactggttcagtggaaagaactcttcctcccttggaaacagtgagtgaggggctggcctgtgactactgaaggtttatcccaagggctgttggggcagttgtccttggagctcaccctgcctgagcacactgcagatttctcatccccaggattcagatggtagggaaccaagttccatccttagttgccctgtccccttcttctgtcccagcatccacaatctgagtaacccccctctccatcactggctccttggggtggggctgttgattccaaagcaacagctcagactggagagctctgtatggcattacaggacaggttgagggggaaacttgaggtctgagcaatgcttaagaaaggagccaggaagaccagagaaccaggcctactagagagtcaaacccagggccttctttgctgtgcataagtatcagtagaggcaagcgtttgaatgagaattgctgtattaagggacatggttgactactgagacacacatagagggctaacaaaacaaggaaataaaagattttttaatattgatccttaattatgtgtcacatctgcttgttttattataattataaactcctcaagttgagcctttatcatttattcattcattcattcattcattcagagacagggtctcactctgtcacccaggctggagtacagtggcacaattgtggctccactgcagcttcgaactcctggacacaagcgatcctcctcctcagcctcctgagtagctggggctacaggcacrtgccaccacacctggctaattgtttgttttaatttttgtagagaaaaggtctcactrtgttgcccaggttggtctcaaactcctggcctcgagatccttccaccttggtcycccaaaggtgctgggattacaggcgtgagccaccacgcccagccagtttttataattagttgcttgtattgcatgatcataggaaacccatgatttcttatcccttcattttcactgatgagaaaactctacgtaatacaaatgcttacagttctacaaacctggagtatggcacgctacctagctattcagagccatgtcccatggaaagytctgctgtcctgtggagatctgatgcaacaggaaggcattggctcacatcaaggaagcagttccgtggtttgcaggcccactgcataggagtcaaactcttttttaatgcatcttcctaaaatccattttattttacattasttacaagctaaaattttacttcaattcaaaagccartaagaaaatgtagaaaaccctttaatgatcacagaaaaccaggttcctaaccagatgataaattttgataaatcaatgatatccagatcacgactttaaattcccattggtccactggacaatcaacattatcacacacatgcctgctcactttggctgacccagctgactaagtacaggtccgtattgccaaattaaacatggaggagaacgctgacttttagacagcttgcctaaatttagtgttaatttgaaccagcttttgagcaagtacaattatgattggaacttacttcagccaaacaaaattttctagctggtcatgagagattgtttgagcaatatagaggtgagattgcgaggcagactagggagtgtcacagggtcatcagcctaccctctgccaatgtaagatggctccacagtctgtatacggtttgcctaaagcatgctatagctcaatgaccattccaagctttgcccagccttctgcctcccatgtcattcactcattcctattcctgtgcccaatgacctcactgcctaatttactgatgaaaaattagggctaaaaggcattagctcctgccctttcccttggcacttgaactatctttctcttgcttacctttcatccctccctgtttccaaagctgttccctaaatctaggcccgagcctcattcattcttgctttcccaggatcttattctcttagttattagctaacaaatttttctaaaatttgttttctctaytggctccttctggattgccttcagacacacacacatttcttttgaccagaaaacatctcttgctgtccccttaagcagccaccttctcttctcaatccttttcattgccaaacttctgtaagaacartttttcttgttgtatgtcacactattacaccacagttgcctggaaagcaagaaccataacttatgttaatatatatctatcaattgccaaacacagtataatgtagtgagtggggtagagactttggagcctaataagccagggttaaatttgggctcactaactactgtttaatgtcattgggtaaatgtcttaatcttgctgatcctatgctttctcaattgtaaagtggagataataatgcctctcttgctataccgtagagattaaatgagattatgtttatttaaaaaaaaaaaaccctcgtctggtgtctggcacacagtaggtgctcggaaaagctggttcccttcccatctctacttatggtagggattcaggtatttgttgagtgaatgactgaatggtctcctgcatgtttcagttaagccttcagtggcctggcatccactttttgttctgtttgattcttactcttttctttgccttgtgtgtttcaggttcacaaccagtatccaactgagtttgaattcaatctctattacttaaagttcttggctttccactatgtgtctaatcgctttaaaacatttctcctggattcagactatgaaagattagagcacggtatgtgtctgtatgcccttgtttcatcttttttgttagttctgcatgtttttaatgaaaattctaataatgtaactatccccaagactgacaagctgagttaaggtttaactctgaactatgaatgtagaggagtggataagtggccaaattctgaaattacgtgccacgttagctcttagcaggtggtcattcctatagcatctttctaaaattaaatatgtttactattttgatacctcaaagtgatcacactgtttgagaagaaacatttgactcctagtttttccaaccctgatgcactctggtaggaagggtgcctgcccttggaggcagcttgaatacagctaagaccctgtgctctagacgaaacagaccagggtaaaatcccagcattgccagttaccaactgagtattttggggaggggttaagtacctctctgagcctcagtttcctcatctttaaaacaaggacagtaataccatcccacctgtcagggccatgatgatcacatgaggaaaaagttgtaaacttcacacagtcacttagcctcttagcccaatcactagcgcatagtaagcgctcaataaattttagacatcactcgcattagtaatgatagtgatgaactatttttttaatagcaatgatagttgtaatgagtagattctgaaagtcagccccggtaaaaacatttcccaagggaattttacattcttacttttataactgttacgggggagaggaaacacatgaccatttttgttaagcaaacgaaaatcagttctgttcaatatattatatgcactcagtaccacaaagaggactcttaattccaagaaaatatttactgatgttctcagttttaaatctgaaatcaggaaataccgctttccagggcatcctattgaaattgtctagtatgataytgcatacttttgataagggaaagagcactggtgagaccattttccaccctgtttatacttccagacctttgttggctcatggaattgttattcttcacatcacaatcagaaaccttaatttyttaagcatctgcatactgcttattgggaaggtagtaagtataactggttacaactgccccaggcctggtcttttttttttttttttttttttttttttttttttttgagacggagtcccactcactgtatcactctgtctccaaggctggagtgcattggtgcgatcttggctcactgcaacctctatttcccaggttcaggcaattctcctgcctcagcctccctagtagctgggattagaggcctgtgccaccatgcctggctaatttttgtatttttagtagagacaaggtttcaccatgttggccaggctggtcttgcactcctggcctcaagcagtctgcctcccaaagtgctgggattacaggcgtgagccaccacgcctggccaggcctggtcttaagtggactgacctgtacctacaggggtcaccatgtcactcagctttatcactgaaaggaacaacatgtacaaatattgggagtaaaacgcaggtatttgcctccttggagtagttgtgttttttggggtttttttggtttgtttttttgtttcgtgggcaggggggcagtggtattttgttttgttttgttttgtttttgaggcagggtctcctctgtctccccggctggagtgcggtggcaggatctcggctcactgcaacctctgccactgggactcaagcgatatcccacctcagcctcctgagtagctgggaccacaggcatgtgcccccatgcccacataatttttgtactttttgtagacatagggttctgccatcttgcccaggctaagtttttggttttttaataaagcagtttgttttgctgaattaagctgatcagcaaattaccttagcagcatgcagatgtggccaaagaccaaggcttctcctatagcagatgatggttctcttcattagagaagcaacaaggtctagtgcagtggttctcagacttgactgaacattagaatcacctggggagcttttaaaacttccaaggtccaggcaacatccccaaccacttaaatcagaatctgtgatggtaaggcccaggcatcaacagcttttaaaactccccaggtaaggccaggcacggtggttcacgcctgtaatsccagcactttgaggaggccaaggtgggtgaattgcttgaggccaggaattcgagaccagtctggccaacacggcgaaaccccatctctactaaaaatacaaacattagccaggcgtggtggcatgtgcctgtaatcccagctatttgggaggctgaagcacgagaacttcttgaccccatgaggcagaggttgcagtgagctgagatcgcaccagtgcactccagcctgggtgacagagtgagaccctgtctcaaaaataaagaataaaaaataaaaactccccaggtgagcccattatgctgccaagtctgagacccaccactggtcccacgggtagagccgtagatcaaggatcagaaaatgtcagtaactttgggtaaattacttcatctctgagtctcagttttctcatctgaaaaactaaacagccctgcctatcacacagggctgttgaaaagattaaatacaatgatgcggataaaaagatatgtttggtatatattgaaagattatcatgattatttgaaaatataagcatttccatcctatgaaacatgtttcctcttaaaactcataaacacaggctgggtgcaayggctcacacctataatcctagcactttgagaggctgaggtgggcggcttgcttgagccccaggagttcaagaccagcctgggcaacatgacaaaaccccatctctacaaaaaaaaaaaaaaaamacacacacacacacacacaaattagctgggtgtggtggcgcactcctgtagttgcagctgttcaggaggctgcggtgggaggatcacttgagcccaggaggtcaaggctgcagtgagccgagatcacaccactgcactccagcctgggtgacagggttgagaccctgtctcaaaaacaacaacacataaacatgcatttcgaatcctagaatgtcattgccgaagcctcagtagaaatcatctacccagcctcctctctggatgttaggccacccacctaatcaacatcaaggaagcctagtttcgtgtccctagtccagactaggttgcctacttgaagtctgttccttcttgtgttctggtagatgcactcgttatcaggcctacagtgaaaccttgtttaggaacacctgtggtaactaccctctatctgccaaaatgacgaagtggagagtaagtaatctcaaccactgctggtagaattcatcagtcataatttttttttttttttgagatggagtctcacactgtcgccaggctggagtgcagtggcacgatctcagctcactgcaacctccacctcctgggttcaagtgattctcctgcctcagcctcccgagtagctgggattacaggtgcccgccaccacacccagctgatttttgtatctttagtagagatggggtttcaccatgttggcaggctggtctcaaactcctgacctcaagtgatccgcccacgtcagcctcccaaagtgctgggattacagatgtgagccaccgcaccacgctgagtcataatttttaagattttatcagaaaaacttaaacacaatgaattctcctgtgtcctaaaagcttaatatgttgattattacatactggattatagggttataatttgataggatttggcactagctgtctgatttggactgtttttaagatgttccttatatgtgtacatgttgccctaagccagccatatggatactgtaagaaaagtccattggacttggttccaattacaagatgttacaacagccctaaggaacagagggccatgtattgcatctcctcttctggtttcagctcattctctttctgtctacaaaggtgcctagagcctatttcaacttgggctgactaccacacagcctttcagtctaatccatgcctcraggcgccaaatggagcaatatacaaggtggctttcaaaatcttactgcaacccctagagcatttgcaactttggacattggagttacttgaacttttaaaataactaatatctcgggccatccccagagattctgatttaattggtctgaggtgagacctggacactgggatttttttaaagcccttggttttttaaatccatgtccaaggttgagaactactgcactggaccctgcagttaaaaggtagagaagaaactgttaattagtcttaggggccccacatattatagaatttcatgccatcttgggcttgagtctttttttttttttttttttgataaactggtaaaatgcatgttgattttgactatgtcacttcattccaagcaagacaccactgctgagacacccttcatggccttttaaagaactactttttgcctcaccccaacacattttcctccctattaaaaacaaagtgggctcatgttagtaatagattgactatttgaaaaaggtataaaagttctgcttttatttttaagtcacccaaggacacagactacacgcttctgtcatctagagtctcagtaaccatgatctgcagtatatatacactgctaaacaagaaaactctttaaatggcttcataataaacaaacagccaacaacttaaaagagaaacataaaattatgttttttactgagcttcatcaaatcaactctgaagtccttccattttctcttgaaaagtgtagactgcctcctgcatggacttctttgaatctagatatagatgcaggatgagggttggaagagtcatgattgatagactgctggctgcttaggcaaactttatcagatgtttcctccatctggatctgtttccctgtagcgatgaaattcattccggtctttagctttgcagttattttctaaggttttcacacaaatgttgctgtttttaaagccataaaaaatattccacttttttatctgctgcatgcatcatacgttttttggcaaagtgtgaatttatttaattttgttttgttggatttttttaatytacaggaactttatttgatgataaaggagaaaagcatgccaaaaaaggagtctgtatttgggaatgtattgacagaatgcacaagaggagtcccattttctttaattatttatattcaccattggaaatagaggtagagtaagaaatcatttatgtttcactttctgaaattttgtgttaaggttttccttagttttamcatatataagcagtttaagctttttataaacattggactaggtttcataccaaaaagctatttcaaagtttgagacactataggtttgggttgtgacacaaatggagactgttccctaaattcttgccacaaaaattaggagctggctctcaaaacctagaagggaaaacttgcagagaatcaaagcaaggcacctttccccagaaagaaagaactaacaaaatttgaaatatcaacaggtggtctaagctgaaaaaccttaaaatactttagaaaaggtttctttaagttcatctgtaccaaagccatggaaggacccctgtaggaagcagagataytcggagccaagcccaagaaggataacatatctcggggcaactgccccaccatgcacatctacataacacacgccctggaatgsaacagactggtctgataagcagttcyaccattacttagggccaagagaggcccctcccctgggccccaatcatagaaccctagtctggccttcctccagctgcatcctcctcatggaggtgagcagtacaagaaaccaaaggtacatgcttagatgcccctccttcatctaaaccatactctgtctgggtacttcagaattctttgcccaaattcaggctgctcaccaggctacttctccaagtcagtctcctaagtcagtgcatggaccccaaggcccaaagaatggcaaaaagtagcaggtttgacagagtggacagagtttgactttgtgggctggggtatacataatgattcatgttaagacccttagaatgtaagataggggtgggtggagaagagaggccaaggacagggggctggggccagctcctccagtgctaccacttgttagtataaaattctgaggaatccaagaattctctattgaacttgaccttctacgtcattaggaagttacatttctcaatgtaggagggaggattggagaatgttttatttaataatttatcttgatktatgatttttaaatatttagaaatatggtatttgaactccattcatactcttcctcccctggactctataaatgttaggggtttgcctgacagtgagcttggggtactttggggtcaagatgaaactatatttctgttttctttaacaggctytaaagcccaatgtaaacgtctctagcctcaagaagtgggattactacatagaagagaccctgtccacaggcccttcctatgactggatgatgctaacccccaagcacttcccctccgaagactctgacctggctggagaagctgggccacggagccagaggagaacagtgtggccatgctatgatgatgtcagctgtactcagcctgatgctctcaccagccttttcagtgtaagtcaactgtagacacacacctaggggcaccaggggccctggaggcatgagggcaaaggaaycaggctaagtaacttctgaacatggctctccttactctgagctagggttatggttatgaagaaaccagatttgctccccatcatcagtgggggaccaggcttcactactggaaaagagtctcaataaaagtgattttccagcctggcgcgrtggctcaygcctgtaatcccagcagtttgggaggctgaggcgggcagatcacaaggtcaggagatygagaccatcctggttaacacagtaaaaccccatctctactaagaaatmcaaaaaaaaaaaaaaaattagccgggcgtggtggcgggcgcctgtagtcccagctactcgggaggctgaggcaggagaatggcatgaacctgcgaggcggagcttgcagggagcagagatcacgccactgcactccagcctgggtgacagagcaagactccgtctcagtaaaaaaaaaaaaaaaaaaagtgattttccagcgttacaagaaagcaatcaagcaaatagagcaatttactccttccrgcagcttcccagctgttttagttgcccgagcagccttagtcaggtcttggctgtggcttctgtgggtgctttacttcctctggtcagaagtgtgggtagtcagtggcctgatgggagtgctgycaaccatcttctgcaaggaatgttccggaaccaacccctcctggcagtagccagcctgaggaatagctttgagccctgatatgggccagacagttcctaaagagtcttccccatctggcttcctgaccaggaagagtatgcttcagtggtcatacagtcacagaggcagctgccctgatttccagcttccctgtcagaaggtatatctgtttccttgggcatttcttggttcattctttccacatctggtttgaatcatcagagttgaggggttcctcctgtcaaggactggcttctcatctacctcagctattagggctgggccacgggccagtgcttgacctcttgctttggctatcagatttcccatgggctgcccaagggtgcagatgtctgagatacatatttcacatcctagtatgtaagctatcctgtacaaaaaggcctagttatagrtcctaataaaccatctttgccacagtacggcacaccaactagagctctcaccactattcctggctgggagacctcacaggcccatgtccaccactttcctcaactgccctctggccatgctgctcatctgggcctagtacagaagcagtgtggctttggggcccatcctgatttctatgaaatactgatcagaaaacttytaatttctttgcaggaaattgaaaaattggagcacaaattgaaccaagcccctgagaagtggcagcagctgtgggaaagggtaaccgtggaccttaaagaagaaccaagaacagatcgcgtgagttggcaatgccccttgagagccacttctgagctttctgagggtgctaagtcaggtggagcctgctgccacaggtgacaagacccagctgggtttatggccagaaggaagggtggaaaggggaggggtcatgtcctggaggtccagggcagaaagttccaaatgactgaatacttcctgagtgtctcacttcaccacagtgacataatacttatgtctcagcaccccgaatccaaggaaaagtattgggttcttttctatctcagtgcccgtgtggtttcagctgatcttctaccacataaggcaggaggggaatgccaagaccacgtttgctccacagaaagtattttaaaacaacaaaatatgctaccctgtgttgttcacagtcccttttctgtttctgacttaagaaacatttatcataaaaatattttaacggccgggtgcggtggctcacgcctataatcccagcactttgggaggccgaggtgggcggatcacgaggtcaagagatcgagaccatcctggccaacatggtgaaaccccgtctctactaaaaatacaaaaattagctgggtgtggtggcgcatgcctgtaatcccagctactcaggaggctgaggcaggagaatctcttgaactcaggaggcggaggttgcagtgagtgagcygagatcgtgccaccacactccagcctcgtgacagaacaagactccgtctcaaaaaaatgtatatatatattttaaaaccaaatactctgttttctgcttctcataccccatttcctrtttctgatttaagaaacatttatcaagcacataatatgtggaagggtctgtgcttagtacagtacacaccttcgtatcctatttaatccactgtgagggaatggcgttccctctcctacacaaggaacaggcacagagagcatacagtggcaactggtagagccaccaatcgaacccacatcagactggctccaaatgcaacagaagggaaattaggacagatgagtgttctgaagaacagttcaggaagaagaggccagcaggtcagatgttacagaaaggtcaagaagaatggagggtagaagaaaacctttgtggtaaaaaaagaacatctggggctctatctcttaccctcaaatagcaattcaggagctgttatcagacagacaacaggtgggtgatgccttaatgcttttttgttagaaaaataatagtttattgattttttctaataatgaaagtaataatgttcatttttttgaaagaacacacagaaagttataaaagatgagratcacccataatttataacctagaagtaaaccactatgctatcaaacttgttttacccttataaattcacatataaaagagattttctagacatactattttaaacctgctttttcactccacgttggcatacgtgtccttccaactgtcactgtgtataaaccagtgtctgccaggcgcagtggctcatgcctgtaatcccagcactttgggaggccgaggcaggcatgaagtcaggagttcgagaccagcatagccagcatggtgaaactctgtctctactaaaaatacaaaaaattagccaggcatggtagtgtgtgcctgtaatcccagctacttgggaggctgagtcaggagaatcacttgaacccagcaggcagaggttgcagtaagccgagatcatgccannnnnnnnnnnnnnnnnnnnnnnnnnnnnnnnnnnnnnnnnnnnnnnnnnnnnnnnnnnnnnnnnnnnnnnnnnnnnnnnnnnnnnnnnccgcacactggtggattccaaaggcgcagtaagcacagaaaatgccacgatacaccaccccaggcgagagagtaaaaaccctgtcaaaaaaaaaaccatcaacatctttattttttttgagatagtgtctcactctgtcacctaggctggagtgcagtggcgtgatcatggctcactgcagcctcaacctccagggttctggtgatcatcccaagtagctgggactacaggcacacaccaccatacctggctcatttttaaaacattttttgtagaaatggggcttcgccatgttgcccaggctggtctcgaactcctggactcaagtgatccactcacctcggcctcccaaagtgctaggattacatgcatgagccaccacgcctggtcatagcagcatcattttttaatggctgtctagaattccactgtatggaaatgccataatttgtttaatgtccctaataatggacgtgtaggttgtttccagttttttaccacgataactaactctgagattgatacctttgtacattattgttgcttattagtccagttttttccttgagataaatatttgtaaatgaaattttccagtcagtcagtagtttaagtgtctgtaaaggtttcctagctcctgtcctgtctttttcagtcccaaagacacctgtcgagatccccaggaattgtgtctaccaacctaccttcctatcagaagaggtctctgctacatctcccagacagcagcatgggggaggaacagaattccagcatctccccatccaatggagtggagcgaagagcagccacgctctatagccagtatacatccaagaatgatgaaaacaggtgacatgctgaaccctgctcgctgtgctgaagacttccccacagcacctgaggctaaaccacaggtccctcaataagctaggcctgtgcagtacagccttttataaacttgraatggatttgctttaatttttgtaatgttttagatgtttctttgaaaagacaaaaaacaaaaattacaactaaaaataattcgaagaggttgtagttatttgtagttgagtcctgatggctcttatctcctgtctgccagaacgtttgagggaacatgtgtcagccagcactttgtcagtggcacacatcagaaatccagcttatgctagctgaagcaaaaaggaatttactcacataagctaggacagccaagggtatgctagcttctcacacagtatcttctatccacttcctggctctgctttgccctctctctgtgttatgtcagtcccaacatggcacaaaggatggctactgatcattccaagcctcacagatgtggtaatcccagcagaaagcagcagtctttccccagaggtctagcagaaaaaatccagggagaactcttataggccatttttgaatcatctaggggaaatagagacttgacaaaaacaacagatatcccctcccctttacagcattttgtaagtgtaaatcaaaattaactctcctgtcatcatttcttctaggtcctttgagggaacactttataaaagaggggctttgctgaaaggttggaagccccgttggtttgttttggatgtaacaaaacatcaggtaatactcttaaagccaaaagaaattacttctgtctaggctagtcccagtycctggctattatgtggctctagcagacagatagattcctcatgtacagactgcttttttagtgcctctcatatgtagtctggaggctcctcaagggccccagatgtccctgagtaagggcaatagccttctgagggagtttcccaagtagctcggcctggtacatgcaggcagaggcagcaacaattgagcccagagcatagagcaatagaactctttttttaatgctcaaatatctcttgctgcctgatcttaacacccaggtgaggggattcctgaggttttcagccagttgcatacataccacatgcacatataagcctgtgcctgtgaacactccccagaatacaagttaccttcgtcctcgcagcagaaagcatccattcaaaacagagggcattaatttattctacaaacatttatcgaacaccacctctgtgcccactgctgtactggttactaaaggaggcactgttacccttcaaagatggcagcaacaggggagtaaaggggccccaaaagyggcagaaggggatgtgcccacccaaacttggaattcaccgtgggcaagtactagactggtccttgctgactatgtcaagaaatcttttgactactgttaggttcttagctattcctgtagcagcctctgcaatccttagcatcatagtctttactccagtgatttcaagggagagcagttcctacccaaacctccagcaactctgcaccctgcattactgagagctgcatggtctcctgtgttctgactgcaggccttaactccaccttgggactgaccactcagccttgaggctgaggcttacacattttgattctcaatgcatttatctataaaatggaatctgttaggaaaaacctgaactgttactcctgtacagtgctttggttggacctgcatctaaaagactccttccaaatgaagactgtatttggagtccagcttttcctctgctcaaggagtttcataacgattacagagtctttgtgggacaatatagatagataatttatgttcaaatatacaaatggaagccctgttagggagctatactctgaaatcatagagcctacactgtgtaaaaaagttccattaagcttctaaatataacataggagaatgtcataatttttctataatttacatcaaattacacttgcattcttaccagtcttctggacttctttaacatgaaadatagatacagttttttccacttagccctgctcataccatgcctgagaggagagacagagaaaagtctcaggtcagagccacrgtatcagaagcaccactttcttgccatgtatactagagagtgaaatccacagattatggcccaataaggcttattccctagcagtctctttgacttttttccttttttctttttttttttttttcttttgagacagagtstcgctttgtcacccagrctggagtgcagtggtgcaatctcggctcactgcaagctccacctcctgggttctcgccattctctggctcagcctcccgagtagctgggattacaggcgcctgccaccatgcccagctaatttttgtatttttagtagagacrgggtttcaccatattggtcaggctggtctcaaactcctgacctcaagtgatccacccgcytcagcctcccaaagtgttaggattacaggcatgagcaaccgtgcccggcctggaaagatgtttcaataggcataaacattctaaattttagttgatattgccaaattgttctccaaaaaatttctaacaaattatattcacactggcagtatttgagatgatctagtaccttattggatatcatcagccatttttaatatttctcaatccaaaagtgaaatctcatttattgtcatttatttttctttgattaatgaggttgatcatcttttcagatgtttatagatcatttgtatttctctgtgactcgcctgttgagatattttgagcatttttctactttatctttttcttatcaatttctgggaattctgtatattactaaacattagccctctttttatatgttacatatactttttacagttgttacttgacttctttttttttttttattttttgagacagggtcttactcaggctggagtgcagtggcaggatctcagctcactgcagctcgacctcacaggctcaagcaatcctcccacctcagcctcctgggtagctgsaactacgggcatgcaccaccacgattggctgatttttgtatgtttttgtagagacggggtttcaccatgttgcccaggctggtctcgaactcctgggcttaagtgatccgtccaccttcacctcccaaaaaggactgggattacaggcataaaccaccatgcccagccttgattctattttttaagatgtaatacatttatttgtttgattttcaaacagtacataagtctttcccccaatgctttctccaagccacctagttcttcctagaagcaacaagtattattaattaattttttgtgtattcttcgaggcatagttcagcatatataaccaaggtacagaggaaggtattcaaatgcagtttgaaaagccatggcattttctctttctgtctcttatatctcacttgtatccttttggttccagctgcgctactatgactcaggtgaggacacaagctgtaaaggccacattgatctggctgaagtagaaatggtcatccctgctggccccagcatgggagccccaaagcacacaagtgacaaggctttctttgatgtaagttgatcttacttctcttttcctggctctgtctgcacatcattctgtctgtctccaagaatgatggagccctcagagtaattggtggtgactacagakggatgacagacccccttggctatgggaattgttccagagcttgaactcagcattattgacccccaaggctatcctctcttcctgtctgtatgtctcagaaaagctacatattgctttgtgcaaaaggagtccagcgcacatggaaacagatgaactccttgttaaatgttgttagttatttcagtcaccacctactttcaagaacagatgctatttccctagtattcagtggtcttcgtgcttgactacccacaaaagactgtccttagtcacacatgataagtgtctacgctaacatcttcagcagcccttaggtaggccatggggcactttataggccacataatagaaggagacttatgtagtccctggagtcaagcagggctttataaagaggataggtcatcctctrtggccctgctcaggccatgagaccgttttcctgacagtgggcttccaatatggctccaactaaagaaaggggacacgaaggccaactttatggtatgsatgaatctcaggcatccccctggagcacaaggagctccctcaccttcagtgcattggtgcagtgcatgggaaaggttaaaggcaccattcattgctgacccttcctccttagtcaaagacgacactaagaaaatgcaaaataaggcgctcccagtgtgtctccctttcctgccagtacccttctatcaacatcccctatgactctagagaccasaaaagtaaaggcaataacagtatggtagttgaggaagaaaaattcatacagacgttctggggcagtatggaaaagaaaggtcacaggaactgatttaccacttacccaaatccataaaacagccctgcccttcatctctggttcactgtcatttggttttgtagctcaagaccagcaaacgtgtgtataacttctgcgcccaggatggacagagtgcccagcaatggatggacaagatccagagttgtatctctgatgcctgatgcccatggtcaacccacgcagaagaaacagaagaactcmtgctgccagatagatagaaaaagaagcatggatccttgaggagctgacaacaagttatcccagggcctgaggttctcctgcccagtcccctcttgcaggggttgctatatctacttaacctgaataggtgtttcacacaggtctggtcaacagccccatgcactccctgtatcttgcactaaatttttctaacagggtcttagtggttaatgatcagaagatgtctcctgagccaactgtgaacctcacccaggcaaaatggctaccacctacttgggtccttcttcatgaaagctatagatccttttttgttctctgaggtcataatttcctcggagacctgtttaacaagcaaaaatcaaaaccctccaagattgtctcatattctacctggactaggtttcctatgagagacatctacttgtaatgcctgacctttgagatgctcagttctctggtgctgccaaaagatgyttccatggtccgtgctctgccagtggggttcacaacaagagacgtcattgttcagtagcaggcaaagagggagcacacagcattattctgatggaaaaagattatccagggaatggtacaacaatgaccagcccaatgcaggaaaacactacttccaaaacactgaattctctagaccagaggtgctctgaggatccagggccttgtgttcttatgtatcttctgcttcctgacagcttctttttcaaaataacatgcaaaaaaagctgaatgcactaactcacaaaacaaacacttgcactgaattcccaatgaagtgaagatgttggaaagacagaggccagctatttaggaccatacgcacctgtgacaagggctgtgttgaccacagtcacactgtggcatgactggatacccaaactacacttctacacatgaaaagtaagaactgtctttagattttctttactttgataacttgtgattgtttagcttaagacccaagaaatgctgtttgctcatggtaaacagaaacagcatcttcgctacaaccactgacaccagctggcgtcataggtagctagatcattgcatttgttttgaaatgttaatatgttaaatactaaactratatttcaaaaatgtgtatatatgatttctatatccttgtttttcagatagcctgcttataatttaatataaattaactgatgcattcataagatttcaataatgaaatggttcccttttaaaaaataaaaatactttgtagattaaaaataaatcagaatttcaaatttmaaattgtccacacactaggaaatagaactgtgttaatatataagaaatytggggataattaagaatgaaggacttttctatcatttccattttataaattgccacctgtgaaaatggtttttgcacattatttgtatttttctttgtatatgaaataattttttgtactttgtaaaatatggagcccattgtaccttcarctatttgagactatacacagtgcttcttttgtaactggattactttaactttcgtgaaggcattacattgcctcacattcactaaccaccttgaattaaatttmtttcttaagaaaaagcatccctcatttactgtgaactaaagttcattctgtagtgcacagcattcaggagggtaacactcaggattcatacatgggactaaaggttcaagaataaaacaaagcatgacccactttgttccttcattctcctaatgtcatcactgccctttgctcaagaagtaactagggatactggacatgttagcatgagcttctgggttccagacacacttctgcagagtttaggtaagagacttgaggccaagattctcatatgtgctgccactcctaccactgtctctaataagctgtttgaaattgcttaagtcccttacctattctgggtccattccaccacccagagtatatggtaatttgtgaaaattttaggcatgagacattgaagtctgtttgagcagcagatttttctgcttcagggaacttttttttttttttttttttgagacagagtctcactctgttgcccaggctctggagttctggagtgcagtggcgcaatctcggctcactgcaagctccacctcccgggttcacaccattctcctgcctcagcstcccaagtagctgggactacaggggcccaccaccacgcccagctaattttttgtatttttagtagagatggggtttcaccgtgttcgccaggatggtctcaatctcctgacctcgtgatccaccctcctcggcctcccaaacggaattgttaaacagtacaaatgatcagtgatttcagttctagacagtacttccttggttaagcccatgagtttacctcatgtagccaacagagaatgcaagttttcatctagggcagagcctttaagtcctttgacatccagagtcctctgagccaagcaagaggatcccaaatagccactgaggctcaaggtgagatagatagtgacatattcccttgagctttcggttctcctcagtctcaagagcatgctgatctagccaagggccctcaagcctttccttggtcctaggcctctcaacagctaccattacacattgccgtgtccctgagattcagtcaggagggagacaactgggattaggggttgagtagaagctgtgttcacagcgtcagtatctggatgcccttcattcctcaggtcttaactgtgaacggggagaatactgggttctgtaaacaaaaataaaattccaagccccccagatgactgaatggaccccctctcagccaagggggttccagagaaacctgaaaaacgagttccagccatgatgctcgggcaaggaggtagacatgcctctttataccctctcccttttggagtttagacacaacagaccagcattaacattaaaacagatcttaagactgacaaaatagactgtcacaataaaataccaaattccaacctgactctagtatagcatcacacaacagatagcaagccctgaaggaaatcaaagcttttttaatcccaaaatacattccttttacatattttgaaatggccctgcaaagctgtatcttgtgcggggggaggggatttacattctgtagaggatccctttcccttccccggtgtttttctgatcctgaagagattagctmagagtctagtaccttttattaaaggtctgaataggaaatatttgctatctgttgcctctaagggcagccacctatgagacttcatctacstaagaacctaggtctctacaaccccttatcttaacccagactctcctttcaattaatttcagccttttagataataactctttcagccaattgccgatcagaaaatctttgaatccacctgtgacctgtaagcttctgcctttccaggccaaatcaatgtatacttcacatgtgtcggttgatgtcttatgtctccctaaaacatataaaaacaagagcctttaacccaactaccttgggcttgtattctcaggacctcctgaggctgtgtcctgggtcatgatccttaaccttggaaaaataaatctctaaattgattgagacctgtctcatatacttttttgctttacagttccaagggagaaagaccagggcttggcaacctgcagaagccttaacagggcccttccttctgtggtcccagtgacaaaacccttctaataatgggctcttgaaagatgcaaactcaaaggagcacatagcataagtcacttcccaacccctttgacccaaatcctttattcccacctcccaaaccccttcactctattgtctccactccagagctagagcttaaactgctaataacatggcacatttgcttctcaagggaaactgacatttataggtatttaatcagggattcttgtaagagttactaagtagccctatcatcccataaagaatttctgaaagatcccaagctgataacagagaagtgccctcagcaatgccagccaaagctatgaattaagcagtgaataaagcagtgttgacgaagagatagggtttacagcagcaccatcaaacatatataatgcaagccccatagatatcytcaagttaaaaaaagacattaattttaatatatttgtttttaccatatgtttactccaatatatcaaaaatattttaatgagtaaacaataccaaaaaaaattaatgaaatatattccttgttcatactaaatcctcaaaatctagtgtgtattttatacttacagcacatctgagtttggactaatttttttttcagaggccatttctgataaaacaaatgcatgtcatgtttctataccagttctccaacatcaactggacatccaacaattcagttcaagtctgacactaactccccggatttagcgtagactccacaagttcaggtctgtcctcaagactgcccccacttcaaacactagttgcaagttccaagggccaccagaacttctaaccaaccagctataaatatgaaggtttccacartcccccctcctcaggttcagtaatttgccagaacaaatcatataactcaggaaaacactttacttacatttaccagcttatttctaagggatacacctcaggatcagccaaagggaagagatgcatggtatggagggaggcaacacaccaccygcccagcatctgatgtgttcaccaacccagaggcactccttatctcattattcaagagtttttacaacccagtctcmagtwaccctccctcccccgaggttgggggtggctgaaagttcccaccctctattcacttgtttggtctttcagatgaccagcccacatccttaacctagctagggaccccaccctgaatcaccttgttagcataaactcaggtgttgygaagggcagttatgaatagcaaaagatactcctaaagggtggggtgtgttaggaataacaaactatcacttagggaatttctagggttttagacactgtgcrccaggaacccagaacaaagracaaatatattttgtactctaccacaactagccttatttccactgctaccacactaaacaatgcatatttacagcaaatagcctgctcacagcagagcctgcsggggtaggraagagctgggtggcaagagacctggcttctagtgctggctytcttctaatgtaatctatgaccttgaaycagtcccttaactttgctgggctttgacttataaaaatgcaggacgcagatgatctgttactttgtgattccaaatatttaccttggcaaggactcagtttccaaactgagatttaaaggatttgctgaaaaatccaaatcatctaaatcagtgcatctcaaattgtaatgcatacatgaatcatcttgttaaaatgagattctgattcagtaggtttggggtggggcttgacattctgcrtttctaatgaggccagtgctgctggtccacggaccacagcattggtccttggtaacagaattgttcttggagtaacaggaatgtgtctcagtcctctgagaagcagatgcctgataggcaggaactctggggaggctggaagagccaagagacgatgatgctggtgtaatccttgtgaaaaagaaagggaagcaaagatgagtggaggagacttggagtgcagtgcagttctaaggaagttcagcaaggcagataagaagtccttgagccatcaggggaatcccacatattccaagaatgggccttcctaggatccccaccatgctcaatcattggctaggagcagtccatgggaagcatggttttggtggaaacacagtaatagatttcagaatataccagctgaggccaatagtcaatgacagtccctgcagtcagagatctgagagaaatcttttcatggttgtcaatgttaaagttgtcagaatcaaaatggagtcacttatgtttaaaaaaaagcaaaacaaaacaaaacaaaacaaaaaagcctgataaattgagccagggaaagctatgaagagagagtactcatgcataaatgcctgataacaaaaactatcaaaaaaaaacctgcaaaaattgcaaccttgcacaaaggccattgcaaccttacacaaaaattactcctttgaaggcatctgtctagcaactgcctgtccagccttggattagtgtcacccttgttactgatccttgtagccaggataattatctcaaaacaattatgtaatgatcctcatttttcctttaaaaaacctttgtgttcctttacctccctgaatacacacatagtttactatggtgttatataggtattcccattgcaatgcccttgatatagtttggatgtgtgtcctcacccaaatcgcacgttgaaatgtaatccccaactggaggtggggcctggtgggagctgattggatcatgggagtggatttctcatgaatggtttagtaccatcaacttggtactattctcatgacagtgagtaagttctcctgaggtttaaaagtgtgtggcaccttcccccttactctcttgctcctgctttggccatgtgacatgaaagttcccgcttggccttctaccatgattgtaagattccagaggccttcccagaagcagatgccactatgcttcctctacagccttacagcctgcaaaccatgaaccagttcaacctcttatagttttgtttttttttttttttgagacagggtcttgctatgacacccagactgtagtgcagtggcgcaatgacagctcactkcaaccttgacctcctgggctcaagcaatcctcccagctcagcctcctgagtagctgggactacaagtgtgctccaccatgcccagctaatttttttatagagacagggtcttactatattgcccaagatggtcttgaactcatgggctcaaacaatcctcccaccttggcctcccaaagtgctrggattccaggcrtgagccaccacacctgacgtcaggtatttctttttttttttttttttttttttttttttgagacggagtctcgctctgtcgcccaggccggactgcggactgcagtggcgcaatctcggctcactgcaagctccgcttcccgggttcacgccattctcctgcctcrgcctcccgagtagctgggactacaggcgcccgccaccgcgcccggctaattttttgtatttttagtagagacggggtttcaccttgttagccaggatggtctcgatctcctgacctcatgatccacccgcctcggcctcccaaagtgctgggattacaggcgtgagccaccgcgcccggcccaggtatttctttatagcaatgcaagaacagactaatacagccctattaaataaatattattttcttttagagaccctctctgttatgtagggtgacataaatggtgtccagaagcaggacctgaaaaagaatatcagaagcaattcgtgactcttggaactagtgtgcaatactcgcctgagccctttgagcactctgtttctatggctcacattttctgccctggtgcattttctctcaggccaagcctctccctttttggtagaagctcttgactttgaacaggagttgttgtctaaggtaatacccgaggttcattgcctcrtgccaagaaaattaaggacacagacacacacaaggagtgagtttaagagcagaggtttactaggcaaaagaaagagaaagaacagctagctctgtccttcaagagagatgggctcccaaatgggacttccggcccacagtggagtgcacagattttatagacaggcttgaggaggtgattgattacatagggcccaaagattggttggaccaggtgtgacattacgtagtgcccagggaatctggccgcaccaccctaatcttattatgcaaatgaggtctttgcttggctggtgccatcttgtctgcttcttatggtatgcgtggctagcaaagagaagggaagatggagctgtcatgttggatatgcctagccccaggtagccttttcctattggcacagctgctggcattcacccatgcaaacttctagcttccttgtttatgtctgcagctcaattttacaggctgctctttgttagaaaagaaaatyatttgggagctacttttcataaaaggaaaaccttaccaaggacttccttaccctatctgcctaatttcttaactcctcctatatcaactttattcaggatttggtttcgttataaagccacctttaataaaggactgtacgttctcctggaatgataaaaggttttttatcttttttggtttaaagacaagtgtctttctggattgagtactctggtttctccagaatccaygttctttctgcaagacatgacttctctggtaaattcacttttgtttctttcttcgttgtgatggttaatactgagtgtcaacttgattggattgaaggatgcaaagtattgatcctgggtgtgtctgtgagggtgttgccaaaggagattaacatttgagtcagtgggctggggaaggcagacccacccttaatctgggtgggcaccatctaattagctgccagtgcggctagaatataaagcaagcagaaaaacgtgaaaagagagactggcctagtctcccagcctacatctttctcccgtgctggatgcttcctgcccttgaacatcagactccaagttcttcagctttgggactcagactggctctccttgctcctcagcttgcagacagcctattgtgggaccttgtgatcatgtgagttaatacttactaaactgccctttatatatatctatcctattagttctgtccctctagagaaccctgactaataaatgcatgcataatttaattttttctacattcctgggttgaaatttttgtgaacattcttatcttggtttcattttggtttggttacatgaatctgtaaatgatttggctcctttcccttgcttgtttctaaatatcttctgagagcaaaaataaatattctaaatggcaggkgcaggatggctatttaaaagccactaggacagttgtcactatctaaaacatgggtccaaactcttgacattctctgacaggatttataggattttctttgctctcaagagattaataagaaatgaaatgggattctcaaatattaaggcatgccaaggttttctgagactccagccagctacatattatggtctattctcatgaatatatttaaactaatgggccaggtgcagtggctcacgcctgtaatcacagcaatttgggaggccgaagcagatggatcacttgagcccaggggttcaagaacagcctgggcaacatggcaaagccccatctctacaaaaagtataaaaattaggcaagcatggtggcatgcacctgttgtcccagcttcttgggaggytgaggcaggaggatcaattgagcccaggaggttgaggttgcagtgaaccatgattgcaccactgtactccagcctgggcaacagagcgagaccctgtctcaaaaacaacaacaagaacaacaacaacaacaacaacaaatactaatggacaaatcatatcaaggaaaattcagggctaaaatggtctaacgtggtggctcatgcctgtaatcccagcactttgggaggccaaggcaggtagatcacttgrggccaggagttcgaaaagaggctggccaacatggtgaraccccatctctgccaaaattacaaaaattagccaggtgtggtggtgtatgcctgtagtcccagctacttggtagggtgaggcacaagaatcacatgaacctaggaggtggtgtttgcaatgagctgagttcatgccaccgtactccagcctgggtgacagagcgagactgtctcaaaaaaataaaaattaaaaaaagagtcataatttgaactgtctaaaatatactacaactatagtgttaacatcacagtctaccccttgtgccacacagatctttactctccaccaggttcagggagaagttcctccccatttcccttgggcctctattcccaaggggaactcagaagaaagcaggaggtctgtgggactaactacggcccctaccaatgaagttaatcttggagccataactggccttcattctctccctcgtccactatctattmcgaattcccccgaccctcaacaacctcctcagatgttggtggcttacctggtggtgtgagccaaaccttcattctrggggtgagaggagggggagggaaggggataaatgctaaataatcaaacccttctcagggttgctrcatatcctttcacaattacagtggggctacctggaggtgcacagtggatcacatgggctccacacacattcctcctgccctcattatccagaagcagccttgccccttcctgttgatccgggtcagttatccctgccagtatgatgactcttcttgtctgctggtttctgagcacgaagaatcccaagtgccctgcagcagccgcaaaccatacatagttcaataggacccttgctatcatactgtcccccagttaagtgctgtgctgtgtggaattccatgcctttggatcaggcattctgtacatccctggaaagtgaygctaactaaggctctgtggtgaggaaaggcaaacccatgcccagaataagtctctatccctgtagagatgaaccattggcccttccagaattgaaagggcctgatgcrgttgacttgccccaagtgatgagttggtctcaaggaatagtgccatttcaggggctcagcattggcctctcttgctgacacactggacatctgaaggcccctagacttttctgccatatcacatcacagtgatctccaaaaggcctcttaaagaggggccatgatgatgctttgggctccaagtgttaatgttaactcaaactctgcatctgctactcctcaaaatgtcttgttatccccatttctctagtgaatgattacctaaatggccataggtccctttgggggaaaaaaatgaaggaatcattgtgacatatacttgctgcaattctrcaaggtccttcctcttagagagctggccagctctttagtcaatggttctcaaacctaagctaattttcagatatggaaccattcctttctaagggaagcacctgtgagggacaatgggcagggaggccagagaggttgggagggctatcagaccatgatgggggtggaccgctgtgaaagagagagggaaggaaggaacaaatatattgaataaattataaacatctggtgcatactgggcactgaatkgctcccaaggaatctctggatgaatacagtacagctcagcccccaaagaactcacaacctaaagtagacccaggctatttgctgtaagcagaataatcccccacttctctgaagatgtccatgttgtaatccctggaacttgtgaatatgtcatcttacatggcaaaggggaattaaggttgcatatgaaattaaggttgctgaccaagacattatcctggatcggtccaatgtcatcacaagggtccttataagtggaagtgggaggcagaagcaaatgtcagagaaagacccgataggaaactcaataggagaaagatttaatgagccatttctggctttgaagatggaagggggacagatgtgagccaagaatgtggcaacctctggaagctagtaaaaggaagaaaatggattctccctcagagctccagaaatgaacatagccctgccaacaccttgattttagcccagtaacaycattctggacttctggcctccagaatagtaagaataaatctgtattgttttaagctgctaaatttgtagtaatttgttacaatagcaataggaaactaatagggctatataatgaaccacagtgatttgtgcaattgcatcgtattcgtacaacagctrtatactgggggcaggagctcagaacaagcaaattggatgggggatggcctagggagaataagatgaggcagaggggcataggtgcaatgtgatatgcagaggcagctgctgcaaggccaagagggacactcacacatgcaaacatataatcctgtgcacacacatgcaacacaaacaagggcatacatgttctcacatatacacaccctagtgatactggcacttacgcatgcagactctttctgacgtaggcccacccactgcctggattccacctgtttttcgtgacctctcttgtattagtctatctcatgctgctaataaagacatacccaagactgggtaatttataaaggaaagaggtttaattgactcacagttcagcatggctggggaggcctcaggaaacttacaattatggtggaagggaaagcaaacatgtccttcttcacatggtggcaacaacaagaagtgctgagcaaaagggggaaaagccccttgtaaaaccatcagatctcgtgagaactcaggatcacaagaacagcatgagggtaactgcccccatgattaaattacctcccactgggtccctcccacgacatgtgggcattataggaactacaattcaagatgagatttgggcggggacacagccaaaccatatcatctctgtcatctcttaacagcatatttcctgagggcagctgaatttagcaggtggggatagggcttgtctaccacggctccatcactagccttcacctgagcaggaggtacactgggaggctgagactcaccagttggggggcaactggttattatttacctgcccagcattttagtatgtgcggtgtcagggtaagccctgaccatgcacatgttctcccaaatctcagtctctcccctcacagctgtatgatggaacctattatgaatgagctggtcacccaaaaccagtrtgtccatcttcccatgcacttgtctgtscattttctttcattcaacatacatttattgatgcttcttctgtgctaatgcctgctcctggatactctggaccccaaataaaataacctactatccaagatatgatttctggtgtaaycagagctatgatagggtgagagcaagtaggagcctgcagaaagatgggaggagctcatagcccagccttggggtaagagaggacttcctgagtaaatgacatttaggccgagtattaaaggataagatcactgggcaaaggtgaaatcacraggagcaaggaaaagaagttaagtcaggtttgtgacatgtattttagaaagatctccctggtgaggatggcgaagggggactgggagggaggcaggccagtgagcagctgctgtaattatcccaacctgagaaggcagttgggctggatagacgtgggagctccagagacatgcctgaggtggtatctgtaggatgtagggcctaactgatggagacagaggggataaaggaggagaggggcacttgaagactgtcaggttgatgtctgggacatctaagaatggccccagcctcagactcaagtgccaggagtagagaaaggatgaccaggtggggggcacccaggccctggtgctgacttcaggagcaggcatatgcttcccagctggtagtgagggtatgtgcagcacttccaggatccgggaggggttccccaagtcacatacacacacaccgatcacacgtctgggcttagagaaagaagttaagtagcccctccccattttaacagccgaggagtccatgatttcaggaggttaaacgaccttctccaaggccacacagcagtgcctgatggaactgggatttgaacccaggcttgtctaactgcatcctgtgctcttctccccagtcctgacaggtcaaccaggccagtcttggcaccacagaattaagagtacaggggacctctgacctctacgtcacacccagcctggccaggccayttacagggccattcaaagccaggactgcctcaccctcttagacactggaccaggacataaagttctctttgtgggcagaatgagcttgggcactccaaggagaggtgggatgggcccacagctaacttagccctctcatacccactccataccgtggccacccaccccacagctagagcacctaagaagtgcatctcctagcctggaggtgagcaggaggagccaaggccagcatgtcccccactgacacacagctcagccatagctgggccttccaggaaatccagacctgggcaattagaaacagagagctcagggcttagaatgagatactatgcaggatcctggtgaggatctggccctgtctgagcctatttcctcatctgtaaaacatgaagttaggcttatttatcctacagctcccacagctgcaatggtctttttgcatctcctctgcagtccctggcctcatccaagcctaagagttgaacaacagatgcctggtccctacggaaagcccccaactctggcctcagcagatccacctcctcactccccacaggtcccctgaggttcagtgcagccccagccagaagaatgtgaaccattcccggcatctcctcccctgtggccagcccagagaggggctgaagcctctgggcccttctgacaggaaattagctgggcctggccttccccactaccagctgctctgctgaccctgaccctgtgttttctgaaacttgatactgcaaatttcaaagcctcttctccattccctggaggcctggctgagctgtgtgtctagtggggcctccagcctacgtgtgggcctgccttcctgtcctggaaagggccctggctgagagtggggcagggaagcctgaggcccagcctctgccatgaccctgagcagggcctacccccaggcgattcatctccccatctctgagctgccagatggaacccacgtgcagagtggctgcaacatggagaatgggttggagggacacaagaggggcagtggagagaccacttcagaggtaactgtcatggttcagagaagagatggtttggactaggatgggatagtgaagatgacgaaaactgtagactcaagaggtacttaggaaaacggagagatactggtggtggtttggccatgaagactgggggacacaggtgtcaaaggacctgctaggtttctgagttacccagctgaacggatggtggtatctttccctgagatggtgaacaccaaaggatgaccagggttgggtggaggaggggaaaatatcctgtttggccttagttagaggctgaggtgcctttgagatgtcccagtgaagaggctgagcacttggatatcaagaggtgaataagctgaagatacttatttgggagggagaaaagtagatggtagcttgaggacatggataaaactgccaagaaggaagagtattaagtaagaaaagagcccagcctgtgtcttaaggacactaatattcaatggccaggtaaaggaggataaacctggaatagagggtgaacagagaaagagcattgttgtgccttgcaatgaatggagaagagtgtttccagaagcaagagaatgtttggatgctgctggaaaatctaaaagaagagtagaatgaaaaatgcactttggatttagtgtcctgaaggtcacctcaccagtgattttagggagtgctgtttcggtgaagtgaggcaggtagaggccaggctgtcatggacaggaggcatgtgaggtgtgaggaaagagacagtgctctggagatgtttgacyrtggttgagaggagggtggggcagtagctgcagtaagacatggagtcaaagaaaggggcttttgttgttttttaaggtaagtgagattcaagcatgtttaaatgttgataagcagaatcytgttcagatgagaggttgacaatgcctgagaaaacagggacaacaaacataaaagtgtttttgacaaaccaggagggcttgccagggcccctcagcagggtagggctcagagggaacatctctaatcctttgaagctggctcctgggcactaggctggctgtggcactgcctctgagtgctctatatgccccacagccaaggccagcgcccttggatggccaagtacatgtaccttatggatcttattcaaccctagttgaggatggcaggggttagagatgactggacagaccatggtgggccatgatgtcctaaacaagggtgctacatccctggaagaagagccatgggcctctaggcctattgtggacattaagcccattgccagtgacaggatgcctggagccctgctggatgacatccctaagtccagggtccccagattcctccattccagcttggcaaggccattttggctctactggcatgggacacttccaggcataccacagggcagtggttctcagaggacggcctctagactaggagtatcagcattacctagaaacttgttggaaatgcaaactctgaggccccaccacagatctatcaaatcgaaaactctggcagtagggtccagcagtctgtgtgtaacaaagtttccaagtgactttgaggcaccacttctataaggtatcaagctgttcatccctccatttgctgtccatccagtaacctaaaattcacacatccaccaatctaaacagccatcatccaactgtccatttctcaatgtaattcaaccatctgtcttagtcagtctgagctgctacaacaggacatccacagactgggtggcttataatcaacagaaatgtatttcttgccgttctgaaggttggaaagtccaaaattaaggcactaacagatctggtgtctggtgagggtctgcttcctggctcacagagaactagctatcaacaatccatgttcacattctgtccagccacctgtgcctatctatctaatctgatgtartctagtctatcatcagcctaaatagtcatcatcctaaacattcctttatttatgttacatacatctactcactatcctcacaactcatttataatacaaaggaatgtctaagttctggtacccaccatacccacctcccctttctaaggaaaatggacacaaacatttctttctgcttaaagtttcaggatcatatcatgtgtattaagtgaaatcagttctatttctctgggcagcaaccctgactggacaaggggcaggttcttggggttcctcaactaaaggcaactgtgtttgtatgtgtataatcttaacatatatacacacacatatatatatagtagcttatgtattacacacakatatgatatattctatagatatagatctgtcagacatatgcgtacatatataacttcaatagcttgccataaaactctgcccaaatgaggttctctgtactggatggtgacagacttagccagtcataaacattctcttccttcattttcttccttggagagtgtgaatgtttggtctcactgagaagtcaggtcacttcaagctccagttctatcctaacaatggtaagctatgttccagttttcaattaagyctgctgaatatacctgccttgaaagagtgggatttagagtgaccttacagttcagacagaaacarctttgctgctgggcgtgactctcaaccctgcatttagccctcattatccaagacaaatgtcaagctgcctctgctggagggtggagctagacagccacactataccacgtatcctccttgtccacagctgatttgagcagggccacctcaccagagggaggtcgcacccatatcccatccatcagcaaatcctgattaccttcaaaatacgtcctaaactggaccacttatcactgcyctcaccactgccaccctggtccaagccaccaacatctctcacctggatttctgcagttgcctcctaagtggtctccctgtctgtctccctttcccaccttgtccctttcagtctattctcatcacggcagccagagaggtcctttttaaaatctaagatcatgtcatttctctgttgaatatcctctaatgcctcccctccttcttggagtaaaagtctaagtcctcacaatggcttgtaacacaattcatgatctgtcctctgctacccgtctgacctcatcttccaccatcctccccatgttcacacaacatcagccacaccagcctcactgatgttcctcacacagtgccacacagttcccacctcaggaccactgcacttgccacgccctcttcctagagcattcttcccccagatatcttcacggctcaccccctcaatttcttcagatctctgctcaaatatgaccatatcagggacaccccctctgagtatcctatatgcagcagaaacccaacccctccccaaactgctccctgctttattttttccatagcatttaacgtcagcacacatgtaactgcctactgtctctctctcctcattagaaagtatgcttcataaatgcagcaactttgttttgcttgctatttttcaacacgtaggagctttgttgaggtacaaacagtcacataaataagcacttggtaaaaacttgtagaaggaatgagtaagagtggctgagagtagaccatgagcaagaaaatcgagcagagggagcctgctgagacaggaatgagtacagagaaatgtgagaaagagaggaaccttgaggtcctcgggagacggagagaagagccaccgttcctgactttccagttccaatcttcatgaggcctgaatgtcagtgctctctgcaaggttgtccactgtattctcacaattgtactcctcattcttgaaaacatttggagttttctttgttccttgcaacaaaaacaaccttgacttgagcagtatccttccaaccatccatccacccatctctccaaccctacatgccctcctaatcatttatacttctttttttttttttttttttttttttgagacagtttcactcttgttgcccaggctggagtacaatagtgcaatctcagctcactgcaacctctgtctcctgggttcaagcgattctcctgcctcagcctcctaagtaagtgggattacaggcatgcaccaccacacctggctaattttgtatttttagtagagacggggtttyaccatgttggtcaggctggtctcaaactcctgacctcaggtgatcagcctgcctcggcctcccaaagtgctgggattacaggcatgagccaacgtgcctgactgatcatttatacttctaatcatctgtctacagatcagtccactagtccattcatccctataagcatccattatcctagagtccacccatcacccatcgatccatataaccaacaactatccatccacatgttaccctttcataacctccaggtagaggggagtaaggtcatgaaggatctcatcacagggctgaggccatccaactttaatgctgaaaagtgggaagctatggaaggattttgaacaggaaagttatatagttggacctgtattttagaaaaataactctgacagctataagcaagatagataggtcttactgtctaaaggcgggaagaccagttggggtaatattaaaatattccagatgatgaattagggcagagacacaggggcttcagaaaagaagattcaagggagagacaggaaagcagctctgggaacaagcccaagccagaagggcaggcctagatggaaaactgtctaatagggggcctcagttttgcaatcaccagctcagcccaagcactgtatttgccccagatctcaagtggaaccaggcctcctgcacattctgcacatttggggcagagttcccaagaagcccaatccagaaccagtcctctctgggcccttcagcagagcactctgtcctgcatctcaggtctctgagtaagtggtatttccagagtacacatgcccccaccaactcatctcacagctcagccttggctacagaaagccagggcctcttctttgttaattttcttcaactcctcagaggttgggcctccggcccagtgaagtcagggtctgggaggcagccctggctccctgcccgcccacagaggatatatttggagcaagacaactccttctggacacagagcttgggacccaccccgcagggctgccccaaccaattttactgagtatccacgcagtgtggttgtcactcacgttttcacttgttagttcattcatttgtttactcattcattcattccacaaacatttattgatctgctggtatgatgcagcaggtacaacaggatgtgtggtgggcacatatctgtatatgtgtgtatatgggtatctctaagcaaggatggcagaacacactctgggtgccctccctcagggttcagtggtgatgatgactcacactcaggtgtatatggcatctgtggggacctgtgtgcaagtacatgcaggcacgtgctctctgaggaggtagctatgactcagtggcacgcggcatctgtgggtatctgtgtggatatgtgtctgagtgcaggcatgagcataggcgcttgctccccagggggtgggggaagtggttgtgactcagctgcacatggtgactgggagcctacaggccagctgtgactttatggctttgcttatttgccaagccaaacagttagtgttgggcgtaaatattctatcagagtgtgcrtggaataagtcctgagctagggacctccagcaggcaggagagactcagtagtcttggcccagcagcatctgtcccccgcctgccccctccaccgtaggtatacaggtcctaccctccctccctcgccctctccactcctgcctcctggagactcagcgagctcgtccctcattgactctacatcacccctcacccaccggtcccaggtgcacacacgagaccaggcccagaggtacagggctgtggccttcgagctgccagcccaatccatttttctaccataccaaaaaccccttctttttcagccctcatgaccacgtcttcctccaacatcccagccccggtcgtaggctcggcaagcccgctccagggcccacttcccatctcggcggccgcagacccgctgcctccccatcggcgcggccccatcttcacctctgagctccttgcccctctctccctggctgtctctgtccttatctgtcccaagtctatctttgtctcttctcgagccgggctgtctgcagcagaggcttcaccagagtggaggtgctgacagagtgcggggtgtggggaggacaatctgtgtcccttcttgagccttatcgggaaaacttaagtcactgctcagggctcagactggaatttcgccctagatgaccttgctgggtctgctggggcctccgcagggacagccagggtcaaacgagtcaggaaacaggcccctgcttgtgggccgcctgcccgccctcatcccaaccargccgcctgcagcgccctcggcgggagacgccggggaggggagagaagggaggagacgggaggggcggccccgtcttgggcactcgcagggactggcgggaggccgtgtggggctggaatcgtgaccacggatgccgcaaggccacagggccctcctcggggtcccggccggaaatcctcaggggcccgaggaggagccggggcggccacccgaccacctccccgcgggccgcaggcaggcggcgcgccgtacccgccgagaacgcgggaagaggccatcgcgtctggacacctgggcttcgtcccagagccgtcactgctgtgtccccttgggcaactgcctagctccctgagcctcacttttcacacctggaacataggaaaattgcgcccaccttctgggtcgtggcagataaaatgagttcacgtcagggctggctctcaggaggcgctcagtgctcgtggctttcctccccggtggacagaaccccggggcagctccccgcgccctgacgcccagagcggagcggcccggagcggagcgaccaccgcacactggacccgaccctagtcggccccgcgcgcccgggtcggggctggaacctgcgggcgtggcgcacgcctgccacctggcggcgaagcccccaggccgcccgtcccgcccacggctgcgcgcgtgcgcaggcctgcaccacccagtcgcccccaccacgccgcgccccgcctccctcgcccagggacttcctaggccacgccacgccgctccaccagctcagggaacccccttggccgtgcagacctgcgccacagggtcgtttcctcccctccttccctcgaaagcgtatgcatttcgttgcccctggaactggggtcatttcaggacctcccaaggagggtcaggatggtggtattggccttaggggacgcgggctcaggttggcggttgaaccgcatgttcctgtttcaaacaaacctaaatgtaggcctggaaggctgtgcactgaaatcctagtattaggttggtgcaaaattaattgcgatttttgccattgtaggttgtctgcagagtgagattatggcgaagcattttattctttttacaaacctgctttttctcagttttccacattgggtatgtattggtgataaggaaaaaaaaactacaaaatatattttttgaaaaaaaaaaatcacatggagagagagaaaaggggacgaattggcctatcaagggggtttccggaagttaactttctagtatctctgtttgcatgtagactcccagggtgccctgggagaaatggagaaatgaagcccaggacwtgaggcattgggatggatggtccatctttcacatgtgctgggattaacttcctttaagaaaaaaggaaggcaaaagggttcccagccttagggttgggtggggtagaggctccaaataaaccagaaactcttgagtagaggtggtcagtcattgctgtctggttcaagcgctgattggacccaaggggaccagatccaggatatatttgagaacaaggaatttatttcagaaaggggccactcaacagtcagcatttactaagaacctgcttggtacagggtgctggaactaccacaacgaggctgccccttcccttaaggagttctgggctgacttttgggaaagttcatcagcggtgacgggtagtgagtgaggcagatcagcaggaacattacaagccgcaggaaccgtcagctgctgatagaggccctgggaggtagagtggagaacagctctggccaccacagctaatggccaccaagggagcgacaggacccttgaggggagagcagaggctggaggtccttggggtctactgggaggtggcagtcacaggcccttgggtcctctccacagccttgctggaaccttccaaagagcaggtgtgactggggaagtgtgttgctgggctgtcaccctcacctgggacctcctctgtgcactcatccattcacagatttgccagctacctgcctttgcaggacacctcagaagttacagacttgcctgtggaaatgcagagagcacctgaggtatttcccggactctccagtagtagccttgaatggctgaccaaccgcagtcacctgccagatcttctcagaaccggccagcccaccagcgacaggcccattaagtggcctggcccagcccagatggaaaaccccctccacgtgactttctaaagaacatgcatgaagacaaaacaccaggtgcctcaggtgtgacaccctgaggacacatcacctgtacagtatcctaacccacccaagatgacacagtaaggtaaaaccacagtagagcccaggcctgtttgactctgaagtccaggctcctttccaacttagtgccctaaaggcctgattggggtgggggtaggcaggaagattcaagcactgattgtttgtagcccaggctgggagggcaacagctctagaaaaaaagtcactcactgctttaaccatcttccagctaactgcagtgaggtgtacagggccatggggctctgggatgaactcttccacctctacaccttgtaaacaaggattccagacacaccctccaaatgggaatggagacacacgtttggcagagttggacagtaacgctgctctcctatcagcctggactttgaggggagtggaaaacatgagtgtggaggtgcagcagtcctggtatcccctgaaaccagcctgtgggggaacagtcttcccaggggagctgctcaggatcgtcctggtccatgcatcaggaagaaaagggaacctgagagcagagggaaaatgcagaaagtggggcagggagactgctccctgaaacccccatgggctgctggtccaagcagaaagtgttgtcggaggggggagaggcagggtgaaatgggacaggaaacgaggacttccgatgaggaggaggagggggcagtgggctgcgggtcttggggactgaacagaatggggtttgctagacagagctttcgtctacccactcctgaagtcctgctggacctcagctggcccttgtgaactgttgagggggatataaacacaaaggcctgcattcctgtgggtgcacaatcctaagagaccatggactgcctgtgtgtggtgggaacaggaaaaggaggctgagtgtagccctgcttggaatttagtgtccaccacagatgtatccactacccagggccaaagactcggcagcctcagaagactcaatggaagctgagcacaggactagaaagggtcagggccctcctctgtatgtaggggtggcmcatggccactagctgggtgatggggcactgagaaattaaatgtttgacataaaaatgtaatcaggacccgagaggaggtgggtggtgtaatgaacagcatcctagaagtccggtacagatttcacgtgtcaccttctagttccttatctgaaattgaaaggtgaggtcaggtgcagtggctcaggcctgtaatcccagcacttagggaggctgaggagggcatatcattgaggtcaggtgtttgagaccagcctggccaacatggtgaaacctctactaaaaatacgaaaattagccggctgtgctgcacacgcctgtcgtcccagctacttgggaggctgaggcaggagaatcccttgaacctgggaggcagaggctgcagtgagctgagatcacaccactgcactcaagcctgggcatcacagcgagacttcttaaaaaaaaaaaaaaaatttaaaggtgagccagttcaggcttctagaggcactgcagttacagacggtaaactgcacaaatcctgggtgtgaagctgttttttcctgtgtaaccaccacccatttacagcatcccagaaagttcaagtgtgtcccttcccagtttacagccacccgcctcccaccctcacttctaaatccaccgattagcagtgtgtcttggaaattaatatacaaggaatcatatagtatgtgctcttttgtgtttggcttctttgctcaagatgtccgtgagattcagccgggttgcctctctctgtaatatgttaatttaggtgtagtatccattgtctggaaatacaattgtctattctctactggtggatatttgagtgtctctggtttggggccattataataaaactgttgtgaatcttcttatacaagttttttggtggacatcagcctcatttctctgaaatgagtggaaactgctgggccggagggtagctgttgtttttagctttagtggatattgccaagtaggaagtagggaggtgattattacagtctctaatatataaaaaaggagtagagggggaaagagaggaaagaaatagagattccataaactattcccaaaactgatcctttaacaaatctggagcacctcctctgcactgtaaaagctgaggagtgcctcttcccacgctttcatatgtcttgatcttattcacctgatcctcaccccactagggcagctgtgccttgctggaactacccagaaggttgcaattaaagcttggccagttagaacaagcacaagcgctgtgcgggacacatcactacctgagtggcaaatctgaaaattcattcctcacaagctgctaaatggtgctgacagacccaccctgtgtttcaccacctggaaagaaatcagggttaaggcagcttttacacttcatgcctcagcaacttgcatcatagtcttttaaaatatatccaaagcaaccccctccagaggctctgggtgtgtcagaggtccctgccctctgctctctgccagctcacagagaaacaggcattctcccttccaggtgctcctcatttgcactgaagaggtcagtcaactcctaggacatctgaaagggaaaccctgactccaagggttatattgtgttctggataatagaacttgcctttctgtagagcaggttttctcaaccttgccactactgacattttagtccacataattgttaatgggggctgtcctgggcattttaagatgttttgcagcatccctggcctctacctactcgatgccagcaacactccctccagttgtgacaacaaaaaatgtctccagacgttgccaaatgtcccctggagggcaaaattaccaccagttgagaaccactgtgatagagaaagaacagttttttgtttttgtttttttgagacggagtctccctctgtcgcccaggctggagtgcagtggcatgatcttggctcactgcaagctccgcctcccgggttcacgccattctcctgcctcagcctcccgagtagctgggactacaggcgcccgccaccacgccyggctaatttttttgtatttttagtggagacggcgtttcaccgtgttagccaggatggtctcgatctcctgacctcatgatctgcccgcctcagaaagaacagtttttaaacacaccaaccagtgtcctctccctccctccaagagggaaagatcagctttccaatatacaatcaagctggcctgagtgggcccacttagtccacaacaggcattttatcttggcaacaatgcaaaccacaacaaacaaacaaaaagccacacggtttactctggtgaaagaaaaactgaaaggcataaaaagaaaactaaggaaaacagaggtaagaaaatttgaaggtaacagcaacaatgaatgagaaatcatctttgtaagttcccgtttgtgagctgacacatcagccatggcttgcccacattcgtgactcaaacaccaaacatgaggccacagctaacttcttggggtctaaactccaaacccagtgttttcaggaaatgtccctaaaccaaagtccatctcattatatgaaaatacacatagatacacccaactttaccccccactgttttattaaatcagacagtttaaagtgtatgttctggtatttttaattttcttactgggtccattttacttaaaaaaaaatataaaacatttttaatgtatcttagaaaaattagcaaaaaattgagaaagttgagcatattacattgtacaatgttttcatacgaatgttttaaaatcataaatatttggtttcccctcaacatagcacatcacaaaaatacatttcaaaaacttttttcatatataattcctgtaaatgatcatatccctacttattaaggaaaacacctgatgacaagcactcaaacactcttgaaattttctgtacagtaattacaaaagtaaaaccaagagttctgttggccctttaacaggtgaaaccattttaaatagtatcaaaatataattccaaatgggatatacttagttcatttctgtgctatctttgattcacaagtatctatcttagccaaagcactgtttaaaaggatattgcctcctagacatagtgccactgaaaaccaagatgtaaatcggtaacactatgcattaaacagaaagcttttgcacaaccacatatgtaaccgcttagtcgtatcaaggtccacatgtgaccagaaagcaggcagtccttaggtggatggccaggggccaggcagtgtgaggtctccaagaacccagggctagagcagctaagccccaggtcatgttatcagctacagctgtggaataagccaggtttaaagaaggacattctgcaaaagtgcaggacctatttcacaacttctagaagtagaaattcacatattccatcatgatcctccccaccatgcagagactatttgactcctaaggccacactgtttccatcccatagatttcacagaggtgattaggttctttgtagaatactttttcctcattctggaatgagggatactggagtcttctggtgtgatgtgcagtcaaaccacaggaaaggttccattccttacctaagtctcgtttgtctaatacacctgccagctactgaataaaatgataatactgataaatggctgggcagaaatccaacacccaaatcagctgtcaaatttcaaaggcacatgatacaaaaatattttagacaatacactttataaaggcaactataagaaaccgttaaagttacatttttattaaacagccaaaaatcttaagacaaatacctacagaccatttcttcattggcaaatattttccagtcataaaaggtgataatttatgggattatattccaataatttatgggattatattccagtttcctctcatgtaaataaatacatacactgaatctctaataccactctctctagatgtatacatctatttggaattgctttcttagtatgcactcagcaagcactagcataagaacacctgaggttctctgtcctcatttaatacctgtaagagaaaaggactttattctactgaattctgccctttttttgcaacaactgaattatccccatatttatttacaattttaagcttgattgctgtccacggagttactgttgcttctcaattataactagtgttagaaggcttgatttcataaatgttctttttaatccaaagatagatcatatatgaaaaccttcctcaatactcctttcaaatcagatgcatataaactatgatcccaatttccctgttagacgtatttctgttggatatttcctccgttgtcaccacagaggaagggaaaaagcagaaaagctgcccacctaacaaaggctaacataatggctaggctaatatattgacatgctatcatctttatgatgttttgaatctaactagcagacatacagtcaacttcctgttgaccatgtgcatctaatctgctttcttaattatacaaataatttttatttcaaattagcttctttctactactcagtataatcctctcacagcctggcatatacttggtagcacatcattcactagagagagtacgagagaaaattaggttgacaatatggggcaaaggggtagtctcctttaaggtgaggggaaaggagatgggaatgaaacatgccaagtgtatgatggttagggaaagaaatatcttagtagaagctagaaaacctctactaacaggatcacattccaaaagggcaaccaggaaatggcaatgactccatgacttctctgtcagagcaccaatggtcaaaggcattccatgtcaagtgtcaggaaatggaaagcgaaccggccaatctagtttaacagcacatactcggaaaaggaaacacgctgccaaaggaaagagctgacatccagtccacagaggttctgagtacccagtggcagtgagcccctccaaactctgcagagctgactgtgctgtctgcaccctgcctcatttggggaagaatctgagagagctaaaagacaaatttcagaaggtgatgttttcaaagaaagagtaaacaaacagcttgacaatgttgactttttttttcttttcaggtaacccttgtttgcaggaagataaataagaaggcttccttaggatactgacccacttagagaggcacagaaggaagaagagttaaaagcagcaaagccgggtttttttgttttgttttgttttgttttgttttgagatggagtctcactctgttgcccaagctggagtacaacggcatgatctcagctcgctgcaacctccgcctcccacgttcaagtgattctcctgcctcagcctcccaagtagctgggattacaggcgcccgccaccacgctcagctaattttttttgtatttttagtagagacagggtttcaccaggttggccaggctggtcttgaactcctgacctcaggtgatccaccc

SEQ ID NO: 94056 - DNA, 27063 bp, Homo sapiens
ttttagtagagacggggtttctccatgttggtcaggctggtctcaaactcccaacctcaggcgatccacccacctcggcctcccaaagtgctgggattataggcgtgagccaccgcgcctggcctgtttcatattttaaaatggtgtatgcaaaggatctgattcaatgacagagacgtgatagctcctcagtaagtgacagctgccagtattattgttgggtgcgcagtgcaggcccctttgaccctggggttggaagcagcagtgaaaagggcatgggcatgctcaggcaccctgtcccccaagaggatgaacactccttgggcctccacaaaggcagcattagtaggcatgcctatcctgaaaaatgcccctgagccggagagggagggaccagggcgggtcattggaatctggttttccagaaaggcagcttggaaagagatttattgggcagacacacctggtacacttaggatgtcctgccctgactctggggacaggacatggggaggaggctcacatcaagtttctggagccctgtgaggtcaggagctcccctcagcttacactctgccctccactgttttttggtcagtctaaaaggtcaactggtataatgggaagcacaccagcctccttccccagctgatcttgagcaagtccctcggcctcagtggtcccgacctgtcagatacatgagtgggacgagaagacctgaaaagccctttccagcgttgacatcctagcatcgctttgcttcgtggctcttgtctgcctagatgctgttctagattttgggagagcagctgtgagctccccaggcacaaccccttctttcacccttcttatgggtgctggagagacagacaataaacgcatcaataaacagataaagatccttttgggcggtggcaagtgcagttggagatacaaccaggtggcagggtagcatgatggagggcggagggcggggaaacatgagggacggtggtcagggagggactctgaggaggtgacactagagttgagacctggatgacatgaacaacacacgcttagggtcgggtgcggtggctcactcctgtaatcccagcactttgggaggctgagacaggcaaatcgcttgagctcaggagtttgagaccagtcccggccacgtggcaaaatcccatctctaccaaaagatacaaaaaattagccaggtggactacgcctgtggtcccagctactcgggagaccaaggtgggaggatcgcttgagcctgagaggtggaggttgcagtgagctgagattgcaccactgcactccagcctaggtgacagagtgagacaccgtctcaaaacaaacaaacaaacaaacaaacaaacaaaaccactcttgaaacagcttgaacagcttggttgaaacagcttgaacagcttgggggaagggtattacaaacccaggaatggcaaatgcaagggtcctgaaggacacatgttctgggtacagcaagaaggccagagtggctggaaaaaggtgtcgggaaggcatggtcttgtagacatgataagtccttggattcgtctcttttctttctttctttctttcttttttttttttttttgagacggagtctctctctattgcccaggctggagtgcagtggcgctatcttggcttactgcaatctccacctcccctgttcaagcgattctcccgtctcagcctcctgaatagctgggattacaggcgcgtgccacaacgcccggctaatttttgtatttttagtagagacggggttttaccatgttggtcaggctggtcttgaactcccgacctcatgatccgcctgtgttggcctcccaaagtgctgggattatgggcatgagccaccgcgcctggcccttggattcatttctacggacaaccccattttaagctctggtgaactttaagcaggggagtggcgtgatttgatttttctttctctgtgtcttaggagagtgggtccccaggagttagttgctccttgccttgcagggcttggggtggggtcaggcacgggggataccccagcagtgagaactcagcttcctgtgtggatggcccctagttagcaaccccagtgagtgtgaatccttcccagaaacctctcctcctcactggctcccgcccctggtccaggagaaccagttctkcagcccaatgagcacctatcaagagtcacgcgtctacgttttggtcatagctggggagtgccccatytacatcctcatgcctgatcccgtccctgtccctgccccagccacattgacatcctcagcatccctgcctccatctctgtctccctcaggaacctaattcccactccacactggagccctgagcaaacccagggccaccctgggatttgggttggaggagacctattggtagcaggatatgactcagtttgcccagtccactgccctgcttctcaccaagcctcagcagccccctggggacacagggcaaaggggagagattagaaagaggaagctgggagaatttgcatggaatttgcatcttaagatttgcatcttcaggctcccagcatcctccaagagtcatcgaggtggttgaggagggagatcccaggggggagatccagctggacggcttctgtctgcagcccaggacagccagccctgccacccagagctgggcacaaccctcatcctcagccttctcccctctcctccctccctccccacccaacccctttccctcccctacaccacgccttgccccttctctcaccctgagcccaagtcagctctcttcggatcttcaccataactccaaagccatcatcgattcaatccccagccctgaccttgtccttgtcattaacccattcaactatgttttcggtgtctcccaggtaccaagtatgacaccaggagatggggacaaaaccaaaaaaaagtatggactaatttattagagaaaacagacatcaatcaaagatgttagctatagtgctgtgagagccatgtatagtgaaatttggctttcctggaaaaagcaattattgagctaagatcaggaggaagaggaaacgtgacctcagtttgagaggtagagagggaacagcatgtgccaaggccctgggatggtgacgagctgacttcacttccttcaggtctttactcaaaagtcttcttcccaaggagccctccttggccactctgtatctaaaatatcctccttttcttttttctgagatggattttcgcttttgttgcccaggcttgatagcaatggcatgaccttggctcactgcaacctctgcttcctgggttcaagctattctcctgcctcagcccccgagtagctgggattacaggcatgcaccaccatacctggctaattttgtatttttagtagaaacggggtttctccatgttggtcaggctggtcccgaactcctgacctcaggtgatccgcccacctcagcctcccaaagtgctgggattacaggcatgagccaccatgcccggcactcctctattttttatattatccttccctgttctctcttttctcttcagcacttatcactatttaacatactatttaatgtatttggttactaggtaatattgtctgcttccctcacttgaaggcaagctccatgggtgcaggggtttgctttgatcgcattgtattttcaggacctgacacagcgctgaacacacagtaggggttcggccagtgtctgttgatgaatgaatgaaaggcacgtggtcccagacagaagagagcaaaggggaatgtgaggggtgaagccaatcaggcaagccgtgggggccacgggaggggatggtgtcactgtcccaaaggtaaagaggagccactgccaggcttgatcagggttgggaggagggaacatagagagtgatgtgaacagatttgggtctggaaaagatcatttcaatccccaactccagccacatctgtgtctctaacctaaacctgaattgcagtttcgaccccattccacatccagtctggaacctactggaaccttctcttcatctcacaatcccagccccctctgaccctaacttggcctgggcattgaatgaccttccttcgatggtgatggaagcgtgccatcagggaggaaagcagggctatgcttcctggttgacagaagctgctcctcggaggtgaaaggaaagaggacaggtccagaaaaagggaataggaacgtgcctgcctcctcactctccctgggtcccaaatcctatctttggagagtctatctctgactctctcataatgctcttcaccttactcctaacaccttctccctatcctgcggctctgacttctgtgattctatcagcaactagttcccaatcccaacctcccacgcttattttcttcagagcacttagtatccaaaattatagtgaacaaattcttgtttactgtttctttcacttctttcccagctattccgtaagctccatgtatgtttcatttcttctctgcctctgcagtgcctagaacgccgtgcaccgtgctcactacatatctgagggaggaacgacctggttcccaacaaacacagttccactggagctcagccctgcctccagccctcttcctagcttcattcttttttgggagggaagtgagggtatgtactttatgaaattaaaggataacacataatgaaatgaatgaagtaccctagacgcccctcagatcaagataagaacacctccagcagcctatatggcctccctctgccagggatactcaccagtagaggttgtctgagaattgctcagttttgctggttctggaagttcctatcaatggataacagaacgtatcccctttaatgtctggctctttttgctcaatatcatctttgtgagactcatccgcattgcagttcattctttttattcctgggtagaattctattttatgattataccacaaaatattgatcatattaatccattatttaacttaattcttttgtcttttttttttggagacggagtcttgctctgttgcccaggctggagtgcggtggcacgatctcaactcactgcaacttccgcctcctgagttcaagcgattctcctgcctcagcctcccaagtagctgggactacaggcgcatgccaccacgcctggctaatttttgtatttttagtagagacaaggtttcaccatgttggccaggctggtctcgaactcttgagctcaggtgacccacctgccttggctttctaaagtgctgggattacaggcgtgagccaccacgcccagctatttaacttaattcttatgccccagatttcactctgtcttctaatttagtttttttttttttttttttggtcttctgattttatatccaactccaatccctcaccagtggatcctggccccacaggaagcaacagatccccttctcctaccctgatcgttcctccccgcagcatcttcaggcctttgggcacccatgtggtccccgagccctagcttcaacacctcccacccttccagtcacagactctgggccctggggcagaaggacaggccagctttctcactgtggccactacctgtcccatttcccagagaggaatggcctggaggctggccagctgcgctgccacttagtgcccctccccctcccctcccccgcccaccagtggcctcagaaccaatgcaagtcactcactgcccatggccctgcttagtaggggtgcctggcactgtagccaatggggactggcaggaggaaggagcttattagtctgataaagatctggggaccacaccctgccccctcccgcaacttccctagggccctggctcaggctggactggctcccccaccctgaaggcgccttcatccacggcatcttctatccrccctttcagaggcaggcccagtgccctgcctgctcttcctccccaccagctcccagaaggcttggagcccagacacctgctcactcaccaccagctgggctccgcctgggcctgcccggcacccaccccggccaccaagggcagcagcttttccagaatttggctggcaggccyagtcaccccacctcgccacctcaccactgcacctcggaggccagccctgtccactccactctgtgcctggcttctcttgcctgccttgggccttcgtgtggcccctccacggtgtctgggactgagtgcccctcttgcctcctgaagagcagccatggccacctacaaagtcagggtggccacaggcaccgacctyttgtcgggaacacgggactccatctcactgaccattgtggggacacaaggagagagccataagcagctgctgaaccactttgggagagactttgcaactggggcggtaagagtgtgtgtgtgtgtgtgtgtgtgtgtgtgtstsygtgtgtstgsgtgtgtgtcsgtgtgtgtctgtgtgtgtctgtgtgtctttgtggccccgggaggggtgaaggtgcgcagggggagccaggtgagctgagcttggcgaggagaggctggagagctgaggcacagctcygaaggcagtgggctccccagtggctctacacgccttgtccagagctggcttccagcccctcgcccatgtcccagatctctgggccatccttctccatcctgctccttcatctctaaccctttcaggcattcctcatctccctccccatccttttcttctctctccctcttcctcagccctctctccctgtctctgcctatcctgcatctctcttttctcaatcctttccacctgctttccttcccctttgctctcctcccctttctgtcttaccccctctcccgcatccctctctcttccattctcagtcactcttcctaattcagctgcctcctaactgtctcacatttgcactggattctctgtgacttaaaatggcatcagaccagcctgtccagtggaaggcacgctttgcgggtcctcagacctgattttcagtcagacccagccacctgctgctaggcgaccttaataggtcactctatctatgtggccattctgaatatctgcatcttcattgatgaatgggagaaggggctggctgggcctctccccactcgaaaactgtagagtggtacccaagtccccaggggtctgaagggttcctgcaacctcaggtgcctggagaggggagtgggagaagacaggagctggggatggagagaaggaggggctggagtcctayatagccctgggtagaggaatccagtaggagacccccaagctggagaagtcrgaaggaagctcaatgatcaggtcaatatcctgtccctccgtcagtccagggaggtgagcattgcgcagcatgagcagggcctaggtgaggggccagaggggtgggcggcctgggagccggggtgaagtcctgcccactcagccaggcttgcatcctgcctaggtgggccagtacaccgtgcagtgccctcaggacctgggtgagctcatcatcatccgcctgcacaaagagcggtacgccttcttccccaaggacccttggtactgcaactatgtgcagatctgtgcccccaacrgccgtatctaccacttccccgcctaccagtggatggatggctacgagaccctggcactccgggaggccacaggtaagccctcatcaccctgctccatcctatggccgtgaggcctctagctccagcctgctaccctggcatggcacccaggctcccatcaagccagaggggggcccagccccaccagggactmctgggctctcctgccactgtcacacatttccctcagtcagtgctgctgccctgagctcagcttggggctgcacattggaggaagagaggtgcctgaggcccagcagctaccctcagcatccccatctggcagcagacagcattcccagagtgcrctccccgctacmtctccagtcctccctgactcctataagatgcccggccaygttaaaaataccccktgtgatgctaagtacaggctcaggactctcacaggaggcctatttatgatgccaatcatatgcgctccagaaagacgccctgttactccagcaggattctgttactataacaggatgccccattattccaaccagcaccttgctatccyatttagaagccctttgagttcaacaggtctccrtggtgctgyggtcttataattatgacgccctggctttctttttttgrgacggagtttcactcttgttgcccaggctggagtgcaatggcacgatctcggctcactgcaacctccacctcccaggttcaagcgattctcctgcctcagcctcctgatgctagtttttgcatttttagtagagatggggtttcactttgttggccaggctggtctcactcctgaactcaggtgatctgcctgcctcagcctcccaaagtgctggcattacaggcatgagccccagttttctaattgagcattttttagactgatgggatgttctattgctccaaaggactccctattttcccaacaggacaccatatttctctaacaggatgcactgttactccaaaaggccccccttaatccagtaaggatctatctaataggggccctgttattcagatagactgtcagggtttctccaaggttaaggctggmcaaggctgcccagtgggttttccacttgcttggttactcccatgggagagacataggaccggagtggctgagctccttgcacccacccctgccagagccccttgtgtggtgggctggggtcagcttcctaatttgtggtgctgcatgaggactgggggcctgtcctctcttatctcccagttccaccacctgagtgtctgttggcttcccttgaggcgaatgggagggaaaggctgagctgaggacacccagggcccgaagccccatcctccctgcagctgactacctctcttccgtttctcattgccctgtgctggaatcttcccccaggattggggaacagggcctgarctggggaaaggagaggcgaggaaagcctgggagatggtgagcatgccaaggggagggtctcactggggacacagagcatcttcctgcagtgacaggtctgggtgacatggaagcaggggacaggcagggtgatgctggtggccaggcaggaatggggttgggtggggccgctgccacgcaacaggacagggagacttgagtcacccatagggccctcaaaggagtgagkcttccrccctggggatgaaaacgagctrggtctctgggttgcacaactccagggagcactgttcatccagaatacaacatgagctgaggcaggtggaggagggagagggtggtgaggtaagggacttgaggggaaatgatgggctgcagcggtaggcacaggccagcctggggaccaccagccagggtgctggagaaagacggacctggacttaggtctcagttcttccgctgactagctggacatttgggcatattttcaaattttttttttttgagatggagtctcgctctgtcgccctggagtgcagtggcgcaatctcggctcactgcaacctccaccttccaggttcaagtgattctcctgcctcagcctcctgagtagctgggactacaggcgagtgccaccacgcccggctaattttttgtatttttagtacagatggggtttcaccgtgttagccaggatggtttcgatctcctgaccttgtgatctgcctgccttggcctcccaaagtgctgggattacaggtgtgagccaccgcacccggccacatttccaaattcttctaagccttggttccctcatctgtaaaatggagataacaacagaacctacttcatagggtggatgtgagaatccaataagatgacatctgaacggagttgttttttttttgttttgtttttgttttttcttttgagacagagtctcgcttcgtcacccaggctggagtgcagtggcatgatctcagctcattgtaacctctgcttcctgggttcaagtgattttcctgcttcagcctccagagtagctgggattacaggcatgcaacaccacacccagctaatttttgtatttttagtggagatggggtttcatcatgttggtcaggctggtcttgaattcctgacctcatgatccacctgccttggccgcccaaagtgctgggattacaggcgtgaaccaccgcacctggcctgaacagaattttaaaaggcttaacaactgttggtggtcagaagcagcccgctacggggcaaatccagccttgtccccacgtaatacataatagcgactgtttctccttgtaaaatgggcatggggatacagtcctttagctgaaactgttgattccaggggtgctttgaaattcggattttattgagaagctacatacacatgtatctgtacacatgtgtgtatgtttatataaaatatgtatatgtatacatatatatcttcatctataaatctatatcacacacataccccatatattatgtgctatatctaccacagggcaccccaatcaaatatactaacacttcccagtaaaaactatgaatagttagacccagtgagttaaataaagattgtatatagcctcagggagattcacagcaggctttgtcaaccaatgaatttgttgtggaacaaacagacaaacttgatttccacagctttctgtactttgcagttgtgacgaaggggtcaccagcctatagtaatagtcacctgcctcatagggtgcttcttaggcttagattaataaaagtaaagtgtctacaaagtgcctggtgttggggaccagcctcaacaccacctgtagggtacccaaagtccggtggtgacgaaggaatgagaagagacaggttaagagtgcaaaaagagtgggggccagggaagcagttgcaaaatggaggctgcaaaaggcccagagttctggtctccacactatttattgagtacagtcacttagatctaagaagcagatgttcagggtgaaacactgaaagggaggcagtgcgtcacaggcgtaatctatagcaatagcggtttaaacgaatctcctttgtgctcaaacagcacatctttaacttatcggagagcagctagtgggaacaggcttaactaggagcctgcgcgtctgtccacmttccaggtttcaaaggagtgtctttctccttgaacacagtgtttatagataagacagcaggttaacgctcagagcatgggamcataatggcgataagaacgctttcctcctcagaggccttttgtgacttwccacagcttactgtcacatatttttatggccagtttatacaggcaccccacaagcccttttcccaatacctgggacctagtaagtgctaaacaactgtcagttattaatatttcagtggtatatacccaaaggaaaagaaatcaacatatcaaaaagatgccttatttattgtggcgctattcacactagcaaagatatggaatcaccctaagtgccctaatggatgactggataaagaaaatgtggtatatatacacagtggaatactattcagtcatgaaaaaaatgaaatcatgtcatttgcagcaacatggatggaactagaagtcattatcttaagtgaaacaagccagaccagaaagtcaaataccgaatgttctcacccataaatgggtgttaaaaaatgtgtacacatgggccaggtgtggtggctcacacctataatcccagcactttgggaggcagaggcgtgcagatgacctgaggtcaggagttcgagaccaccctggacaacatggcgaaaccacgtgtctactaaaaatacaaaaagtagccgggcatggtggcaggcacctgtaatcccacctactccggacactgaggcagcagaatcgcttgaacccaggaggcagaggttgcagtgagccgagatcatgccattgcattccaggctgggtgacaagaacgagactccattaaaaaaaaaatgtgtacacatggacatagcaaaacaatagacaatggagactctcaagggtgagaggatgggagggggtggatgatgagaaattacttaatgggtacaatatactttatttgggtgatgggtaacctaaagccctaacttggccactatgcatgtaacaacattgctcttgtactccatgaatttatagaaataaaaaatatttcagtgggtctagaggagggactttttgcagcagcagagcttagcttgacagtagagcaagaggaaagagggtgggtccgtgattcttttatctgatatttccggacaggacgcaccttcactctcccaaggtgagccttcccactccttggtcatgggcccccccagagacgacctggggcacagaagctgaactcctgcttcctgaagtgggcaggggcaagggtcagcccttgagtcctctccttggtctccctacaggaaagacaacagcagatgactcgctccccgtcctcctggagcacagaaaagaggagatcagagccaagcaggacttctaccagtgagggggcgggtggcagagtctgggcgcccggcaggggtccagggaggtggggggcagtgatggctctggccctttgccctggggtggtgcacgggcatgagggtgacatctcggtttcccttgcagctggcgagtctttcttcctggcctgcccagctatgtgcacattcccagttaccgccctccggtgcggaggcatcgcaaccccaaccggcctgagtaaggacccgaagctgtgctgggccccgcccatggttttcccckgggcgcctgcctcctccccgccccctggatcccagttgccctgcgcttctccccacaggtggaatggctatattccgggattcccaattctcatcaactttaaggccaccaagttcctgaacttaaatctccgctactccttcctcaagacggcctccttcttcgtccgcctggggcccatgtgagtscgtgtgagtgacgggagaacgagggctcctgcaagaactttccctctcccccaaccttggcggcctccaagacagccccagaggttggaatggccaggaaggcagagggagctgaaacgcagacccagaaaacctgagacatgatcccagagacctagagatgcaaagaycttgagacatgggacccagagactttgcgacgcacagaccctgagacccagagacctaagtggatggggcggccccgccacctgccccagccggcgcttggcagcccctctgaaggcytcttcctggaatcccatctcctagggcactggctttcaaagtccgcggcctgttggactgcaaacattcgtggaagaggctgaaggacattaggaaaattttccctggcaagaaatctgtcgtctccggtatggaatggggcgtcccggatcgagcagggggagccaggcggtctccggcgtgctaggcaggcccccgacttcggggcagtgggackggagaggcagcgaggcgcgcgcgcgccctctggcggcttcttggaaaatgtcgcaccgggctcctccggccgctcagcgccaggctgggggcctcgttttcctccccgactcctctcggtgcccatagtcttcttctgtcccatgcctctccgtccccgaggggggccgggcctccttgtgacgccctcgcgccgtcctcgcagagtacgtggccgagcactgggcagaggacaccttctttgggtaccagtacctcaacggcgtcaaccccggcctgatccgccgctgcacgcggatcccagacaagttccccgtcacagacgacatggtggctccgttcctgggcgagggaacgtgcttgcaagcggagctggaggtgaggcccgctccggcggagaccccggccctcctcccggcctccctcgcgggcatccccgtctctccccacctccggcgcccgcgccagtcccaggcaagcccgcaccycgcgtccctgtccccgtcccacccctgcccctagtcgccagcgccctgtgcacctgcggcgcgggtcacgggcttcccgtgtgggtgcctacttgccacccatcgcggctcccctccagaaggggaacatttacctggccgactaccgcatcatggagggcatccccaccgtggagctcagcggccggaagcagcaccactgcgcccccctctgcctgctgcactttggacccgagggcaagatgatgcccatcgccatccaggtgcctgggctgcaggcggcgctgccgctgagcctctgtgtgcgcgaatgctcctccgagtgtgcgcgcgcttatgtgagcgtgtggacctgcatgtattcagccgtctctcgttatccttgagagattggttccaggacctccccgggatgccaaaatctgcagatgctcaagtttcttatataaaatgtcccagtattgccggacgcggtggctcacgcctgtaatcccagcactttgggaggccgaggcgggcggatcacgaggtcaggagatcgagaccatcctggctaacacggtgaaaccccgtctctactaaaaatacaaaaatttagccgggcgtggtggcgggcgcctgtagtcccagctactcgggaggctgaggcaggaaaatggcgtgaacccaggaagcggagcttgcagtgagcctagatcatgccactgcatgtcgctctgggcgacagagcgagactccatctcaaaaaaaaaaaaaaaaagtcccagtatttacatataacttacacacatcttcttgtgtgttgggatcacaggcgtgagccaccgcgtccagcctgggcacatttttctagttcatacaaaagcccggtatgggctgggagcagctcaggtttgtatgcccgaataggcttaggtggagatgcaccttgcaaggctcaaggaccgccttggcagttccccgcctctcacctgcttgctgtcttggtcccctgaggtacagaagtacaaagtgcgctgctcagcggagctgggtgagctcttgctgctgcgtgtacacaaggagcgctacgctttcttccatgttgcactcctgggctcaagcgattctcccgcctcagcctcccaaagtgctgggactacaggcgtgacgacctcgcccggccctcttgtgtattttcaatcctctctaggcccgctctctaggcccggtgtggtgctcacgcctgtaatcccagcactttggaggccgaggtgggcagattacctgaggtcaggagctcaagaccagcttggccaacatggggaaaccccatctttactaaaactacaaaaattagctgggcatggtggggggcggcgcctgtagtcccagatattcaggaggctgaggcaggagaatctcttgaacccaggaggcagaggttgcagtgagcagagatcgtgccactgcactccagcctggtgacagagcaagactccttctcaaaaataaataaataaataaataaataaataaataaataaataaataaaatgaaataaaatagatcctttctggatttcttatagtacccaatacaatacaatgtaaatgctatgtagatagttgttacactgtattgtttagggaatgacaaggaaaaaaagtctgtacacgttcagtagagacactttttctcccagaatattttccatctgttgctggtggaatccactggtgtggaacccatggatacggagggccagctgtacttgtatgcccctatgtgtgtgcatctgtgagtgtgtgcatgtatatgtgtctgtggggtgtgcttgtctctttgacttcatccatccatccacctggaaaaccaatccctgaagggggtcaggtccctactggaaatactgagataattagacttagcctctgccttgggaatctggtctggcagaggaaggaactgggtgtttccttcccagaggtccccccaagcgtcatgtgcaagttagaaagaggctccctctggggggatgggccagagccccagagcctgatgctcctggctccttaatggaataacgtaggctgatttcagtgatctgcctgccccctgaggggctaggaatccttgtgcagtgcacaacctgcgcacctgaatgtggtggaggtgtggctgaagtaaggaagtcttgccagagaaggcagcttgtgagatggttcttgaagaataagtgggagctgccaggtagagacaggggcaagaggaaggtactgcagttgagcagaaggaacagcaagatcaaatgtggggagggaggaaaggcccaggggtgctcaggggaccagtgggaccggagcttaggagtgttttcaccttctcatactcccttctgcctccttcctgcggtggggcctttatgtgtgtgggtctctgccctcacccaaccctttctctttcaccacacctagctcagccagacccctgggccagattgccccatcttcctgcccagtgattctgagtgggactggctgctagccaagacgtgggtacgctatgcggagttctacagccacgaggccatcgcccacctgctggagacacacctcattgctgaggccttctgcctggccttgctgaggaacctgcccatgtgccaccccctctacaaggtatgggcttgggagaaggggcctcccccaggcatcatggccctcacctggcctccgaaaacccccaggcccactgagcagtcagagagactccagtcagcctggggggcatctggggaccacaagagagggcttggcatagggacttcccagagtgagcagatctgacgttacagaaatggggagctgagctcctttgggggccacttcagccctctctcttcatcctccttgctctccccacagcycctcatcccccatacccgatacaccgtccagatcaacagcattggccgggccgttctcctcaatgagggggggctctctgccaaggtaagacttctgcccccaaccccaacgagacatttgttttcctctggccttttcagttagatgaagaggaggacttcccatttgcctttgggtcatcatgagggggcatgaagggagggagctggatgaagttggttctcctgtctagaaaggagcagaggcagggctggtgtgctggcccagagcaggattgttcctggaggtggggtgggctgggtcaggggttacaggggcacttactgggatcctagaggacctgaaggggttccagggatgcctgtccggctccaggatctgcctccttcctcacagggcatgtccctgggcgtggaaggctttgctggggtgatggtacgggctctgtcggagctcacctatgacagcctctacctccccaatgactttgtggagcgtggggtccaggacctgcctggatattactaccgcgatgacagcttggcggtgtggaatgcactggagaagtgagctcaggacagcagtgggtggctctyagggtggacaacctgggatgttggagagggtgtggggagcttctagagaactgagtgtgggtctggtgtcatccaggggcttggccttggggaaggggcctggggtctgtgtgtccatcacacctacaccctcagcccagcaggccccttccttgcttgggtccccagcccacctctgctggccaaatcgcttctgggatctgagatgcctgtaggccttgcccatcccttataagggagtgctctgggtgtgttctgaccttgccaagccatcctctccacttctgccccacaggacttgccctcccacaggcctggggcagctctggggccaactgaggtcagggcaccctgggggaggtgggagaagcctggctgaggagtgggaggggaggaggatccaaactgaggccctgtcccctggtcaggtatgtgacggagatcatcacctattattacccgagtgacgcagccgtggagggtgatccggaattgcagtcttgggtgcaggaaatatttaaagagtgcctcctggggcgggagagctcaggtatgggcctggacacctgggcaatcagggggagctgggactgaggggcagcccccaggcaggtctgctagggccctcctgggctggatcagaacatattttattgtagactgaaggagaccaaattgctgccctaggattttgacaggctcttctctggcycctggagcagtggcatctcagagaggttggggaagaaaacatggctggcaatgggtccctgtctgagattaggggctgtgggtcatctctgcagagacctggaggggtcccagccccaccccagaaacaaatctttgtggactgtgaaatggggtatgagctccaacgggaaggggcaggaggccagggagctggcagctccaggagaagggtgaaagcgccctgaggtcccgccacctgggtacacactcaacaaatatccagtgagcatccacagtgcaacactgtgctggttattgaggaggcaaaagggaaaaagacaggtggtgaaggtgcctgccttcaaggagttcacagtctggggtggcaggtacttccctaaagtaagttgtggggaagcccagggaaggcgcctaacccactttgggaaggggtagtggagagaagacagggcaggagcagcaagctaasatctagctgaaatctaacttcttggctaacatctagctaagatctgcaggatggagaggttagcctcgagatgactgaggatggggacggagagttccgcatgggagcagtatgtggaaagtcgagaaagccagagagagcatagggagttccaggagctgcttactgtaatcatgttctctgcaactggagcttagggtgggacgtggggaggttcccaatgggctgaggctgaggccgtgagccacggccaggctgcacagcctggttaagggccagagggatccagggagggttttgcaaggagatcagacttgtatgctagaatatcaggctgcactggcagtcaggagacagttagggaagctgttgtggtgtccaggagggaagactggggacctgactagggtaagagctgtggggatgccacagagaattcccagagctagaaatgacaggactgggtgatggtttgagtttggtggtgaggggaggaggaggggagggaggggccaagggcgactccacgtttcagacttttgcaactggatacgtgatgtaggtcatccattgagctgggggctaaaaggaggagcggttagggaggaagatgatgggtctggtttgaatatgtgggacttttggaacctgagatcaccatggcaaccaggacacaccggacaacaggaaagagaagcaacctgaggttcacacgggacaacaggaaagggaagccagcagcttggtagggaagatgtgtgggactgagaaatccatctggagtgggcacagagtctggaaggaggtgatgggagggagtggagagggggcgctgggttgagtcggggcaggactcttccgaaggaacccaggaaagcctcctgcctctcccaacatccccaggtctgggaccagagcggcatccccagggaaactggaagagagatctgagggccactggttagacaggggccaggagcagccctggaggacttctggccaagtcctccgtccccagccttatgatctgggtgaggggagatggggttgctgccataggagggtcacgcaggcaggatgagggtacggatgcggcagcttgaagcttttgcaaaacggtgagagcggggcatggtggcgccctctgccgggcagccagtaccagggcacgactgaygtcgcctgggcttttcccccgccggtcaggcttccctaggtgcttgcgaaccgtgcctgagctgatccgatatgtcactatagtcatctacacctgctctgccaagcamgctgctgtcaacacaggccaggtaccggtggtctcaccaacccaggcccagcccgaggctcagaccttctaaatttcgtccatgccccaacctcaaacccagcctcagccataatccctggtccagcctcaacttgttccagcttcaactccagtcccaacggaaaccgagcctcagccccaactctcagccccagccccacacccagccccacccccagtctaaccaacccagcccagcctcagcgccaagggcggggagtccatctcagcgactggagggcgggtggtcagcacctggtggaaggaaactcctgaggtactcttccacccagacccgcgcctctatcccacctccagatggagttcaccgcctggatgcccaacttcccagcgtccatgcggaatccaccgattcagactaaggggctgaccactctggagaccttcatggacacgttgccggatgtgaagaccacgtgcatcacgctgctggtgctctggaccctcagccgagagcctgacgacagggtgcgagacgggatgggggactctgagcacagggaggggaccagaagccggggatgggggaggataactagcggcgtcaagaggggagcagggagtgagaggccactgaaaccaaagggtggaggggccagggccaccggcaggaggagggrgtgctggccggccctggtcccagctgtcgagctctctgcccgcagcggcccctgggacacttcccggacattcacttcgtggaggaggccccgcggaggagcatagaggcgttccgccagcgcctgaaccagatctcacacgacatccgccagcgcaacaagtgccttcccatcccctactactacctggacccggtgctgattgagaacagcatttctatttaggagcgcgcttcccgtctctcctctccccattctgtgccctactattttcaacaaaacaaaacaaacaagcaaaaaacacaaaaacctcagagaccaaaacaccaaacaaacaaaaaaacaaaaaaccttcctttccctgggtctggctgtgaatgcgcgcggcaagttactggggcgctggcggcagggctggcgccgcggggtgcaggtgcaggctgtgccgcgcgctctcaccgcgattccgttctctgcggccgcggggttcaggtaggagtagggcagcgccaggccccggctccactccaggacgtccgccgagatctgrgccaggcggctctgccgcggggccttctcggtgaagtgctcctctgggtaggtgtccaggaggggagaccgaaaggctgggaccttggccggctgcattttcagcccacaacgattctgttccagcttaagtctccctcccaggggacttagtccacccaagcccagcccacgtaggggtcctggagcactccagacccatccaacttgaaacataaaacacccgcccacctagacaaaagactgcgggccacaagaaacccagaccaccccaagcccggctcactctgaagcccagaccactctaaactccccctactaggaatccacagcaccctaaaccacacccaccagcaacctagtggccacaagccctgccacctaggagcccagcctgctaagctaagtgcatcctcctagtagccattgtccccaggatcccttcctcaatgttcccactctctagaagctgagaccccagccatccccacctgggccttgcttatggtggccttggttccattgctgaccccccacaggagcagcagggggtggtgtgtggcatcgaccgcagggagtgaggctgcttgttctgtctggcccttggcggtgggcagggcaagccacaggatgataggaatattggggatccagtcactgaattcagaccgacccccgcaaactcagtacagagcttccagtgctgctagggctgctcctcccgtgaccctgcttgtccccctggtctggcagtggctcacctggccgctgttgatggcagcatgttgggctgagcaggtgacgatgatcgtcgtgaaacaccggatgagcccagcacagtggcccagggtggaggggaccccctagatgggagtagggtagagagaacagagctgagacccaagaggctgctgccctggggcagtggacaccacctctgagagcatttggcttggaaaaccctcctggaagatctccctgacccaggcctggagctctgagtccctgctcactgccgtatcgtccgggtagtagatgttaacaatattggtcccaaagctggggggtcgggaatacacggtgactaacagccgggagccaacactgcacaggggtatgggttggaaggggccactgagacctgctgcccacaaagggggaaactgaggccaaggaaggaaaacggccaaccacagagtgaactgcagagccgagatcaaaccgggaggctgtgctcttcaccatgccatgcaaacagaggcccgagggccatgattgatctgcagatgtgttctgatcagctggcaaggtttttctgtttgtttttcaagttgaatcacttgccaacgtttaaatattagaagatgtctggtttctgctgaaaaatcagaagatctggtcacagtgatagctgggtcaccactgtccccatcagacaaacatgagtttcccactggccacggtccctgcccactcttcttccttagcttttctctgctcactggtcctgcaggcatttggattccaacccacagggaaggatgagacaccaggtccatctgcctcaggaccggctgattgggttcatctcatccactggttcccaaagggccctccatccccagccatagtaggatgtgcagacccctgctgaggaaggagctcctgctgtggatgttcatatagggggagtccctgaggtcttcaagggggaggtgggacatgagttgggcttgaagcaggggcagaatttgaattgggagaaagggagaaattagggtgcctcgtctccctaggcccagtgtgtgctgaggtggaagaatggaagtaggggcagatttcagaggggctgagctggcagggaatgcagcattgcatgtggcgagccactgggcaccactggaggctaatgggcagcggcaccgccatcaatctcggtgctggagggaggccattatgcaggctggtggcaggagctgggaacccgtgggaggccagatattaagaggatctggccattggggtggaggccacagctataccccaaggcagtctcctatgaggaagatttcaacggaaaaacctggagacacagtgactttatctatggggtgaaaaataatctttttttttttttttgagaccgagttttgctcttgttgcccaggctggagtgcaatggcacgatcttgctcactgcaacctccgcctcctgggttcaagtgattctcctgcttcagcctccccagcagctgggattacaggcgcccaccactacacccagctaactttcgtatttttagtagagatggggttttgccatgtaggccaggctggtctcgaactcctgacttcaagtgatccgcccacctcagcctcccaaagtgctgggattacaggtgtgagccgccgcgcccggcataataatcttaatagctaatctccgagagcactttctgtgcactggggtttgttcttagggttttggattgaataagaataataagctataccataggtgctcttattaccccattgtcagatgaggaaacaggcacagagaggttaaataacttcccaacacagctgggaaggatcaagagtaaacaggaagggcttggagacagcagtgtgtttgggaaggaggctgggggaaggttgaataaaccaacaggggtctagccgagggtgagagggttggagccctcaggccccaggggagtgtcacctctctatggctgcccagatctggagtgtagtagcgggcgaggtcctggaccttgaagtcagccagctggtgggacaggtagagggagtggtagctggcagctgccagccctttggtgatcagctccaggcagcccatctgtcccaacaatgttgactgtaatgagcagagagcccactcctgctgctaggaggggctctggaccaaatctcaggcctccccaggccctctgtgctcaccccaagatcccaggcctccagggccttgacctggtggatgagctttcctggtacaaagagcccagtgcgggctggatgttgatgtggaaggtgcagaagaaaggggaagcgggagtcagaggtcagatcaggcagccccgggtctcccacagctgtgggcactgagaggagggctcctccctgccttgaaaatgggtggctcatgggcagctgccacagcatggacaaagcaaaagctccaccacaaagtgggtttgaagtagatgagtgaccgtcttgtgcaacaggaactttcagggtcacacccaggtcttggccaggaaccagtcttcagctggggtcactgggcaggaagatggggctgtctaggctgggtgtctgagtgagctggagtgggggcacaggagagggcaggcattgggcagaaactggggaagggcagcccatcaccacgtccatggggccagaataagggaggagaccacccctcatattgtcttatgcccaatttctgcctccaaagaaagaagaagtaaaaactaaggcagaaatgaaatccacaggcaggcagccctgcgccacaccccgggcctggtagttaaagatcaacccctaatctaatcggttatgttatctgtagattacagacattgtatagaaaagcactgtgaaaatccctgtcctgttctgttccgttctaattgccagtgcatgcagcccccagtcacataccccctgcttgctcaattgatcacgaccctctcaagcagacccccttagagttgtaagcccttaagagggacaggaattgctcactctgggagctcggtttttgagacgcgagtcttgccgatggtcctggctgaataaagcccttccttctttaacttgatgtctgaggggttttgtctgcggctcgtcctgctacaaaatcacacgacttttgaccagctgtgtgaacttgggaaagtttattaacctctctgtgattcagtttcctcattagtaagacaaggttgatgagaataatctccttgagaggtgaagtgacccaaggcatcgtgttggctgacttccctgtaccagtccagtcatccagagccccagttgtgtggggcagactggaaggatgggaagggacggtgtggacacctcccgaatgggttatggttttaactattaggaacacggttgaactgccaaaggtgcgtgacttagtacaatcgattctgacaccctgtcaaggggcaatttgttctcttgagtatcataaactttctatcaagatggaaatcaaagaggacaaaacagaaagacaaacttgagaggggctgagtaggattggagaggtgatgtcaccaggcacagtggcattgggaggaggcaacctttcagtcatcccgaggatgtaatagacttcccctaccccacccaccagcccaccgaggccctgcctggctgaccagaatgacaagggatagcaagggcctgttgccgttgggacgctggtgcagcaggatcaggggtgcagtcatgaactagggcctcccatgaatgatgctggggtagaggcctgagaggatggcatggtccaccaggtacagagagcccctttagaggaggagtggaggaggaggagggctgagcaggcttgggtgaggaagggggagttattatgaacctgggagtatttcacttaaaggaacttcattctctggagccagtggggtgttccaactcagagccactttgtggttccagagaaagaagcccctcccctcttcccccacccaagtattgaaggtgactctactgtggccaggcccaagcatcagtgagagacagtgagagaagcgcgccccgctggaggtcagcacgaaatgcaccctcctggggtcgcagcacaccccatcccagtagcccagggaggggagagcagcagctctggggggcactcagattagctgcagagcatcctcggaaaccatggcaaccaacgcatcactatagtttctgtgctgggagggcctgtcaatgcatggctcctggcaaagtagcaggagagagcacattcctcactcagccctgcccctcagccctcaccatctcagaacaatgcccctccctccactggcgcccgctcagcctgcagactggtcccagggtccagcgcagggaccatcatggcatcagtgaccagaaaattctttgggagtcagtgacagcagtggatcaggatggagttgaggtcattcagaaactaggaggtgaaggaggcgaaaaaggtgtcctcatcctccttctagtctgaaatgcatactctgcagagggtaggcgtggggagagtcaccctggtcctctgcctgcagcatggccaccactgtcagacccatctccaacttcccagcatagccacttcctgatgctgatggctgggctgggcttccctcctctctaccacaacgggttggatgactttacttttccaagtggttttcttagacaacaaaggatcgcaggtttggtttctgcctgaggagtcatctgaactcccttggccccacccgttttgagggaagcctaacatgctctgtgatgtgcactaagacctcacctaggataagttgaatttgagaaaactggaatactaaagaatgctggataccagaacggcccgtccttccgggcttccgctcagagaggcccttttgattccctgccaaaactcaccagtcccgggtcccattctcctgctactttgtcacaaggcagtgtagatgatttgttaaaccagagtgatcatttaataagaggttgcattgctttggggcgtggcactggtgct

SEQ ID NO: 94057 - DNA, 118219 bp, Homo sapiens
gcgcatgccaccacacctgctaatttttatgtttttagtagagatggggtttctccatgttggccaggctggtctcaaactcctgatctcaggtgatctgcctccccaagcgctgggattacaggcatgagccactgcgccggcgtcttggcttttctatgcagtgtgctcaggccctgccccacctctggatgcatgagtccattcaacacatctttactgggcatctccttaaacaggtaataagctagatgttctaggtatactaatgggcaacgatgtagggtcccttggtgtgcttgtagtctaagggggaggcatagacacaaccacacatctatatagcaagaaactctcatacagtctgtaaggaacagtgctgggcactatgagaatccataccaggagatctcatcaaaccggggggcaagaaatgcaccaggaaaacatccttgaagatgagtttcgagctgatatctgaaggacaggttggggtaggggagcggtgcattctaggtagaaacaccatgtgcctcaaatcagaaagaaacaggtcagctgggcgcggtggctcacgcctgtaatcccagcactttgggaggcctaggcggacggatcacctaaggttgggagttcgagaccagtctgaccaacatggagaaaccccacgtttactaaaaacacaaaattagccaggcgtggtggtgcatgcctgtaattccagctactcaggaggctcaggcaggagaattgcttgaacctgagaggcggaggttgcggtgagctgagatcgcgccattgcactccagtctgggcaacaagagcgaaactctgcctccaaaaaaaaaaaaaaagaaagaaagaaacaggtgaaatttgtgaattgaaaatgaatctggtgagtgtggaacatgaagtctgatagtttattgaatacaatataattttgcattctaaggggtgtgttcatgttttggctcgctaagcttataagctcttaaatctgtttccccacttgtgggacgtactctgttctgaatgccttttacccttaatctatatcctgaccttgatatagatcacatcaatgggctcctgagctcattggcttctgtgttggtttggctggtgtgtggtagcctggcaggcgatggaggcagggatgtgactgagagacagataggaaaggagcagggctctggagagccgtaagggttgtttctcagatatgtgggtctttggggaaaggggaggtacaaaatcttcggtgaagcactctaaattcttggagcaggactacccatgagttcatgcacatcaattatgcgcattattacaggtggccgaagggtgatctccacattctccacgctactagaaacttttagtatttttctaaaaagcatctgtatttctgtctgttgatcaatctgtcaatctatctctctcatatatctacatccacctctctctcagagaggaagagaaagaggtggatgtgcatatggatgtaattgttttatttgttatatattaatgtatattaagttttctaaatgagtataaactattaatatatgggtcagtgggagtgagtcctctttaaaaatattacttactttacaatgttaaacctctgtggtagggcatgagagatggtaagcaatgcttgtacggtagaataacaggtttataagatccaggtctgggaagggattgaaggtgggaggcttcagaggaccctgggtggcattgcaagagtaggcatcacagtaaggaagccagaagggtacagagagggaagctgaaagtcactgaacacagacctcacccatttcaccaccaagcataagaccagcttctgtgatagcaagataaacctggagctttttccaaggcagagccttattgctttcaagggttttgaaagcatgctttaacatgatgtgataattaattttaggtgttaacttgactggactgaggaatacctagggaaggcattattttgggttctttctgtaaggatgttttcagaggagattagcatgtgagtctgagtggactaggttggaaagatccaccctcagtgtgggcaggcactatccaacttgctggggggcctagagagaacaaaaacggagggaaggcgaatgtgtcattttttttttttttttgagatggagtctcaatctgtcacccaggctggagtgcagtggtgcaatcttggctcactgcaacctccgcctcctgggttcaagcgattctcctacctcagcctcctcagtagttgggatcacagacacccaccaccatgcctggctaatttttgtatttttagtagagacggggtttcatcatgttggccaggctggtcttgaactcctgacgtcaggcgatctgcctacctcggcctcccaaagtgttgggattacgggcatgagccactgagcccggccaaaggtatctttatctacctcctggagctgggatacattctccttctcatgttactgggcatcggaactccaggctgtctcgcttttggactccaaggcttacaccagtggacctctggttctcagaacttacaccattggctttctgggctctgaggccttcagacttggactgaactacactaccagcattcagggtccgcagcttgcaaatggcttgtcgtgggacttctcagcctccataatcacatgagccatttccctagtaaatcacctctcatctctctatctctatcatctgtctctaatccatctatctatattgacgtctatctatatccatatatcctattacttctatctctctggagaaccttgactaataaacatggaataacaaagagaaagggaacaacaagaagaagctgtgcaacaaagtctattgcgctctttggtattttggtaggcatttatttccccattaaagaaccatagtaatcaacagctccaacttgtttctattctagtgtaagcatctaagtggatgaaagaagacatgttctaaaaggctatgtagcgtgactgtacctaattttatgatgagactttaatcacccttcttgattttcrtcacgattaaacataatgccacatacctatcccctattgtcttatcaagaacatttctttccctgattcctttcctaagaggtgccttggacaggctgtgtgtcaccacgaaagcttgctgccactctcaagggcctcttctatggactttttccctcctggttttggtagcccttcctttccctcattctttcagacataagggtagtgacagcgccagtgctactaccctagggttgttgtcttttctagtcctttataaacagatcttttgtaaataaaccctccgtgcattatcctaatttgaatgtgctgtctgattcctgttaagaccctgacagattcacccctcccaccaaaacaacatccccatttgtgctgtcttactagggtaaccaccagccacctaggggtattgagcatttgaaatgcggctagtcccaactgagatgtgcagaagtgtaacattcacactggattccaaagacttagtatgaaaagaaagaacatacatgacttcaatcatttttatattgactacatgttacagtcacatttttggatgtatgggacatattatgaaaagataactttctctgcttcttttttaaccttttgtaaggtgctaatatttactagaaattagcctgggcaacatggcaaaaccccatctctacaaaaaacaacaacaaaaaattagctaggtgtagtggcacatgcctgtagtcccagctactcaggaggctaaggtgggaagatcacttgagcccgggaggcagaggttgcagtgagccaagattgtgccattgcactccagcctgggtgacagtagaccccatttcaaaaaacacagaaaaaaattactagaaattgaaaattatccatgcagcttttatttgtggctcacattttgcttctaaagtgcagagctgccctacatgtcatgcaagtgatggtgagaaccatgtttcctacatcgagcatctttaatacccacgtaaaggaaagacctgtgctcagaaagtgaaagactaaacacatgctatgatgtcatgttggagctagaagggaacttcgagtccatcattttccagtccaggaaactggggcatgtttataagcattcacgggactgcatgccttcaaaacaacttaaaaatggtctttgttttgttgtcttccttctgcaaatctgactgaagtacttagggaaaaaatgtgaaaacacaggaaagtttaagttagcattagatctcaactggtttgtcaatatccaattttagaacacaaaaggacattacagcttggcagggcttgtccatcctcgtaaacgcccagcgctttacggcatcagaatctaaaaagctcttcactggttgtcgaatcagttgggattggtagttcataaacataaaaccataaaccatatccagcagtgagtatttatctagcagggcacaaattcatggatccatgcaagcccagagttagaaccactaggtgccccttggaagctgaaaaagtggaagctgacttccacttccgtggtcaaatagagcacagaaaggctgcgaagttcctgcatggggacgcagaaatgcctggtaagtttcctgcaccgtggaccttgagcctgcggtgggcccttgttagcacccgcagaggtcccagaaagctgcctccacagcttgcaggggctggtaagaagctcccaagctaccgcccacatggtgaggcaacctgtggaggcaaggaagccaaaaaataaggaacaaataggattagaacaaaaaaccacctcatgcagcttccacgggccacctccctccattagacagcaaggcggtttgtatcccttcctgacctgctctccggggagcgcacgaagaggatatagggtcaggggaggcaagggaaagaggaaaccgcagtttatgaaaggacatttaacctctttgcgagcgtgcatgcgcgcgcgcrcgcacacacacacacacacacacacacaaaagtacaaacaacattaaggaaatacacactacattaaaaattgggcatagggacttggaatcggagttgaattttttttaaattttaattttgcctttgatttatgcattggtttttttttttttcgtaagaggttgttcctttctaggccctggaggactgtatcatcttatacaaatccaagggaaaacaatcaaaataagaaaagaaaagaaaacaaacaaacaaaaaacagactgatacgagaaagagctttgctccaagacccgcagcagacagttgagtaggtagaagtccaagctgctgcagaggaattcggtttgctccagacaaacgggggcgtggcgtgcagcgcagtactgggaactgctgcaaacaaaacttccaaggggacgaggagtaggttccaggcgatggaaagcagtgggatggggaaggatagggcaacagtgccaagaggggagcagagcgcggggaacctggagagggagggtcagggctgcggagggctgagctgcggtggagagctctggggcccctcaccaagctagtggcgtcttgggtggaagtcaggcccccagagatccggccggccttagctgtcactcaggcaaccccggagccgccgcagacaccggatccactggaagggggcgaagccgcggggaggaatgggggacactggggaaggggcgtcgcccctgccgcccccgccctctccagtgccattgggcggctgctgcggagcccgcgccaccttttctccatcccaccccgcccgtctggccccgcctggccgctggtccgcgccccgctgcgctcgtccgggggctggtccggcccgggcctttgacgtcaccagcaagtttgctgccctcggcgtcccacgtgtggcggcggcagcggcggcccaggaggcagccggtgagcgcctgcgagcagagtggcgggggccgctgacaggtcccgcgcagcccagcccagcccagccacgcggctcacaggtggggtccaagagcagtttggagcaacccggcgctacggagaggggtggacggctctgcacgggcctcctgtctcccgctcgggcagagggactcggggggacctcgctccttggctgagagaacctgaactcgggcggagagaacgcgcccaggcgggcaaggggaccagagaaagccggggctggaagtcactgtcgctcgccactgtctggagcgcacggagcgcagaggcccggcagccgcgcgtgccctcmcggggaccgagccagtgatgcaggatcgctgagcggagatccgcgccgagaagtctctcggggccggggctgagacgcacgccttcgacaccgctgccaagaccccgattccggcgactcttgcggggaaccgaggggccaaggctgccccaagctcaggacttgggcgagtctaagacgatggtttcttaagcwcggacccgcgttccccttcccgcyccctcgactggaggcagggatcctgcgcggggcccccgggattccgtttccccgcggagccccggccgctgcctcccgggacagttcgcacggccacaggggcgcacggcgatgtggcctccgtccagcgcgctggcccgccggggggatgctctggcacctgtcggggtccaggcctagcatggccggcgcgttgcccgacgtcgcctccggctaggatggcccctccgggcccggccagtgccctctccacctcggccgagccgctgtcccgcagcatcttccggaagttcttgctgatgctctgctccctgctcacgtccctttacgtcttctactgcctggccgagcgctgccagaccctgtccggccccgtcgtggggctgtccggcggcggcgaggaggcgggggcccctggtggcggcgtcctggccggaggcccgagggagctggcggtgtggccggcggcggcacagagaaagcgcctcctgcaactgccgcagtggcggaggcgccggccgcccgcgccccgcgacgacggcgaggaggcggcctgggaagaagagtcccctggcctgtcagggggtccgggcggctccggggccggaagcaccgtggccgaggccccgccggggaccctggcgctgctcctggacgaaggcagcaagcagctgccgcaggccatcatcatcggagtgaagaagggcggcacgcgggcgctgctggagttcctgcgcgtgcaccccgacgtgcgcgccgtgggcgccgagccccacttcttcgaccgcagctacgacaagggcctcgcctggtaccggtgagcggggcgggcccgggctggggctgaaggatccgggggtcctgggctgggaaagacgtggaggagccctcggtgacccccagttcgccctcctccccacttcatgcagaaggcgaagggtcgtcaagggtctttcttccctctccgccttctccttcctgggaagtggatgttgaaggagagagtgggagggaaattctggccttcataattttcatccttgggaatcccttgccagcaaatagccagtctggtctctttctcctgctctgcgaaagtattcatgtatttaactaaaggaaaaaaaaaaagtctcttctaaattagaaacctgttcaacaattaatagattgccttctccttcccaaggaagcccgttttcattctttatcttttggaaagttctttgtggttaacacagtctttaccatcaggtatttatttaccttgaccttttgccagatagttgtcctaggtgggaagtaatatagagacttagtaaaagtgtcaagaaccagagaatctgggtagtttggaaaatatatgtctgtctgagcaagggaaagcaaccaggcactgtattttaaaggacgcttggcaataacttttgtttgagggcaaggaatgagttttgtaaagtgcttttgatatttgcagggaaaagtaacttttgtcttttgactgacagaaacttttctaaagatcttcaatcctctttacaaataaggtagccaattaaaagaagaagacaacagagagaaaaatacattggcacaactttgccaatacagtttaggaaataagcctggcttagatcttaatcttaaatttgccagtctcttcaaattcagaccacctttaataataaaatcagccagattctaataaagctagtgtcgcctggattttgtttgccataatatattggctttttttttctttcttcaaagtaccagtaaaaattatgttgctagaattttccattttataaagtttatcttgttcataaaagatgcattctctttgttattttaactgaaacagttacaaaaattacaacataatttaggtattttcaaaaagcccattaaattaatcattcatccccaacacagaaatggatatgatttgacaagtttatttacttgaggggccaattgcagtctcagattgatttcaggagccgaatttacagtcaatccactcagagagaaaagatttggccctaaaaatagaatttgaacattaaacacttttaaaacagtaactttccatttgttggaaagaaaaaacaaacaaccttcccttaatatagatgatatatcatttaaaatcatcagccacttaaaatatccccttgtgtttctgtcatttatgttgtatcctctgggaagttcttataaaaatgacctgttgaatctggaaacaacaggtccttctttttagcacaaaggcagctctgttttttccatcaaggacacgagaaagaagtgattaaagacccctaaaactcttatctatagcagtttgcattgaattcggcctcgtactgtgctgtaagcgaacacatttcaagctgactgtctgaaacatctaacactatgttgggctctgaggtgctattaaatatggtgaaatatttagtactaaaaccctttattttccttttgccatataaactttatttccacaaagtaggattgtttcttcttattccagaaatgagtatttgagggcacggtgtatctgcagacctggatcttattttccatggacctttctgagctcctgtaaggggaggaaggtttcaaggtaactagaaacacaagtagttttttaaaaaaaagaaagaaaraaaaaaaaagagtcataaacttgtaggccactctttcctttggaaactgaatgcatgctataaagtaaatctcttcttggattgtttactgcagcagaagagttttgtaaagcaatttatggtggtcacaaaaataactgcacagtagacttcacggtttgctgaatttaattttctaagtgttggagcaatgtctttgttttcccatttgcagtggttttttattggatgcataaatttacgtttaactcaattacataggaaacttattttaaaaaaatccaacctatggagcctggattatgtgattatttaatgaaatttccccacagttctctttcatcttggctctgaacttggagtttgatgtttgtgagcaagactgaaggctcgtctatgaaaaaaaaatctcccacccagaatgccacttaaatattaagtgcattttagctacttatatttagctaatagtttagaacaggggattcagttagacctgcatgagtcagcccaaactttgcaatacaggatttgtaccacacacttatgaccacactatcacagacacacacacgaacagaaataaattccagatatttgcacccagcagtgaattatggaagagaaaaacctatataattatttttaggtgtacattgacacgggagaatcctaaaaggtctagcctttttttgcccagtgaaatcactcagttagccatgatagtttgtggtggcagtgccacctactgtcctcacaaagggacaaatctgctgcaattagcaagtttgaagaaagtgtcttggagaatgagtttgtcagttagaaatacctgttgctgaactttttcagtcaattactctcactgggaagaaaataaaatactttatgaagttttttccaagagtgaagtaataaacacttccttcatttgagcacatttgtagtaaagataaagaaaatatttattattcaaaatctctagaaagaaaattattctcactaatttaaatgtcctaatagactttctctaaaataaataaaacaaaggcaaatttttatatgctgagaaactcgaccctggtggagtttaaaaaaaaacactcctcattacttaatttagcagacatgatatcactaaaacaaatgtctgtggcttgcatgtcacggtaaagcagtcccttgcaatgaatagtgtccatttctcttgtatgtatggtggcttcataaaggaaaggaaaaagtttccttagcttcaaaacattgagatctttgctggaagtcaggaccgaatacctctactgtagttcaagagcaggcgagcttagaatttaataaggaggctctcttctgcttgtttctgtctgtaccaactaaaaggtatgyctcttttttcttgtaagctaaaagatacttattaataaagtagttaaatatgtgtgtacacatacacatacatatgtatgtatataaatgtttagattcaataatatttcagtctattattttggtacaagataggaaatatttattatccagtctcttacactagcatgtctatttyttatatttcagtttcttttctttagccaartctggacaatttcagcagagaaggacatcactagaatcattttattctagagcatacaggaagatcaaagattgtccagctcacagtttaggagctagtgctcccctgacttcatccaaatttgaaattttctggcctcgawcgatcatggccccgtttttcaagtccattagagaggcatactgagcagaggccctttcgattcctaggaggagaaattggcatttcgtagcagctgggagcagctgcaaagtccctccatgtgcagtttcccaccctcctgtactgtgcaagccccttctgtgtgaagagtttgaaatgaaatccgagccacgaagctgcagtctggccgcccatgcaaggtcatgtggactgatggccaagggcgctctgtccttagagcagaggaaagaacattgggaatagatgagggctaggaagagagtgagatgttactttggactctgagtctagcgtacttgtctatagaagttctcagtacctagacattccccacctggtcacaggctggggacccaaaatactgtcatctagtttgctaaatgtctgaactctgggctcatccccaatagacaaccagaagtgcaagttgatcagcctagttcctctgtgtgtgtgtgtgtgtgtgtgtgtgtacgcacgcgcacaccctcacacatgcgggagcagacaccgagaaggcagggacaatgatggaatttatgagaggaaagttactaagtagttggggaatttctgagcaatattggacatcctgagtagggaacagtttggggacactattgagatcatagtccgggcattaaacaacaccaaaaacacttggtagagcttggactggaatgccttgtgtgaatggatattcctttacagggatgagatttataatacgctcttatactttatgtgaaattcacagacttccatgaaaatccaccactacgttataatctcctgcctgctctttaaaaagaaaataccctggccaaaatatttgtctcctttaaataagtctgttgattggccaggaaagaataagtgccaaatctgtattttggcagggtcatgggaatgaaataagcctgtgtaattaatgacaataggggctaacctcacatagaccagatgcttacttcatgagaagagtgttgcagagcaaacaaaactctctgatatcaacaacaacaacaacaacaacaaaaaaaaaggcctcgtatctctccrggacacagttgaacaattgcaaattgcaatcaccatcagtcaaattgctgggcccagtcgggaacttgatattcttagctcgtttccttagggggaaatcttcctccaccaagtgatagtaacttggctgaaaaagagcatcgtttcttggtrtgggtttcctaatgataktaaactccaagcttttagaaaatttgttctgcttaagcgatgagttgcaattgtgaacataaggtttcttattaaatatgtgcctctaatatgtaatcagaggaaattgtactccctcatctttgcattttataaggatgtcttaaaaatgcttgtcagcactttaaaacctttgctaatttgatacagtttaaaaatctctctgggggatatttatatagtgaataaataaactgttgtgaagccaaaatttagaaattgaatttatgagaggaatgttattaagtaattggggaacttctgagcagtattggacatcctgagtagggaagaatttggggggcactgttgagatcatattccaggcaatgctgagttagtgaatggaagcctttccccagtttcttgccttcgtgatgtaactcttgaatttttgccttactatgtggtcatgattcttcaggcccctaaaaacttacatttatcctaagattgcccgactgtattacagaaattcagaactggcctgtttcagttgtctgatgacaataaatgtgaaaagagacggggaagtgtttaattaacaatgaagtttagtacttgccgtcgggagttcgaaagacattcttgcaaaggtttcaacacaaactattcaccgactcgaacagcccgctttgaatgtgatatgtagcgccacctagtgggaggaggagtcaggaaggaacccctaaagggagaactttgaaaaacctcatcatgatagagcatatttgcagtctcaatttaaaaaagaaactacagcagcaacaaaagcttgtgtttaggtagcacttatagcaagatgatctgtctagtaaggatgagctgcactttgcctttttttcaagcaaggataattcacttcttttaggcagggaatttattctttggagagaaataagagatttggcttcacaataaactgaaaaccaagatataaatgattaggggatttatattaaaaatgcctatgactgaaaggaataccatatgccccagattacttttgttagtgtgttttgcctctgtgtctgaaagccagcttcaaatgaaaatacttccagatgattttatttcaacatcagtaatgcaggcctgttccttcccctgtgtggctctggaggaggatcctgtcattctaaacagaagcctgtttaacccttaaggtgcctgagatgccctgttgagaatcctgtccaccacacacgggacagcttcacaggaaagcgctttgagagttccgacaggacaggcgtttctgcgcctgcagtccagggcctgggagagcaggctgggatgcagggtggtggtcaggttaaaggaaggcaggatgaaagggacaaataggacagattgagtggagaaactgacagacaccaccttaaccaagtgaccaaggttagcattccctgttgtgttgagatcatgatccccgatataatacaataggatggcacttcacctgtgcggtaatcttcccccaaatccgtaaccccagtatagccctgagaaaacattagacgaacactgattgaggggcattttacaaaatacttgaccagtacccttcaaaagtgtcaggatcatacaaaacaacgccaagaccgctaagctatcccagatgtggggagacaaaagtgagtcattactaacaagtaaacacgagggtgcccttggtcggatcctgggtctgaactaaggcatttatgggaaaactggggaaatgtggatagtgtatgcagtttagttaataacattataccaacgtcagtttcttggttttgatcgttgtactgttctagggttatgatatcccctaagatgatcatttgggtgaaaggagtatgcgaattctctgtgctatttttcacaattgtaatatctaaaatgattctaaaatcaaaggtgaaaacagcaaagaaggcaggagaagcctaacaggcgttgaaggatgagggctcatactgaaatcctgtctgtgccgattctcttttattccgtatttcttctttcctttccttcagaagggcccccaggatgggcccaccagcttcccctcccctgccccgcacctgttgcttccagacatgctgatctttccctcagctgatttcataatcatattggctcacggctccctcctactctcttgtttccgaaccaagcacagagacagttttgtattcctttctttctgtcttctatggcaggcaaatgtaaagtgaagaaggtgtgaaaggttccccaaagcttcctgtcatagagaacaaaaacgttgatgtaaatgacaggtctctgaggacacaaagagctaaaaactaaaataagggtcagaggaaaatcagacttgggcgtatgactttttttttttttttttttttggctacaaacatagaaggaacaggtgtcagtggttgaaagctggttatagggaaaatagatagggccagagctgtggatgcaccttatggcaaagatgacaacacggtcccaattttccaggccagcttagtaattttatctgcttacttcgcttgttttaacctttgttgtagacactttgggttatgaaactttccataggagcaaaacagacctggaacaattaacgcattcaaggaagaggcaggaagagagaaagtgcaaccttcagacctctggaggatcagtttctttgcaccttctaactatgcaggtttattccactggaactgctcagccagactcccagctttatcagactcaaagttcctgtctaggtggtgtgctgtcgttttctgcttctgtttttaaatacacagttatgtttatctgggcttctggttgactagagtaatgaaaatctccctcagaacatttcctctgatatttttaacaactgtaaaaatagttttatccacattacatttttacttaagcaaaacaaaacaacacccacgccatcaagagactccaagaaactaacagtattttctttgaatcgttcattcacttatctttattggatccgttttatcaactgctttcgtgcaagggatagactgcaaatgcttatgtagttaaaaataatttctgtgatttaataccattctctacttgtttggcatttttccattttagtggctatacacttttcttcatgcgttttagccttttktaaaatagcaaaataattggaccccrcggtatatctttgatgaaatctatcattttagaggtgaggtgatattaactgtatttgttgaggctacactatgtgctggatgatgcggaatgatctgttgcttgtagtctgatgttattaataggatttatatttttatgcaggtcctatcattttctacattttatagatcagaaaagaggctcagaaagatgaaataacttgtccaagrtcatagaactatgtaggtcatagaactactgccaaacccagattcacccacctccagcatgccagagcctcaccactggggtgaatggtctctgtgatggtctctggcagaactgcccagaggtagttcttgctacctgcctacatagcaagccatcaatgtctcaaagatgcaggggattgaaaggctgccccatgtggtagagtgacttggacattctgatcttggacctttagttagaaaattgggcagcacgttagggccaggtgtggtggctcatgcctggaatcccggcactttgggagacagaggcaggcagatcacttgagggcaggagttcgagaccagcctggccaacatggtgaaatcgcatctctactaaaaatacaaaaattagccggatgtggtcgtggacgccctgtaatcccagctactcgggaagctgaggtacaagaattgcttaagcccaggaggcagaggctgcattgagctgagattgcgccactgcactccagcctgggcaacagagtgagactctgtcccaaaaaaaaaaaaaaagaagaagaaaaaaggaaatttgggcaatacattaaaatatggtcataaaagtgaatttttaaaagtatttaaatacctctgttagtcaattggcctattatggaataactaaaaccgccttcatttttgtcaacttttctccctttttctctaaagaagttgtctgatcacagaacttatcttgttgaacatattagaaatcttgtgtcattcaattgatttttcccccatttattacaaaataacaataaccactaaaaacactctccaaactgctatgtgagaaagccaatatgttgtcagaaatgtaatcagagctgggtgcggtggctcatgcctgtaatyccagcactttgggaggctgaggtgggcagatcacttgaagtcaggaattcgagaccagcctgggcaacatggtaaaaccctgtctctacccaaaatacaaaagattagccgggtgtggtggccatgcctgtaatcccaggtactccggaggctgaggtaagaggatggccagagcccgggaggcagaggtagcagtgagccaagatctcaccactgcactccagtctggctgacagagtgagactctgtctcaaaaaaaaaaaaaaaagaaaagaaaaagaaaataaatgtaatcagaaggacgcttgctgaatctggaattggagcaaggagagctgaggcctgcgtgccgtggctagtgtcaccgagctaccctgaggtcccttttgcactgtagggatccccccccaatccagtgctctcccggaaccttgctgagccactctgccagtctgtctttttcactgttccatattttcacctttggattgatgctttttaaaaattcttcagatatgttaatacccccaatgagagcacagcctggttgttatcccaagtactattctatcttcattattattgttattaataatgtttgtctaattgatttcctgtcatctggtcattactaacaccaagcctttactggagtggtcagaccattagtcacataagacatgactgttgatctgaacttcctttagttccaataagatagaatcataaacagataggatgttggaggtagaaggtatctgaaagataaagattgtcttccgaataggaagaaacagaagtgctttgcccaggttaagctgaaagacaagaactcagggcttctaattccaatggtataattcttaaatgcaattgggaaataattgcccatctccacaaatgtaagtttagttttggcagatttgcaacaatgataaaaatatttttttgaatggaaccagtcgtagcatagttttttttttttttaayctcacagagctattaaattaaagccttgaattgaattgaatcaatggtcaattcatctttaaatttctggttttcatctcagatgttttccacaatattttgatacttacaggtatggtaacccatcgagtgtgattggtctttgggtccttggaaataatttgtgttttatggccgttgcctgcttgttaaagattagcaggagaaatctgagtatggacaggaaaaagtttgcttttttctctctcgagtgttcagagtaggaagtaatcaatcaaattatgggaataaaatttctttcccttttttcagagttcttacttggattagatctctcctttcactaggaaatatcaaagttgccaggctggtttgaatgacaaagtcaaaaatgatgtgtttgttatggtcataaatctctgtggattctcattaagttcaggtatttaacaaaagggaactggattaagctgcaactaaagttacattcccggagctaactgctcccctcgtcacctttctaaacggaagccatgtttgccctaactccatgttttgaaaaaacgctgccacgatgcagtgatttcatttcacagacaaagctttaaacaaagtaaacagaaacttgcacctgtgtgtgcgtgtgtgtgtgtgtgtaattttctggtgaactctacttattcttgtagtttcctttgtcaaatgttgtgtgtttgcttttttgttttttcttgttttaagaaagaaaggccacttttttctttctaatgaggccttactcttactccttggtgtaggaggcttttggattacaacattatttgttcaaaagggctttccccaaagccagagggtctactagaatgccctgctagggtttaatgatggaaagaaaacagattggatctgttttatatttatgtggggagaggtcacagggagctaaagcttgtgatgacaattctggggattttcaggtgcatttgccctgttggcgaagggtggcaaattggagaacaggccttggagaaactgctcagctcccatggattgttaccaagtaggaaggagggctcctagtgccttgtcctctgactttttaaagaaacttggaatatcgactttttaaaaacagattggaaaagaatttacatattaaaaaccaaaacccacatgaaaaccaaacaaacgtctgtgtggatgaagcgaatcaatctcaactgaagtgaatggctgcaagtttacagcctgtgacgtgtggtgaaggtcagagttagacaatccacagctggagtggaccagtgagtttttcaaacatgaatcacaagacatgaatgtctgataaaatcaatcattctttaaaaatggaactatatatcatgcctgtaatcccagcactttgggaggccgagacggtcaagaccatcctggctaacacggtgaaaccccgtctctactaaaaatacaaaaaaawtagctgggcgtggtggygggcgcctgtagtcccagctacttgggaggctgaggcaggagaatgccgtgaacccgggaggcagagcttgtagtgagctgagattctgccacagcactccagcctgggcaacagagcgagactccgtctaaaaaaaaaaaaatggaactacatataaaatggactatactaagagagtgaatcccatgtagtaagaaagacaagtattgtcttgacaaacttggttctgtttgttatatttacttatatagatgtgtgtgcgctgaaaggattgggtgtaaaatgtatttgctatagtggatcccaatagaaaaaaacagtttgaaaaacgttgactagtgtacatggaagtcatgtttgaaaagactaaaatgaatgtgcttcagggccccttgagaaactaagtgtgaacattgtatgctatggattctaaacttcaattcttttaaccctatatgcccatggcttggaactgtaccacgaatagactcactatgagtttaatgaaaaaacaacaatttaatgaccccttaggccaggtgtcagcaatttttttttttttctggaaagggccagatactaaatactttaggttttgtgggtggtacagtgtttatcacaaccactcaattctgcttgtatagcaggaagcagccacagacgatatgtaaatgaatacgtgtggctgtgttccaataaaactttattgacccaaactataagaccactggctgttgtttgcagacttctgggctaagccagaggcttcaaatatctcatatgtgcttcctttatttatgggttactctcaggtgagcacccgcagctaatattgatggcaatgttagggaggcagaatgtaggtgatgaaactccaattcaagatccaatttagaaataacagagctccctgtggctgtgtgggaatgggattaggtcatgcattctggaactgcatgccagtgacctgtatttttgaaatggacaaagttgtttgggaggatgacattttctagaatgtgattatatgctcaactacaaatattctgttttgaaatagacataaacaccaatcaaagtagtggtaggtcttttttttcaagcttaatcatctgttttgatgcttccttgactttgtacttgagtgtgtttagtttataaatcatcccctgctctctctttttcctttagatgcctgggtaccatatgaatcatttaggagtagtaggggtacagtgaggtcactttcattgtcacctgacttctgcactgaaacagcgtgttattcactcatctgtctgtgcaggtgaggagtgagacatcaagttaggaacaaaggttgggaaagatttttgaagattattattatttttatttttgagacggagtctcactcagtcaccagattggagtgcagtggcatgatatcagctcattgcaacctctgcctcttgggttcaagcgattctcctgcctcggcctcccgagtagctgggactacaggcgcacgccaccacacccagctaatttttgtatttttagtagaagtggggtttcaccatgttggccaggatgatctcgatctcctgacctcgtgatccgcccacctcagcctcccaaagtgctgggattacaggcgtgaaccaccgtgcccggcctcaaagattattaaggggcatgtttaaggagttgggactttattcaaaaggacagcacggtccaatggaaatgtaatgagaaccttatatgtaatttcaactttctagtagttaccttaaaaaggtgagagtaaagaggtgaaattaattttaataatattttaacttaagctaatatgtctaaaatattatattttcaatatgaaatcaaaataaaacattattagtaagaaatcttgtagttttttatattaagtcttcaaaatctagtatgcctttttttttttttttttgtgagacagagtctctctctgtcgcccaggctggagtgcagtggcttgatctctgctcactgcaagctctgcctcctgggttcatgccattctcccgcctcagcctccccagtagctgggactacaggcgcccgccaccacgcttggctaatttttttgtatttttttagtagagacggggtttcaccgtgttagccaggatggttgcaatctgctgacctcgtgatccgcccgcctcggcgtcccaaagtgttgggattacaggcgtgagccaccgcgcccggcctaaaatccagtatgcattttacacttgcagcagatttcagtttgggttaactacagttcaagagctcagtagcctcatgaagccaatggctattctactggctgctcaaggcactggaggcagagtcagaggagggggcattgaaggcttgcagtggaggactgatttcacasaccccctctggttctgctgtggaaatctagttctcggtggcatacggatgcacactgggataggtggccgttgaggaatctagaggaccgatgatagaggcttgaactagagcagtgyggtatgcatgggaagtgagggaaatatttggtagatgtttcagaagtaggacttataacactgtgtggaatactagccatgcgaaaaggaggaggaaagggagagtagttcagttattagtaactgtaactgtgataaggaacacagaggcgggttgtggtggctcacgcctgtaatcccagcactttgggaggstgaggcgggcggatcatgaggtcaggagattaagaccatcytggtcaacatggtgaaaccccgtctctactwaaatacaaaaaattagccgggcgtggtagtccgcgcccgtagtcccagctacttggaggctgaggtaggggaattgcttgaacctgggaggcagaggttgcagtgagccgagattgcgccactgtactccagcctgggcgacagagcgagactctgtctcaaaaaaaaaaaaaaaaaaaaaaaagaacgcagaaggaggaaataacaggtctcaaggggaacgagcaattttgtttcatacacgtaaagtggaaagcgctctgggttaagctggagcccaggagtaagggtcagatttgggagccatgatcactacggttgtgtcagtggccagcacagccaagatgtgaacgtatgtagaggagcagacctaggtcttccgagtcctactggtgcttatttctattctagacccaaagggagaatttctgtagtctataccatgcatgcagaaatgtttagtgtgaactgctctccmcaatttactttgaaatgcattttaaaaaggaaaaaaaaaaaggagaatagggccaggtgcactggctcatgcctgtaacctcagcactttgggaggctgaggcgggtggatcacctgaggtcaggagtttgagaccagcctggtcaacatggtgaaaccccgtctccactaaaaatacaaaaattagccgggcgtggtggtgcatgcctgcagtcccagctactctggaggctgaagcaggagaatcgcttgaacccgggaggcagaggttgcagtgagctgagatygcaccactgcactccagcctgggcgacagagcaagactctgtctcaaaaaaaaaaaaaaaaaaaaaaaaaaaaaagcacagaaaaatgagtatttagattgtaattggcggctaaatggttgttcatggtatagttctttcaaagttttgctctaacttacatttccacaataaatgctggtaatgaggatgggaggatggtttcaaggtccgtggtatcaaatactacagaaaggatgaatacaggttttattatttgccttgtgagttaaraagtcgttggtgaccttgaagccaggtgggcttttgcggtgtgacagaagccacatggcatggggtgatgagtaaatggaaatgtgtcagaagacacaggaatgtaatgaacttcaccagtgtatctgtgtaatctttgccaccttccctatctttcctggacttgagtcacccaatgggatcctcatacttgctttgtgatgattatgactagttatccacgtgaataaaacttcctgagatgaaaagagggtttagaatgtgcttactgtattttttcctggttactgcacctatatgccctggtttctgtgtttatgtgtttgcttatgtatagtggcatgattaattgtttttttaatcagagagttttagccaaatcaatccttcctttcttccttccttccctccttccttccttctttccttccttccttctttccttccttccttctttccttccttccttttttccttccttccttctttgcctccctccctccctccgtctctcccttccttccttccttccttcctctctctctctttcttcttttttttttttggaaattgcaggttgtgctctttggatgaatgcttatggtttccatccttaatgattaaacacacgtagccatgtagcaactgaaatgcctgtttaattttcgtgaacattttggtaaaagcatagtggttcttcttcaaggcagcacttgtaccagtctattctaagctccattgcaagtatgaaaataaagacaaacttgctttaagaatctccattttttgaatacttgcttgaagatttcatcagagaatgaagaaatttaaataccttatggtttttcctcattaacattgaaggcttttaaaaagttttaaccattggctattcttccatcagtgacatatttttatgtgttcactatgaataccagatagcacataaaatccaggtactctttgctttgcattcaatactttcctttttcttctctggaaatcatggtaatggtgagaaatcctcaaaaacgaagcaaagcaaaaaccctcaggagtgagaaaaccaaaccaatgtattattgctttattgtctgactcacaaatgtactgctcatggcaaaacaaaaccaaactaagccaaataccgttgtagtgttcaatttctcatttagttcacagcgaatatttgtctccaactcatagaagttcgtagagaaaagaaatagagaaaatttcaagctgaatgttatttaaaataagtggagtgactatgtaaagttcaacaactatgttcatgtcatctctttagatttaatattgggatattgcaaataattaatgtatttcaccatgagtttcttttccagtttgataaaaaaatctaagggtaggcctttagcagcatggtgacgtgttaaggggcatttttctggaggggatgagggagaagagaaattgagagtatgaggagcccagaaaactggagaatgtaaaagctggtggcttaagtttaaacaaataygtgcctgagatcttcacttttctaatatcctgattaaaataaagccagactccttgtgactctctgcatatatgtaacaaaatttagaatatttcattgcatgaccagaaactccacacaactgcagcagaggagaaaatagaaaaccaaaaggggaagagaaaagagaaagtagccctcatcaaatgcttcagaggcccaccaataaaagggcaaagaggccaacatgaaggggaatgtgatttaacggcagtttcaaattttcttagtggtcgagtcagattttttcaaggaataactctgaagacttctgtgagtcctaaaattcacagatgccgaaatgtttgtatcttctctacgtctcccgcgtctcatrcctttctatggccgtggatttccagtggatttcctcatacccacaatttattgcctttcagttaccactataattttgttcacaaagttgcatttttctctcatatctggagaatgaatggctgtaacatcttcacaggaatttaaactatctgcctctacaaaattaacaaatgactgagtctcaggaactgtgcaggctacttacacattatcaaagagcaaatgtgaatctttgcctgccagaggttactctgtattacagcattatctaaaaaataagtcactcggaaagacaccatagtattttaaatatgatttctgatagactgattgatttctcagggaaagaaagcatgaaaatcattaagtaatataatgaatgagaaagtagtactatgcaaatgaaaacgtgattattttgaaatcttagaaatacgttgggcattaaatgtttcatttcacgtgcaactccttgatcgtttagcaaaccacatcagtggacagattatattttggctctattcatgcaagcatgtttttccttcatttataaaaaagcaaataaagcatagttcatttaaatagctacatgagtatattgatttggacttctgacttatgtattcctattatcatagtatactagcacagttgtaaaggttcgggcaaaattattgcccttttaaacaggaagttcttaaaaaccaaataataactggatatttaagcaacttcaatacattgatttgggcatatgacttttatgtatgcctattatcagaattgcgtagaatatgctagctcagttttaaaagctcaggcaaaatcattttccttgaaaacagaaagttctttttcttcctccccaaggccgctaaaaatttgaactattgaactcagatttgagtgatgatgtactatactttgccaaacgagttgtttccccttttataacatccatcagaaaaaaaaaagaggaggaacacttcctgtcatttgttcattggtcaaactgtttgccaggaaagtctttttttgtgtgtctgtttgcttaagtcaaggtrattttaaaataggaagaaaatttcacaccgttctcaggtgacatttaggaaagaaaaaagtatgagtctgtgtgttacattctattggcacagaaatgcccagacagtagttaaagggcgaccccctgggaactgagtttatttattcttatctaaatataaagtaccttgttattaagaaaaaagtacactatcacaaaatctcattattagcattggaaatgaacttggggtcatttagcccaatacttatctgatagaccaaagtttattaaaacagttctgtagctattctagtcatcaaatcatgtttttaagataagttctcaaaacattgatataacataacttatttggatggtaaaaatatttattcagtccattgcttgcttgcctgctcattgacaagcacattcacatctatttattctgtatttgtgtggctagttgttttcagacagtgttgggtgtgtagacaactttagaaatattattttattagcttatgttaaagtttattaattaggaagtttctacgttttttttttttttttgagatagagtctcacttcatcacccaggctggagtgcagtggctcgatctcagcccactgcaacctctctctcccgggttcaagtgattctcatgcctcagcctcctgagtagctgggactacaggtgcgtgccaccacacccagctaatttttgtatttttagtacagacagagttttgccatgttggccaggctggtcttcaactcctgacctcaggtgatccacccactgcagaagcttctactattatgtgtatatagcacatatataaatgtatatgatagacatataagttaagtcagttctgctgtaatgcttgtattgaaatgcaaatttgttccaatggaattaatatattaatattaatatctttgagcataccatttgaccataatgtgagctttgcatttgcttatgtgcattttcattcacaagaaacggcagtgaatacagaaaagcgaaagttgcacccagcctcacaggaatacacaagcacacacatgcaggtacatgccccaaccgcctaccagagacctcaattgactgtgtgtgttcttttttttgtttgtttttgagatggagttttgctcttgttgcccaggctggagtgcaatggcgtgatctcggctcacgacaacctccgcctcctgggttcaagcgattctactgcctcagcctcccgagtagctgggattataggcatgtgtcaccacgtccggctaattttgtatttttagtagagatggagtttctccatgttggtcaggctgatctcgaactccgacctcaggtgatctgcctgtctcagcctcccaaagtgttagtataacaggcgtgagccactgcacctggtccactgtgtgtgttctgagtcttacccctaaaatctggctttaagctggattttactttactatgtttttctttttaaaattattattttttattaacttgtttttaattgacaaatactaattgtgtgtataaatgtataaacagggtacagtgtgatgttttgctgatctgattttagataaccttccattcaccacttcacaataattcacaaactgcaacccctccaatgcccacttccatgagaaaacactagggctttttcaaagtcaaagtgtcatttttattttagaatttctggatttcttaaccatcaacatgtatggaactgtgttaccattgttatttaggttctttttattttttttaatgtaccactgagaaaattttaagtgttgtaccctaatcctattttcctctaagtcctgtggtttttttaatctgtgaatttttatcagcatagtgatttgaagaatgcgtgtgttggcattatagcacaacagactgtatatgctgccccttacgaaaaacatggcaaatgcaatggcaaatgcaagacatggcaaatgcaaaactggtagccttgcttttgttttgtttttaacctaattaagatcatagtatatgtataatttcttttttcyttttttttttttttttttttagacagagtcactctgtcacccaggctgagtgcaggggcacgatctcagctcactgcaacctctgcctcccaggctcccgaataactgggattacaggcaagcgccaccacggccccactaatttttgtagttttagtagagacagggtttccccatgttgacctcaggtgatctgaggagttctgtcagtctcccaaagcataatttcttatggtttttttttttttttttttttttttttggagatggagtctggctctgtcacccaggctggaatgcagtagtgtgatcttggctcactgcaacctccgcctcccaagttcaaccaattctcctgcctcagcctcccaagtagctgggattacaggtatgcgccacctgcccagctagtttttgtattttttagtagagacagggtttcaccatgttggccaggttggtctggaactcctgagtgcaagtgatctgcccacctcggcctcctatagtgctgggattacaagagtgagccactaggcccagcctaaatcctcttttaagagtatctcatagtaatcattacccctttaaggtactttttaatttgggactattataagggatacttttgatggaaatctttgtttgtaatgttatttctaatattgagtaagagtttagaatacatttcaagaagtagaatcataaggtcaaaggctatgaacatttgatacatactgccaaatcgacgtccaaaatggttgtatgattttacactcccggcagtactgtaccaatagaacagtggtagagtttccacatctttatgatgctgaaacaacaaagacaaaaaatttcattaaaatgaaaaaacgtgtccagttatatgaatggctttcttttttgaaaagatacacagtgctaggcatctgggaatttaaaaatatataattatgtgatatggtcaagaaaatgttcagcttatctagtaataaatgttttcctaggtagctgcatgttgcttgcatattttgtatatttaataaaaatgacaaatttgagtatctttaataatgaaaaatcaacatctattttgaatacatgaagtaattcaaacagtcaaatacttgacacacctgcaaataattgcttatattgacatgatctctgtaattcctcttactcaggtaagattttgttattagggtgtgtctggtgttatgctaaaaatctaatcaacattcattcgttcagtattaccaagtctctttcctgtggcaagcactgtactgaacactggatatgtatgtctaggagagactgggcccagacttcagattagattgaataaattttcagacaccactgtggaaaccctgacttttttttttttttttttttgagatggagtctggctctgtcacccgggctggagtgcagtggcacgatcttggctcactgcaacctctgcctcctgggttcaagtgattcttctacctgcacttcccaagtagctgggactacaggcrcccaccaccaagcccagctaattttttttttttttttttttgtatttttgtagagacggggatttcaccgtgttggccgggctggtcttgaactccagacctcaggtgatccgcccacctcggcctcacaaagctctgagattacaggcgtgagccaccattcccggcctggaaaccctgacttttaaaaagattttaagcattttttaaaagattgcatggattctgttgtctggatgtcccataagtcacttaggcaatccttattgttcaatgtttaacttgattccaatatttcactatgactaaaactgccgtggactccttgtaactaaatctttaatgctcacctatcattattttcttatgataacttctcagcagaaaaaatggctgagtaaagtgatatatgcattttttaaatcttttgacgcctgttacaaaattgccctttggaaaagttgtatcaaatactgtctctggtagtgtgaagatgcccgttttgattgggttctagattaagagctattctaagaattcttttgacacacacatacacacacacaccagaaactgctaccaaaatttcttgtcttctttaaaatagtcactagacttaaaagctggggcctgaacttgatgcaaatggtagtcatattgactaggataataaagcactttctagtagggatctagccgtggctttgccattaattaattggtgaacttgtacatacttgtgttttatctctgactgagtttttttcatcttctaaataaaaatgtcaaatttggtgatttctgttggtttcctccaagcctacagttgtattattctatatgtattctgtcctggattatgtaaattttgactaaggaaagcttgtggatatgactgttgtcatgaatgtcctcaagctctcattattcctctgtcccgggagggagaagttagctgtactggtttccttgccagaccaaaaggctcttcagagtggaaggcagtggggaaggaaggtcttctttcatgaggcagtcagaaagcaaccccaggaatacaatgaactgataatagcttggagaactggagactagcaagatttcctccagtcctggccaggcagactcagggtgaagaaaccttagttccatgaattaatagcatgctgagtaggtgttatcatttggctgtgtccctacccaaatctcatcttgaattatagctcccataatttccatgtgtcatggaagggacctggtggaaggtaattgaatcatgggggtggatccttcctgtgctgttcttgcaatagtgaataagtctcaagagatctgaagattttataaaggggagttcccctgcacacgccctcttgtctgccaccatgtaaagcatgcctttgctcttcctttgccttctgcaatgattgtgaggcctccccagccatgtggaactgtaagtccattaaatctctttcctttataaattacccagtctcagatatgtctttatcagcagcatgagaatgtactaatgcagtaggccatcctaccaaccaaatgtctgttctgccatctagtgctagacatgaaaattgtgattaattgcaccatccggtttattggttaaaaaaatcattaggattgttgcttgctctaggaatagtgaactaatttttagaatgtcccttgatctctactgctggagaggcattaattaaaatcagatgcctcagatgttaggtgttattaaaagtttttggacacccttaacaccgctgtggtgatcttccagatatgtccacaaagtcatatactcttgatgctcttttctttaataattgaagcataatcctcctcttggatgtgggctagacctagtcattcacttgcaacaaaaagaatataagagaagtgatgagatgtatcttccacgcttggcttgttaaaatattgtgctttctgtcttgagtgcgttctctgtctggagtgacttgaagtagcagaaattagctgccatgttttgtgagcagcgcctatggagaggcccacatggcaaggacctgaagtcttccaacagccacgtgagtgagcttggagtgactcttccaccttattcaagcatccatatgtctgcagctccagctgatgactgtgatcscaagagatacactgagctgagctgggaccacccacttaagcagctgcagcattcctgactctgggcaactgtgtgagataatcaatgtttgttattttaagctattaaggtctagagtcccttgctgtgccgcaattgttaatgcagccaccaccaccatttgctaaggcagtgcttaacctaagttgcatcagaatcacctggagagctgattaaaactcaagttcctgggcctcagtcccagaaataccaatgcagtaggcttaacatgaggcccgagcatttgcatttctaacaagcttccaagtagtgctgatgctactagtgtggagatcatcctttgagcgacaagacctttatctgctttccagaaagacttgccgtgaatatgctgttcacagcagggtaaatcttttccatggcacttttctgggaaatgtttctagctcccccaatctaactggagcctctgcttcccagcattgatgggaacgacagttaatacttacaatggttatttttgaggcttctaaacctgctgggctttcggtagacattccagccactagtcaattatcagctcattattttccaatacaatttccctcccttcttatcttctattggcagactctttgctaacctctggtttggtcttgtgctatctgggaacctcagatacaggcagaaggagctaaaatctttgattgacccctagaataagctgtgagctgaagattttttgtattcttttcctgatgcaagtcaccacagttagaagtgagagagcaaaaactccctgattggaactaggaatcagcaaggtatagattcatgctctatagtttcttcttcaaagcatacccctgcctttatcttaccagtgtgtttcatttgcaatgtcttatgaatttggcaaattatgaaatcaaaattgaggctgrgaatttcatgtctttctgacctcatccattatccatttcttttttgaacctaaaagatgctttttccctacttagtgtaggagtttgcaatttgatggaggaatcagaaaagagcctcagcatgggtagtacacataatgctaggcaaagggtataggtaataattatcagagagtttcacaactgagagagcaagcaagagtggccttggtatgctaaagcaaatgggggaaagcctcctgaaggagatgggattattaaaaaatggataggaattagataaacagagagagactgagaaaaaattccaggtaggggcaactgtgaagtggaagagggaagcatatgtggatgcattacaggatggtggcaagaggattaatttgactataggggatattttgtcttcaagcagtatttcaaggtgagatgggaaagaaaaagcagaccccccttgcaagggaccctggacatcagttttagtgttttacaattaccatctattgacatggggaacatttttgagcagggtgattatgagacatgcccttcatttttttgtgtgttttktgtgtgtgtgtgtgtgtgtatttgttttgtttggttttgttttcagatggagtcttgcactcttgcctaggctgcagtgcagtggcatgatctcagctcactgcaggctccrcctcctgggttcatgccattctcctgcctcagcctcctgagtagctgggactacaggcgcccgccaccatgtcccgctaattttttgtacttttagtagagatggggtttcaccgtgttagccaggatggtctcgatctcctgacctcgtgatccgcctgtctcagcctcccaaagtgctgggattacaggtgtgagccaccacacccgacccactgttttaagagtgatagggccgggcgcagtggctcaggcctgtaatcccagcaccttgggaggctgaggtcaggagttcgagaccatcttagctaacacggtgaaaacccgtctctactaaaaacacaaaaaattagccaggcgtggtgacacacacctgtagtcccagctacttgggagtctgaggcaggagaatcacttgaacccgggaggtggaggttgcagtgagctgagatcrcgccactgtactccagcctgagtgatagagtgagactccatctcaaaaaaaaaaaaaaaaagagtgatatggcaatgggtatatactgaattaattgagcacaaggatagagagtactggggtgagaactgcattagggaatggtcttagtttatctgctgtaacagaataccactgatttaaacaacaaatactgatttcttacttctatggaggttggaaagtctaagaccaaggcgtgggaagagctggtgtccagtaagggcactctttctggtttgcagactgccatcttcttgtgtattctcacatatcagagagagcagagagaaggaggcaagctcccctgtgcccgtaactccactttggaggctccaccctcatgccttcatctaaatccaatcacctcgcaaaggcccccagctcctcgtaccatcacattggagattacagtttcaacatatgaatttgggggaggggtacaaacattcagcccgtgttgttgacactcacactcaacattgagctcagtcacatgttgattgtgaggatagagggttctggaggtgggaactctgccagagacacagctactgtcttttgggctggtggcgatgaagacctggaccaggaaagactggagaggaagaatcatcagatttygatttctggttggttcaggagactaaaaaggaatcataaatgatgactttcccaactttgcagcatggtggtgtggaaatgggtagaactgagggggcatggttgtggatagacagagaggtcaggtggggagcttcgagttctaggtggaaccttccatgagacaggcataacactacaaatggaggcttggaatgctctgcttggaagtgagaagacaaagcatggatggattgagtatttatgagttggaaggaggaggaggtcttggaagaagccttcctgtgggcattggggtattctaaaatgcattcagagagggtggatgagatctagggcaactgtaatgccatagaggttggggaaaggtcattttaaatgtggacaggaaggaggctaaggagagccaagaatactgaaaatctgatggatttgtcaactaggagrtcagggtgaggaatctcatggtgttcaatgaaatccagacatcagtggaaaaacttyagtggagttggctgtaatctttcttccaggacctcctgaactccaggactccacataaaagtccttttctgctcattgggatcaggctgttaaataagcaaggtcttgtggcggaaaagggtcatctgctttcyctaattcaatatatacaattttaacttattcttttcctgcctcccatatccctaacaggacggctagttccttgagtttgtgttttgctcaattttttattttcctgtggtttctggcacagtgccttgcacatggtaaaaactcagaaaatagctgttgaattccccgtctacttaatcctgtaaaataaaagcatgggtgtgaagatcaggcaggtgaaatgaccttaacaaattaaaacacagcctggacctctcctctagggagcccagcctctatgaacagaagccagagatttaattacagccaatacaattgtgagccctatatcaacctcaggatcaaatccctgtagcagctctcgcatactttctgctggccycccttgatgcccttttttcrtgggtatttcttagcaccccgactttctctaagcctccatttacaatttccaaatgcattgttttcctagtccttccagatagggtcccacaagaaagtggtccgagcggtcaccccctaggatggaaaggatccttggacacaggagcccaacctttgatcctgcacctgccatatgatgacttgatttgggataagtcagttcccttctttaggactcagtattatcctctcaaaaatacatttgattaaatgttttctgagcatattcattcacctttagagaaatatccctaaacatttcatagacgtaaaaaggacatggtaaggagagagatgaagagagacagaaaaaataaatctatccagcamcatttggttacccagaaaagcattttcctgtggagtctctgtgttttttaaaaacattattggcagggtgctgtggctcatggctgtaatcccagcactttgagaggccgaggtgggtggatcacatgaggtcaggagttcgagaccaactggctagcgtggcgaaaccccgtctgtactaaaaatacaaaaattagccagatgcagtggcacatgccggtagtcctagctactcaggaggctgaggcaggagaaacgcttgaacctgggaggtggaggctgcagtgagccgagatcatgccaccgcactccagcctgggcaacggagtgtgactccacctcaaaacaacaacaacaacaaaacattattatgaaaatttcagtatatagcagcactaaaataattttatagtgaaaactcatctacccattgtctagattctattctttacattttactaaacttgtttttatcatatatgtttccatctacctatcctctctccagcactaattccctttttgatttcctgatccctctgaggatatgactgtcctgagacatcagaggcttgctgtaaagttatggaaaattgtcagtcattgaggtgaagtgaggttggccagttggtaacctgtgccatctaggttgccctcagaaagcgattttcttcctgcagtcgtcaaagygtagagcacttgctaaaataatgcatcaactgaattatgtaaaatatgagaataggaagactgagtttctttgaaaacagacacacataatttatagatccaattaagtaatgtccatcaaagcaktccccagcagaggttatgtacttactctagtattgccgtcacacagagtatttcgggggatttttatctggaattccctctagaactacatgtgtcacaaggaaactggctttattgtttctagacaggccatacactgattagattcataatcacagctttgcaaagcccccttcctcccacctttctccctttaattccagtttggctctagttctaactacgcatgaatttgtatgggctgatagcacaattgtgaattccctaggtttacggacacctaagaagacagccttggtaacaacaggcctctcctatatctctaatgctgagcaactcattgccaaatgcctgcgtctcagtttccttctctgtcaaatatggtcaaggacttttactttgctttagtgaaagggttgttgtgattaaaaaacaaaacaaaacaaaactgagatgcgtaggaacctaaaactcctgtaaatatgtgaaaaatacatggatattttgattttaactgtgtttaaataagttgtaggctggacacagtggctcacccccgtaatcccagcactttgggaggctgaggctggcgaattgcccaagagttggagaccagcctgggcaacatgatgaaatcccatctctacaaacaattcaaaaattagctaggcctggtgcatgcacctgtatcccagctaatctggctgaggtggggggatcactttgagcctaggaggttgaggctacactgagctgtgattgtgtcactgcattccagcctagagagcagagtttgtttgtctcgaaaaacaaacaaacaaaaaggaaataaccttagaatgctagcaatgctggaattatggatgagtgattatcttttttttcaaaaccgtataaggtgatattattacctttatcatgaaaaagcgtattagaactaagcatccaatattcttttcacttttaggacaaacagcaagaatagacttttgtagtagttacttagttcaagaaggaaacaacgagtcatttgagacagagattgaaatagcatggagaaggtccttctttgtctcctggtagcattgagtacgatttaygtcttccatatcctaagatcattggtttactttgcatctctgagtaacagctggaatctctcaaatgtggtgagaatattcatatatcaataattctagaagatttttcttctaccagttttgagctataagaggattttgaaaggttagaataactgtttgttaaccagctaactcccatcttctgcacagtgccactttccaagagggattaatgggaagtcccagaatagaatctccagcctacacatctaggacacagcttctgtgagcaggaaggtgggaggagtgtggaatggttaaagacccattttagatggagacgaacagagaatgtgaaaaccaggaaggtgacagccagagctgatgataagccagctccaaaggagaggtagcactgagattcttcagacatgcttttcagttatattttactttttgtttcactacctttcccaagggattgaatttacatcagaattttactcccagtggaggtctcttgcattaaagtttcagaagttgatagttgtaaaaaatgaacgcctgaaaaatcgctactggttgtatagagagatagaaatggaaggagctggcagggcatggctgggggacactggccgtgaatcacctgattcatgcaggctttgtgtacttgctgacaggccgcagcagtctccggtggagggctgggactggtgtgtgtatctgccatgtctcgcagcaatgcatgtggagcttggatgcctagcctctgttcacataatatggtgccaataaagcatcataattaaaatctttaattatcacagaaacatttccagcaataagagggactgagctgaagaaagaagtgatctacttctctcttctttccacccaaaataaacacaaaagaacgctgcataaaatgtaacagctaccacaacaaaaacaagtatatccagccaaagttcaaagtaaggaaatcctgccagggcagtaagtgggggctgaggctgctgtagcccacagacaataaacaggagaaaagacctgggttgaaagctgggattcaggaatttggccactgcctgcatttgcccctggagacaaaaccatgcctatacataaagccaagcatcttgacacgctccatgctccttgacctcatagattagaaaaccctgcctcccaggctcagcaaaagtgccaggaagcttgccctctctgtaggcttttggacaaaaaataaaaataaaaaaagtctctcataaggaattaaaaccacaggtctgagctctatgtttgcatgtggcctgagtttatgcttcccgtgaagtgtgagaaccacaagctgagaaatcaacagaagaactggtctcaggaccattgaaaaccttggtatctttggcaaaagaaaaactgaagctgttccgagtgattttttacaacttggttcccaggagactaccccagaatgaacgaccacaattgaggatgggaaacacagttagaaatttcagtcactcgaagaaagaaacctaccgtgtggaagaggcagtagaaccaacaaaccccaaactgacctcaaaatcataacactctgaaagatacttacatgcttgtttcaaattaaagaaacaaaagaaaatattaaaattattatgaaaaatctggacagcataaaaatatttgacaaagagccaaatagaatgtgaaatgaaaaattgtaaatgttgaagttaaaaactcaataggaaggataaactgcagattaaaatagcagaaaaacatagtccaggcatacctcagagatcttgcaggttctgctccagaccactgtaataaagcaaatatcacagtaaagcaaatattacaataaagtgagctgaacaagttatttgatttcccagtgtgtataaaagttatgtttatgctatactatagtctattaagcgtgctatgtaattatgtctaaaaaagtacataccttagtttaaaaatactttattgctaacaaagtactaatgatcagctgagtcttcagtgagttgtaatctttttgctgagaaagagtgttgcctcagtgtcgatggctgctgactaatcaggatagtggttgctgaagactggggtggttgtggcaatttcttaaaataaggcaaaaatgaaatttgcctcattgatccactcttcctttcatgaaagatttctctgcagcatgcgatgctgctgtttgatagcattttacctccagtcgaacttcctttaaaattggagtcagtcctctcaaatcctgctgctgttttatctactaagtttatgtaacattctaaatcctttgttgtcatttcaacaatgctcacagcatctttaccaggaggagattccgtctcaagaaaccactttcttcgttcatccataagaagcaactcattatcggttcaaggtttattgtgagattgcagcaattcagtcacatcttcaggctccacttttaagtctagttcttgggccatttccaccacatctggagttacttccttctctgaagtccagaacttgtcaaagtcatccatgagggttggaatcaatttcttcaaaactcctgtttgtgttgatattttataacctcctcccaagaattacaaatgttcttcatggcacctagaatggtgagttctttccagaaggttttcagtttactttgccaagatctatcagaggaatcactatctatggtagctatagccttacaaagtatattccttaaataatgagacttgaaagtcaaaattactctttgtcctgtgggctacagaatggatattgtattagcagttataaaaaacaacattcatcttatacctcagagatcttagataaccagatgcattatcaatgagtagtaatatttagatggatatcttttttttctgagcagtaggtctcaacagtgggcttaaaatattcagtaaaccatgctgtaaacagatgtgctgtcatccaggctttgttgttccatttgtacagcacaggcagaataggcttagcataaattgtaagggccctagaacttttgaaatggcaaatgagcattggcttcagctcaaagtcaccagctgcattaactcctaacaaaagtgtcagcctgtccttgaaactttgaagccaggtattaacttctctgtagctatgaaattcctacatggcatcttcttctatcttccacgttgtctacrtggaaaatctgttgtttggtgtagccaccttcatcaataattttatgtagatattctggataactttttgcaacttctgtgtcagtacctgctgcttcatcttacacttttatgttatggagatggcttctttttttaaaccccatgaactagactctgctaacttcacactttttttttctgcaacttcctcaccttctcagccttcataaaatatgagagagttagggccttgctctggattaggctttggcttaaggggatgttgtggctggtttgatcttctgtccagatcagtgataaggctgtttcactttcttatcatttgtgtgttcactggagtagcacgtttgtttcctttaagaacttttcctctgcatttacaacttggctaactgttgcaggaggcctagctttcagcctgtctcagctttcaacatgccttcctcactaagtttaatcatttctggcttttgatttaaagtgagggaggtgcaactcttcctttcccttgaacatttataacgttgtagggatattaaatgacctaatttcaatattgttgtgtctcaggtaatagggaggctgaggaggagagaaatgggggatagctggtctgtggagcagtcagtacacacacatttatcaataaaattccttgtcttctatgggcgtggtttgaggcacctcaaaacaattacaatagtaacatcaaagaccaccaatcacagatcaccataacrgatacaatagtcatgaaaaagtgaaatattgagaaaaataccaaaatgtgacacagagacacagcatgtgagcatgctattggaaaaatgaccccgatagacttacttgatacagggttgctgcaaaccttcaatttttaaaaaatgcaatatctgcaatgcacagtaaaccagagctcaataaggcaaggtatgcctgtaataactaaaagataaatgataaacttactgaacagcagaggaaaacagctgaaaaacgttaacaatgaaaagatttgagaaacttcttaaagagataaaaagatggaactgtaaaagggtggtttacacactcggagtatagacttactaggtccaaaatgcatttaataaaacttccagaggacagaacgtggagaactttcagataaacaaagagagaagtaactacacaaaacctttactgaaactactaaatgacatgctttagcaagaaagactgaatccagaaggaaaacaagatgtactaaaagcaagggtgagccgagaagatggtaaacacactcatccatccaaacgagctgtgactataaaattaataaaagtaatatgttgcttggattaacagcagttttaccaatggtaaaattagaatgagagaaaggtgaagtggagggcagtgttaaagcattttattttttattttacttacttatttatttttttgagacagggtctcactctgtagcccaggctggagtgcagtggcacgatcacagctcactgcagccttgacctcccaggctcaagtgatcctccttcctcagcctctggagtagctgggactacaggtgcaagccaccatgccragctaatttttgtattttttgtagagatggggattcactatgttgcccaagcttgtctcgaactcctgggtgatctgcctgccttggcctcccaaggtgctgggattataggcaggggcaactgcgcctggcctcaagctttttaaacccttgcattgatagagaaggattgcaatagtaatttgaggttttcttaaattagctaccatgcaaaaattgaaatgtaaccactgaaataataatttctaaactggaaagggattcaataaaataaacttgactactccaataaaagaaaagaaaaaaacaaacagacatagtacatagaaagcatcaaataagatgatagaaaacaagtccaaatttcatccaggcacgatggctcatgtctgtaatcccagcactttgggaggccaaagcaggcagatcacttgaggtcaggagtttgcgaccagcctggccaacttggcagaaccccgtctctactaaaaatacaaaaattagccgggtggtggcatgcacctgtaatcccagctacttgagagattgaggcataagaatcatttgaactcgggaggtggaagttgcagtgagctgcgatcgcaccactgcactcgagcctggrtgacagagtgagactctgtctcttaaaaaaaaaaaaaaaaaaaaggaaagaagtccaaatttctaagcacaggggacattccacatctgtgggttctacattcagggattcaaccaatctccagcccccgctcccacaaaacaatacaataataaaaagtaatacaaattctaaaaaatatggtctaagagctgtttacgtagcatttccattctgttaggtattacaagtaatctagagaagatttaaatgtatacaggaggatgtgtgtaggttatatgcaaataccatgccattttatataaggaacttgagcatccatggattttggtatccttagggggtactggaaccaatcctttgtggataccaagggacaactgtaatcaaaataaatttaaatggattaaaatcaaatactaaaggagtctcagattggataatttactcagaaaaaataaatctctgccaaaaagcatctgaaccttttgagaaaatccctactgcctttaatattcctcaggatatttcacttctgttattttctgcatcaaggggtaaaaatgcatgttgctgagcattggcaaaaggaagttcagagtacagaaaaaatatcattaacacatgtcatgaggtgctgctgatggaggcagaattgctttcctggattaacagtaaaaacttcctaaaacccatctaatctctttagcttcctgaagagcaatggtaattcagctttgtggtccacaagacgagtccaaatgttttattgtgcaatcgtagattggcccatttattcaataataattaataagaaattaatttttcttgataattaagaaaaactagtgcctggcaccggtgctcatagttgcaattttgtgatctttaagttgtcctttcacagttaattaatagcatttaaaaagtacagaaacgtgtatcaggaaaggaaggagctgcaaccgcatactccagggacaaatacccattgccagaaagagagacagcagccttcagttctgtgttggggacttgtgcgtgtcctttgaaaaggctgtttcctgaggctttgctcaactatgaccctctgaactccattgacttagtgattcccagagttagagagtgtcagagctaaaagaacctctggatttctgtgaagctgctctagagatgaggacaayttacatgctccctctctgccccccacactggggtcaacactttagactagtagctggacatatctgacattttcttagtttgcttacatcctcacaaaatgcctacatacatcctgctccaattcccttggccccagctggcataggtcctcctgcagaatgacttgagtgaaataaatgcaacattggtagcaaacaacccacagaccctccaggtaactgaaagagcccagaatatgttgtcccttctgcagcaggaagctccctcctaaatcccttcattccctttataccccaacttcagtttctttccataccctgaccaacctaaattgatgatgtggttctaccctttgctgcggttctggcgaacatttcagaggctcatcactgtccctttttccaaatggggtctaggtatccctggagaaggcagggctgggaaggttagataaagtgattctcttctccctgcttcccatttgcagcatacaagataacaggtatgtatttttcccacttatcgtggaccttcaagaatctatggaatcttgtttagggcccctttacgtctgactcaatttctttaccccaatgaaatgagcaaacagctggcttttcaggctctgtatcgggtcctgacacacaatccccttgtaaaagaagctagggccttccaggcaacaaaagttaggcagaaaaatcgtctttttattaactcaaatactgtcctgtcatagtaaatataagatggtttacggtcacagggcacatcgactggcttcataaacgctggctcctggagctcagctgggtgccttgatatttgactctggatggagtttggcccagtggaaacgtttgcccgtgatttccatcaatgtagaaaaacaggacttagagctcataaattctctgcctggccagggttggggatgggagttctattgtagagcctgggggaagggcctgaagcttgagggtggaggatgttaaaggacttccatcaggatactgtttcttcagtttttgaatctgtctttcacggtggacatttttatagggccattcaatcccaggatgtaatggagatcagagcgggtgtgagggggctgcaatgtcaggaattggatagggttactttcccccccacccgctgtccctcgtgtgtgcccgagcagccacactggtgacaggatgtgaaatgttcgcagaatagacgaggctgtctgtctgtccacggcacacacgtctgtccctgcctcttgcagaatgagcgatcctggactcctccagaccatgactgtgtctgactcatctcctggcatgtgatggaagctcagtccactcttgcaggctgcggctcctttttcctagagacagagccaaagttactgcttgcctattccaaaaagacagggtggtcatggccatggggagaagggaaagaagagggaggtatatccgttatttattcacatagtcaggtattgtaacctgtcacaaacgctggtctttgcttgagaattcaaccgtttataagggacatgggcggcgtgactttgtcaattacaggtttcttccccagctaagctcctgggcccagtgacagcccacaccactgagagcttcatctgaggaagccgccttcagcaccacacagatccgtaccctacactctctttttgccctttgtctgtcctctttgtacccctgggatccggacattggcactggcacaattcacagctctgtcattttgcrcttgtgtgagtgaagtgcctgcagttgggtgtggcgtccatctcctgctggaatcccgcagtgtctccagcctggtgggaggtctgacacattgtggacaatgcatttaagaatggtctggtggctaggtccagtggctcacccctgtaatcccagcactttgggaggccaaggtggttggatcacgaggtcaggagttcgagaccagcctggccaacatggcgaaaccccgtcactactaaaattacaaaaattagcagggcatggtaataggtgcctgtaatcccaaatcccagctccttgggaggctgaggcaggagaatcgcttaaacccaggaggaggaggttgcagtgagtcaagattacgccactgtactctagcctgggcgacagagcaaggttctgtctccaaaaaaaaaaaaaaagaatgatctggtatctcagggtgaatgctcgaatgctcacaagaaaatcaggagcagagggaaggaaaaatgcagtgcagtgtcacttcctaaggcaagagacttaggtaggggtggacaagaatacacagccatacccaaagtccaaacttcctttcctctagggcaatgggtctcaattctggctgcttgttagaatctcctgggagcttgtaaataccagcatccttgttctgtccccagtgatttctacttttattggtctgaggtaggctccaaggcatctctgcatcttttaaaagctcccaagatgactctaacatccatcgaggaatggaggcctctggctgagatgtgttacaaacagaaatgagggagatggaagcaatgtgtttctggtctcttactggatcttctgtgcccacctctcccataggctacatggtgtcaggatctgtgctttgctgtacagtattgctggaacttaagtttgaattttaccaaccttccttctgtaarcttcaggaatgtcactttaatttcccacactttgcttcccctgtcttttacaagaagaaaacattttaataagttttcctgaggtactaagtacttcagttccaaaccagattctctatcaggcacctgtgttgaaattgcactttgatcaaaatggaattgcaatagttaattatttagagatatttactcatgatttttagtaatggagctatattgttagtcagctcactttaccataggcataatcagcagggtatccagactaaaagaaactctatattccaaaccaaaaatccagacacacgctgtaataaaatttgttttcctccatgttaaatatcctgagtatgatgattgtattatgattacttaggagaatgtttttgtttgtaggtaatacaygtggaagtatttgaggtgagatgtcatgatgtttaactctgttacagttcagaaagaatatatagagttacacacacacagagaagcaaaggtggcaggaaaaaagaaatggtgactccagttgaagagtatgtaggtaatacactttttttttttttttttttttttttttttttggagacgagtgtccctctgttgcccaggctggagtatagtggcgctgtctcggctcactgcaacctccacctytcgggttcaagcgattctcctgcctcagcctcgcgagtagctggcattacaggcatgtgccaccatacctggctaatttttgtatttttagtagagatggggtttcaccatgttggccaggctggtcttgaactcctgacctcaggtgatctgcctgcctcggcctcccaaagtgctgtgattacaggcgtgaaccaccacgcccggccaatacactcttactattgtacctttcctgtaactttgaaaattttcaaaatataaatttagaggatcaaagaattgttaagaaaacaagatgggccttttgcaaaaaaaccaaaaccaaacttgctgcttgaaaaataaatattaattgtacaacctaagcaaaaaataaaataaaataaaataaaataaaaatgtgtatttacacattgcccctcagtctcctcagttgccttagggatagcctgtgcttccatcctgtacctggaatgtgaagaagaaagtgctgttcrctgaatttggtaggaacatgttcatttccatttctagagttttctaaggggaaggatactttaaagataatcaattgcctaagaccttaataataaataaattagccaataataaattaaacatataatacaagatcaaacttttataatatataatataaataaaattatatcataaaatataagattatatctaatatgtaattaatgtaatatgttatataattaaattttatatagaacattaaaatatatgtatgtaattgaatatatattcacatgtaataaaaacattatattttcaaaaatatttttacttttaggtgtaagaagagtgtagaagtagagtttggacacataaatgtctgaatttctagatgcttgaagaggtgtgtccattaatacgaaattaccttttccagatttgccttgggtggtagcccccagctgaggtgctaagagactggagtaaaacaaagcatctccacccagtctctttttttgttgtcataataatactaacagttaatattagttgaatactcatatgtgccaggctccaggctgattggtattcattgttttacacaacagtgttccagatttgtattccttgtttyacataattgttacaatttccccatgaggtaggtattattattagcctttgtacaagggcatagctgagattcagacaggcattgtaacttactgaaggccacatcactgctaagtggtagagtcagaatctgagcacagagcagtattattcctgagctcaagccttaaaccattgtaatctaccacctggccttttattattacttttcagtagcattgtggtttttttcttcaagggctattttttacactggcatttcgtaaacatytttgtgacaattttttagacttccgtgtttagcttatttgatgatgcaactctgcagtctctaatctcttcattattcagttctttaaaaagcatgtacaatatattaagtctgcaaatggtacagttaacttctcacatgccagatttgatattttgccatgtttgtttgtttcagacatagctacagatagatagagatcgttttaaagaaaataaaactggaatagttacaggcagatgtgcctgtgtcagattccaccctctgccttccttcgctcgagataatcatcttttttaacatttttatcatttgctttcttactttgaattttttattacttacatatagcatagatcactactgtttttgtttttaaattgtataattgatctttgaaatttttattttatctatgtattattgaagtacatagtactttatatatattataaataataccayatgtatatagtagaaagtaatgttttcaacatttacaattttttgcacatccaatttttgtttgtttgttttagagacagtgtctcactatgttgtccagtctggtgtgcaatggttattcacaggcacaactgcagtgcaccaagtctctaactcctgggctcaagggattctcctatctcagcctcccaagcagcaaggagctacaggctcgagcctctatgcctggcttttccatttttttcttaaatcttgtcctataaatgaaatcttggtggactatagctttcctgagtcatacatattttccctcagatttctgcggaatctgctcccaggtcttatggtatttaatggtgttaagtaaaggccttagaccacttcttttatcttgcttttaggtaacttacaggattctgtctttattcctaaaattcaaaacgtttaccaggacacagcaaatgcttgtcccttttcagcaattttgttaacgatgaacattttttctctgaggattccaggtcttgagatctttttccaaaacattcaatgacctacattgtggagcttcattctctgatctcaacctgtctgctcctcttcctgttcccatatctgagtagcttttctctgcagcttgagaggagatggcttcaagcttggcctccacaatgatacttaacctttctacttttgtattttcagtttctttgaatgakttcacctgtccttttttcctgctcacctcttaagtagctgcttcttaacctgtctttattcttactattctttattcttastatttccaatttcatctctgtttgatgaagtccatatttacatttagtgagagtattggacaggtatcacttaattcttacctygggtttttttgttgttgttacaaatcttcttttttcttccctctgaaaggtgcctttgttgtctctttctctttagaggttgtctttttcttttaattttgtaacttctctttctgatgtctgttgactcatgcttaaatgttcaagggttttactcaggcctttaatttgctcaaaaagtagagtgtgtgattcgcctcagataaacaggaggtctagctgatgaaaaatccattcttattaaatgattcagcaactgtgaagaggggaaaagaggcggaatcgcagggcatccattaaggaaacatttctgggccttcgtccgacccgtgctcatttttatgaatctgctgggctagatgtttgctttgtatgtatccttttgtttgttggaagtttgttgttctcatttgttttaatttgggtgagctaagccatctctgtggctatacaatttgactgtgtcgaacctattgcctattctggtacctgctctttcagggaatctgttcgctgtcctgaggatattctgctgggtgcaagtatgtgcaagcatggctgccattgagtttctgagtgcatttctgtttatgctgatttcatcttgcttttttttttttttttaggcggagtttcgctctttcgcccaggctggagtgcagtggcgcgatctctgctccctgcaacctctgccttccggtttcaagcgattctcttgcctcagcctcccgagtagctgaggctacaggtgcctgtcaccacgcctgactaatttttgtatttttagtagagacagggtttcaccatgttggccaggctggtctcgaactcctgacctcgtgatccgcctgactcggcctcccaaagtgctgggattacaggcatgagccaccatgmccggyctcaccttgctttctttttattttttatctatttattttattttcttttattttatttcttttttgagacaaagtctcgctctgtcgcctaggctggagtgcagtggcacagtctcggctcactgcaagctccgcctcccgggttcacaccattcccctgcctcagcctcccgagtagctgggactacaggtgcccgccaccaggccccactgattttttgtatttttagtagagacggggtttcaccatgttagccagggtggtctgccctgtcctgacctcgtgatctgcccgccccggcctcccaargtgctgggattacagatgtgagccaccgcgcccrgccggctttgccttgctttctaattctccccaaatctagggagattgawgtccttctggtgtagcccctcatcacatcacatactgttttcgggaaggtattatatctgtgcaacatggccctaggtgtcatcctttaacttgattcctcaaagctgaatgtggatgccacccttcactagggctcagtactgaagaagggcttcccagatttttcttcttcttaggtcattttgcataagattgggagaaagacaagagaaggaggaaatctaacgaaaccaaaggtatcttttatttcataattcgtgcctttgcttttatgcttagaaaacagttcttcaggaatgacttcatctgttttcaagttcttatatgtaatataatatactctcagacacatttaactcaacacatctggggttgacttttgcatgtggtttgaggtgctgctggagcttcatttcttatctcaagtagttaaatgattgtctcagcaccttctgttaattataaacatcttttgcatttttattattttatgaaaaaatgacatatttgtgcatgtagagaaatcatgttgtgtttgggtgttaggtctaaaactccacgtgtaagtaagctcttaatacagtctaacatcgacttgagaaactctttaatcaagtctaggatggttttgaggcaagatgcttccactctaaggggccctcagggatctggggaccttggagaagacaggtgagtctcagccccatttctgttttctaggacacaggctcctagttgaacaccaggctaaattgcctgcatcatttcagttgtgctgtgtctccccattgccaagttgaatctgtgtaagtgaaatgggtttaatgttgaatgcgacacccctttatacaaaagtagattacatttcttcctccacctgttccattcccatactgcttgaaacacggtaggtttataaaaacaagggtttgcgaaagacttcctggagtggaatggagggaggatgaactccaggcagaaaaggcccacccagcgggaggcataagggtgtaatctgtgctcargaagccataagtgtttttgttcagcagaaatgggggtcaccgctggggagtagtgggtgagaacaccgacgaggtaggtagcgtgggacaccattggtgaaaatggtgaattctagactgaaatgtctgtgagttatttgcaaatcaggcacgtgctgctgaatgaggttaagtgacattattctcagggggcttgaggaatactaatttggcacaccaggacayagggtggaatagagttagggggcagtctgcctgtggggagataatttatggggatattaccatcgtttagtttcaagataataaggtactagacttgttgggggtggagggtatggtggaggaaggtggtatctgttaaatcctcagggatggcatcttatcccaaccctgcaggttttgaaaatctggatgaacatttcctcttcgtgcttgaaagacaaaacctttgctttatctctctttcaaaaggaggctgagcatgcttcgaactagattgccttggtaggtctggggacttaacagttccaaagtcagcacccctcaacaagaaaggcaataatcagctgcgcacccctcaggggtttgcactgagctgccttgagcacatagcctacaaggcatcacagagatatcagcaccgcacagggcctagcggctgtcagatgtcagctctggtaatgactgtatcttgtaaaactttgtgaatttcccattccccttgtgagcacttttatttctcatttatattttttaataagcttgatacattatacattgctcatttgctactaaaattggaaccagtagagcaataactggcaattacctcctgagcgctgtgaattttcctgctacttttctggaatccgtggaaggctcagagctactcaaaccaccaggttttggccttaggctttgcaactggaccagyagtcttgccaagcctctgcctagaacacagactagccactcaatagaaactctcagaaaaaaggtacaatcgaatgtcttgcttatgaggcaggaagttttcaaaaatgctctttttccttctgaatctgtgactttttttgagtctctggccctcatgcttcctggtgatgatatcagtggcatcactcccttacctttgtgtctaattttccttgcagactcctgtctagagtttttataggacaattattagatcgtctattgctctatagctcctatctgtaagcagtatcagtggaataaaattcctcctggatgttattttaagggaagtttaattaagatgtggatagttaggtcaggggcctacttacagatttcaaaggaagtacctgagaggggagaatgtgtgagagaagggsattagggatgatgagcttaaaaaaaggtattttgataaactagtattatttcacatgtctagaaagaactctaggagttgccagaaaagagtaagttagctggctaggggcatctcagaagaaaagcttttaaaacaagggatgatgtggacaggtgtttgattggtaaggaatcaaatcgaagacattcaggggatttgaactgctgttcagaatttgagatatggattttttatttagaatgtaatctaatctggacaggtcttgaggaccccaacaaaatcaagggtagagaagatcttagttgtttcaactaagagagaaggcacagtatcctcatcaaagaggtctgtaatgatgctgttatttaaagctgccagtgcaatgayggcttctggcttaaaccattggtgaatgcagccacaagacccactcctttctgcaagcagcttctctcacacaaggtatgtcatggcggtcttcatggccaaccccaatgctgcacctgctggggcatcagcgcttcctgtcctgtgaacttacagaacacctctcctcarcccagcactgtcatagctgaagggaggaatgactccagctctctacttagccatagagacacagtgaaatcatttgttactgggatcctgtattttrtttgcaccctttagccaaagcaattcttgtagtctctgccccatgaaaaacattgtagactctgccccatgaaaaacaaaagaagctttaactaacatggtcctagaaagaccaggaagccttagacccaggggactagaattccaaatggcactacaggcaacttttctaggcagtcaattataattctccttcttgcttaaaggggaggactgtaagtctaccagagagggaagaagttcttgacttgatttattcaaggctccaataatgtgcatgcaatggaaaatgtgaaaagtgggaatcacttttctccagtataccacatccatttccacttctcaagcacaagggcagctgatcatgctgaattgggaaaggtcttagctgtgcctttctttgtcttaatttacatttgaaaaagttctccagccttgcctaaaacagttaatcattttgggttcagcactgttcctccaaccagtaggcagagttctggagaaagacrtatttctgtatacatggggattctctttataagtaaacttagaaatgaggtgacagagccaaagccagccacctaagatgaggcagaaacggcctcctctgaatccccctttgacgttgcccttgagaatgcttccttggggaagctgtmttgatcaacactggaatcgtattttgccctgccatgcctggkgcttaggttatcagtattgtggtcagccaagggaaaattaaagtgttcaagaaccggccaggtgcggtggctcacgcctgtgatcccagcactttaggaggccgaggcgggtggatcacgaggtcaggagttcgagaccagtctggccaacatagtgaaaccctgtctctactaaaaatacacaaaaaattagcagggtgtggtggtgygtgcctgtaatctcagctactcaggaggctgaggcaggagaatcatgtgaacctgggaggcggaggttgcggtgagccaagatcgtgccactgcactccagcctgggcgacagaacgagactctgtctcaaaaaataaaaataaaaaaataaagtgttcaagaaccaaatacagcaattgccagtcacacagcaataaaatcaggtgtaaatcaaatcagtaagtgcccatcagtgtcctgtgcaggtgggaatagaaagaggattcagacagggttcctatttttacaaagcatgcagcttagttagatagagtagactcagatctgaagcgttagctagtaatcctcaagttaaattatatwagaaaaaacatacaagaggaagaggaaatgccacaaggaaataccaaatgcgtggaaaacaaatcattatggtcaagttgcacacaggaggtcattggaccttaactaataaggatttgatatgatcaggaagatgatcaagaaygaaattctaggaatgggaagctgtttgaggacaagcatgaagaagtaagtgaatacaatttattcaaaataacgtaaaaataccccccccccttttttttttcttggaatgaaatttatttaagcagggaaaatcgtttagagccaaaagtgaagaactctggctgggcagttttgagatatctagtaaccscttctgaacaggacagtgatatggccacagtggtgggactgtttatctatcaattgctgtgtgagtgttggaaacctctgtcagctgggtatggctgctgtagcaagtaaatggtgatcctgtatttatttttatatttatttatttatttatttatttatttatttatttatttattgagatggagtctctccgtgtcgccaggctggagtgcagtggcccgatctcagctcactgcaacctctgcctcccaggttcaagcgattctcctgcctcagcctcccaagtagctggcattacagacacacacaaccacgcccacctaatttttttgcatttttaatagagacggggtttcatcttgttggccaggatggtctcgatctcctgacctcgtgattattggtattttactcgttatagatttttttgaattgatttcatttttttttttttttttttgagacagagtctcgctctgtcgcccaggctggagtgcagtgacgcgatctcggctcactgcaagcttcgcctcccgggttcatgccattctcctgcctcagcctccccagtagctggggctacaggcacctgccaccatgcccggctaatttttgtatttttcgtagagacggggtttcactctgctagccaggatggtctcgatcttcggacatcgagatctgcccgccttggcctcccaaagtgctgggattacaggcgtgagccactgcgccgggcctgatttgaatttttaaaaaatatcgcatcttgtttatctttatatctgttttgttgttgttgttgttgttgttgttgttgttttggtgttygccttccattttgcacctaaagcaagtaagtaccgcatttgtcttatcctaatctyggtcctgaatatatcttcaaattttagtgtctacataacaaagtttatttttcactcataaaactgacaatgcaggcgttcttggtcaggtgactcagctccaagtggtgattcagggacccaggctcctcacacagcacatgcttctaagatcgctcaggggctcagctccattccagcagccagaaccagaaaagaacatggggggcgtgtgtggagggaggtttccaaagaccagactaagaagcaatgcacgtcatctctactgtaatttccttggccagaggtcattcacaccttatgccatactggaagggaggttggcaaatgaggtgtagctgtgttctcaggaagaagagggaataggctgggtgaacagccagtgaacctttctgtcatgartcctgaaaagaaaatttaaactaaagtcattcaaaatttagtccatgcactctaaaaaattaaaacaaaacaaaacaaaacaaaatgattactactactaaacggattcagttatcacataaacttgtatatgctgtgtggtgttgcatatacaacatttagcaaattcacaatgcatgctagtgttttaaggctctgagaataaatgagacaagtttatttaaatttagccttatattcccccaatatctatatgaccatggaaccttctttccatagaatatttatcagtatcctgtcagcactttggagatagtgggtctacaggaaaggaaagtttatcaataagaaatgaatcaaggttcctcagggtacaataactaattcagttatgagaattggcaactctttatggcgaactaaaataaactagtttcgtgacttttcccaataattttcttagacgctaaaaggaacaaagcacgtggctgaagagcttcctgtgtgacagtcggcatggaaccatgttaagtctgtatgggggtttagggggcttggctaggtgatgtccaatagtccagtgctggagcccagtagagtggggagcaaccaccatcagaagaggatgartggacttagtgctttggaagtcatcagtgttcaggaaagtgccctgaggtcagaggattgtcgaacagcggyggaacaaaggaatgcggcaagaggaaatttttacacagaaggaaggaagagagctcagaggctgagcagtgcaatgcaataacaactatgagcctttgtgggtagatgacattgtgtcccgaatttattccttccggtgggttcttggtcttgctgacttcaagaatgaagctgcrgactctcacagtgagtgttacagttcttaaasatggtgtgtccagagtttgttccttcggatgttcagatgcgtctgcagtttcttctttccagtgggttggtggtcttgctgatttcaggagtgaagccgcagaccttcgcagtgagggttacagctcttaaaggcagcgtgtccggagttgtttgttcctcccagtgggttcgtgatcttgctgacttcaggaatgaagctgcagacccttgtggtgagtgttatagctcataaaggtagtgcggacccaaagcgtgagcaacagcaagatttattgtgaaaagcaaaagaacaaagcttccacagtgtggcaagggaccggagcagatcgctgctgcgggcttgggtggccagtttttagttcttatttggctctgctcatgtcctgctgattggttcattttacagagcactgattggtccattttacagagtgctgattggtgtgtttttacagagtgctgattggtgcatttacaaacctttaggtagacacagagtgctgattggtgcattttttacagagtgctgattggtgtgtttataaacctttagctagacacaagaacgctgattggtgcgtttttacagagtgatgattggtgcgtttgaaaacctttagctagacagagtgctgattggtgtgtttacaatcctttagctagacagaaaagttctccaagtccccgctcgacccagaagcccagtcagcttcacctctcaacatgtggagtggagactgccagtgaagtctaagaatatggtagactgggggataggattagagacggtttgttaatctgaacactatctaagatgttaagacacatggtggatataatggactaaacatgttcctgcaaaattcatacattgaagcccttatcttccatggggtggtattggtatagatagcactttcagtagataatcaggcttaagtgagaggatgagagtagagatgctatgacgggattagtgcccttataaaaagaagagaccaggggtttctctgactcctccatgtgagaatgacacagaatatggccatttacaaagcagggagagagccctcactagatgctgaatctgcctacaccttgatcttggacctcccagcctccagaactgggagaaatacatatttgttgtataaaccatcttgtctgtggtattttgttatagctacccaaagtaactgtaacaatttagagaagtaatacagatacaaagtcatcagacaatgaaaatggctactggaaaccatgagagtgtgaaagtgagaatttagacttggttagtatatttaaataatcaggactactgtgctgtgtttaataacaccatacctgacgccaaacgtgtggttttttttttttttttttkctcacaccaaccaattctccaactctccagacaccaagtaggtgttcaacaactcaattcaattctgacactatctacctggagttagcatcctatccctggagttaagggctcagtccctcccacaaggctgccccatatcagatgctaatcccaagtcccaggcctcctgtacttctgactgactggctaaatatcaagggttctcataacccctttcttaggttcaataatttgccagaacaactcacagaactcaaaaaagactgtacttattataaccagtttattgtcaagaatacaactcaagaacagccaaatggaaaagatgcttagggcaaggtgtggaggaagggcatggatcttcccatgtcctctctgggtgcacagcctcccagcacctccgtaagctttctgaaccctggttgtttaggggcttttatggaagttccattacatagacatgatgaactaaatcactggccattgttgattagttccaattccagccctttctcccctccatggaggttgtagggtgaggctaaaagttccaactccctaatggtgcgttggtctttctggcaacccgttcccctgaagctatctaggggccccccaaccatcagtcatcacatttacttgcaaaaggcacttattactcccaaaattccaagggctttaggagctgtgtcaggaactggggacaaagaccaaattttttttaatgatcacaggactttaaaaggaaagacatagtgttagatgctatggggagggatgaagttgaagacttattttcttcccttgaggtgaatgggagtgatrgatgggtctctgtgtaagacatgtggtcatagaatttaatagccaaaagaaatttggtaatcattaaatctaatgtatattctgtgacgggttcctaggcaactgcaaaacatgaaattccatggttaaataagtttgctaaaagttgcataccatatgaagtttyatactgcttagtagcccrtcggaaggtctgaaaagttttagagtaaagattaaacacatttttctcagctctccctacacttgtctccagaatcccttttatcatgacacaagtattttcatttattcaacaaatatttattgaacaactgctgcttggcactgtactacgaaaagttggtgttctagaggacacagtttgagaaatgatgatcttgtccaacttcagcgattttcaggtgagcaaattaagtctatgaataatcacattttagtcaaaggaggtagttaaaragagaggctgaaagagggggtgccatttccatagggaaatcagtaggaaaaatctactgcaagataacggcaattaagaaacgtaatatgggctgggcgcagtggctcacgcctgtaatcccaacactttgggaggccgaggcgggtagatcacgaggtccggagatcaagaccatcttggccaacatggtgaaaccctgtctctactaaaaatacaaaaattacctgggcgtagtggcacacgcacttgtaatttcagcttctcgagaggctgaggcaggagaatctcttgaacctgggaggcagagattgcagtgagccaagatcacgccgctgcactccagcctagcaacagagtgagactcygtcaaaaaaaagaaagaaagaaaaagaaaaaagaaacatgataaggagttgtagaaatggtttcagaggcagattcattttttcctgggagtggcatataaagataaaggactagataagatgaaagtgcttgcatcttagtggtgaggagttggtccaygtggtagacagtcaattttatgaagtcagagagggcggacaggtggaaattagtcagataaatgcayatacgcactctctctctcaaacgacccccagagctggcaagaggctggagatcagattcacctggtacttttttttaaattattttgagaaggagactcgctctgtcacccaggctggagtgcagtgacacaatctcggttcaccgcagcctctgcttcctgggttcaagcgattctcctgcctcagcctcctgagtagctgggactctataggtgcgcaccaccacacccggctaatttttgtattkttagtagagaaagtttcaccatgttagctaggctggtttcgaactcctgacctcaagtgatccaygcgcctcggcccccgaaaatgctgagattaccacctgatgctttttagcattttgctggatgtactgagtgatgcagacatgagcaacggaggtttctcccgggactccgtggaggaggtgatgcagccgcagctccaggatcagcaaacactggtgtcctaagcatagtggggttatttcagatgtcacaaaaccaaaatctctgtggcccagtggagtgtaacaaaagatacacaaacctcttccatgcagagagatacatagctctccggtatagctagggagaaagaaggaaagatttctcagatggtgaaggcaggccaatcgaagagaaaaggccagaaataaaactccaccacgatgagaagcaacctctgtgaggagttactgggggaagagtcccctgtggaatgagcactgatgtctccattcattgtgcaggtccctctcacactgctttcattacttgaacactatctggtgtcattaagatatcaattttatttaggtatatctkcattggcagtttaattatgtctgggtaaggcccgatatttattcatgggtgatcttggtagttgtcagacaccagcctgaagataaaggcgtccatgcctgaggaatgctaatgctccccagcctgtcatttgacaagcgcacatgccagttactaccaaactgattatttcaatcattaacaacacatgcatcagcctccttcacccgagattgccacgtgcattcatcttttcataaacaattatctgacaagggtgctgagaattgatgttctggggggaattgcccaacttgccttagctacggatgcagcaagctgaacgccccgcttagcatcgtcatttcattaatcagattagcacaacgcccaattgagtgagcaccatgttcctaaacaatctccartcagggttcctttctgttgtccatgctggtggctgcactttttttttttttcctggagggttcagctttgcagatcctcttagaaaacttggatctttgcttatcccamcacccatcccatttataataattactcttgttccaaggagcagggtgcggggagaggctctgggtttgtggaggcgccatctgctccttattgctcacctgagtcagagtctcctgacatcacttctctgcagcaatgagagccagatatccacacaaagaggctggggctgtgccagacggcgcagggcctgaaaagtgatgaatgaaagaaatgtgaaacagtaaaactgctcccaggcagcgagcccttccttcaaagggtgactcacagaaaaggcagttttgccttagttaggaaggtcgtcccagacccctacagctgaaggactagcatttgtttctctacactcacagcttgtgcagatcgcatctcacccatcagggaaaagagaacactctgttcagtttcactaaggctttttgttgctcttcttcttatgatgtaaggcaaacttccagggtttgggtttttaatggttttatatgattrccttttcatgagaarcacagttatatttatatttttaaagcaaacccaaagtaagaaaaaatgtatatattttcatcatatgaatggaaagcattatatattttttcttttcttggaatattttcatttgatgacaccaatggcatgatgatgatgataatgttttctatttatttgatgctttactaatatattcttttcaattttcacaaaaactgtactttctttttaaaaagatttttggaaactgagatgaagagactttgggcaacttgcccaagataatgagctacttagtggtaacccttgatgagagggttttaaaatcctacttttaccacttaaaagtcatcatagagtcctggtagtccaacattctttgtgatgcttcggaatccagatcgatggttatttatgagatgggatcttacccacttttgttatgtagctcattctcattcttcttttgaaaagctttaacagttaaaaattccttttttatcattgagacaaattccttattttttaaaacatttccaaccagttctagatttccttctagattcacagagaacaaatctgattctgcatgtattaggttggtgcaaaagtaatcgcggtttttgtcattgaaagtaatagcaaaaactgcaattacttttgcaccaacctaaaagtagtcactgtcttcagatatttaaaaacagccataatgtcttctggaaacttctcttcttcagactgattccaaatgttgaagttgtggcactgtattagtctgcttgggctatgtcagagaaaaaaaaatattttttctctacttccacacatctctcgatataacacttctgacactacattctccagcacacatcatctgggtgtcttattcaattcagttccgacaccatcaacctgtagacagcatcagatatcataggttaagggctcagtctcacaagactgccccccactttaaatgcttgttgcgattagtatacctctgattgattatctggctataaattggggttttccatgaacgcttcattagatttgtttaatttgctagagtggctcacagaactcggggaaacacttatgttgacccacttattacaaaggatattacaaaggatacagaggagcagccagatagaagagatgcatagggcgaggtatgtaggaaggggtttggagctcccagatccctggttgcaccaacctccaggaactgctgtgtgtgcagctctctggaagctgtcagaacccagtcttgggttcttgtagaggtctcatcacataggcatgattgattaaaccactggccattggtgatgaactcaatcttcagctcctctttccaccccagaggtgtgtgtgtggtggtagtgggggagctgaaagtttcaaccctctaattacaacattcccctggcaaccatcccccatcctgaggctatccaggagcccccagccaccagtcatctcattaacattcacaaagaaatttattgctttagattccaagggttttgggaatgatgagccaggaaacaggaagaccaaatatcaaaatatggtagcctgtgatatttcgaaatatcacaggctaccataacaaagtgccacaggctgggggacctaaacaacagtttattgtctcacaattctggaggctggaagtctgagattgaggatgggtagggttgttctctcccgcgacctctctccttggcttgcacatggccaccttctctctgtgtcttcacacaacctttcctctgtgcagacatactcctggtatctcttcctcttcctttaagaacaccaattctgttggatcagggatctactcttccaacctcacttaaccatttttttttttttttttggaaacagagtctcgctctgttgcccaggctggagggcagtggcgcartctctgctcactgcaacctccacctctcccgagttcaagtgattctcatgcctcagcctcccaagtagctgggactgcaggtgcacgccaccatgcccagctatttttgtattttttatagggatgcagttttgccatgctggccagactggtctcagactcctaacctcaagtgatccacctgccttggcctcctaaastgctgggattacaggcatgaaccactgtgcccgacccctcatttaactttaataacctcctttaatgccctttaatcttcaaatacagtcacattgagagttgaggcttcaacwtaccaattttgaggggatataattccgtccattccaggtatcaatgaagtcaaggcatccattccttcaacatgctttactacatgtacagaaaccacagcaagtcaagattgttcacagttgaaagaggtttctgaaggtgtgtgaaccatctgaacttcatcctctttcttcaagtagccttcaagatttgtgcccactgaacgaatgctatggaaactgccaacagatgaccatctggtcacgatgttcaaaggctcaacctaaacaacattgaaaattaccaaaactaaggcaaagggtatgattctactaaagaaaragactccttaaggagcaagagtctctaggaactgactcttcagcagtactgaatgtaaaattggaataaccaccctctcaaatctcagagaaactggacttagggctctttttttattagaatgtgtttgggaaggtggacagggtgattatatcaactggcccttccattcccaatgtgtgtaccaagagcgagtgagacagtgatgaattacccaggatgaggttagaataatttaataaaaagaggtggaaatggggtctttaattcctaaccttttgagctgtggctaaaatccattaatagaacatggattaagagtccaaagtaagattactcagcatcacccgccagtgaatcactctggcacttgggtcagaattaatatctgagaattctttgaaacyttatggctggaatttttctttccccctggcttggcttcttttgtagtcttagcctctttagcagaggagataggaaatctttggcatccattcaaaaactcattcaaaccacagagtagaactttaaaggaggcctytggggatatgtggggtcagttggaatagtttatatcatagctttcrgtttaaaacaattttttacagcatcagtagggagaattatatcacaatacataaatagatttagcaggatttacaaatccacatgtgttcccttaagcagtagttttcaaatatttgatgaccttagaactcctagttcaaatgaaattttacactgaagtgaaaatgaacactgataaaaggggagtttctctgcttaaataaggatgtgaggtcccagagatcccttctgcctttcccttttgctcttttgggtagcccctaaggggaatgaatgccaagatcttccaggaagatagattgaatgctttttctctaggagactcttgttctacagtgaagttcgctcaatgaaccacagaaatgtgtgagcaaaggctgatcattaagtggtaagtcacacctctccttaagttttgaaaaaatattttgaaagtgatatctggtcttccaacgtaaatgcagagatgaaagaaacagacttttctttctccacagcaggagcacttaaaagtctttgactatttaaactactggaaaaaggtacattttatcaattgagcatgcatttttaatccatcaaatcatacaatgttgaagatggaaggaaccctagaaattgatatcaaatgaggcaattacacaaaatgctttggaacctgtgaaacattttgcaagagtaaaatttgatgatgatatttaaccctttccactaactagagctttaatgcacctttaatgtttaaccctgaaccctttggcaagaactcagaaagggaaaaaccaccctgcccagtgtcaagctgctggtcagtgacacagataacactagaacattatagattgttgcttgaagacattgtgatctgtcacaaaagcctaggaatcagaggtcaatcagaaattagaaagaaatcgtttactttctcactcacaaaaatatgttttatttatacctaaggtggatcccaagggactactttctgttggaacacaaaagagaagtctatcagtcttgatctgcaaatctaaaccatgttttagagaggggatttaggcttatttactaactaagcccaaactggggtgcccaggagcaccctctctttgtagctctagtgacacattttgagcaaatgggtggaatctcatcttacatggttggtggtgagcttctaaaatgagtaaagaagttaaagatcatacaaaatcagaatttttttctgaggacccttcagactcttagaagctcaacgacaaatcatgtgttaatactattgtctatggaaatttcactgacatgttccttttcctgtgacattggagctaacgtctctttcgaattgaggaaggcagcataaataaggtgttttgtcttctttgtgcttgattgcttgaatatgaatcatgtgctctgattcctaaacaagttgcctgtttgacttacaaattgactcatggtgctagaactggtctgaagctcaagtcaatttgaaatgagaatctaataacaaacacgcagtgatgtttaaagaaaaagatgttctttgccaatgtctctaacctgtgaagtgaaattatggagagtgaccactaactccctgagctgaccattagtaccctcatccacgctagggttgagaaaaacattgggagctagtacggttgactgtctccatagatatgccaactatttctcccacccatatttgtgcattccatttaccccatccagatacggaatcatggaatctaattatgttcactccacttggatttgagctggccttgggatttgcatcagctactagaatgtggcagcagcaatgttgtgccaactccaggcttagccacttagagccctgacagcttctgytgtggctcaccttggagccctgagccaccaaataaggaattcaacaacsctgctgaggagaggcccagacagctcccagatcttcagccaccacagctgaggacccagatatgtgagtgaagccacctcratatcattctagccccagctgacctctccgtcaactaaagctaaatgagtgactgtagctgatatcacatggagcagatgaatcacttagctgagccctttctaaatttcagaattatgagcaaayaaatgttttgtattgttgcaagcattaagtttaaggatgctttgttaaacagcagtacatgacagttagttggccaagagatttctgatagattttgttttatagactcttccatgatcctcttccttctccagataggctctcctgctttcgtgtcccctgattttaccccaaatcttgattgaaaagaaaagcaaaaccaaaacacctgggacttcctcattggtagatgctgcacagtcttcctttccttccaagcagatgatgtggttgggggatcttgcctgagtctcttaatgttctcacctttcaggagtggtcagaaatgtgggtcagagtattatgctggcattcggttttcatttcccattacagaagaagacatggacaggtggcccacaattactttctaaagaattcaataccccagggagaaggggttagtgataagcatcagaagtgaaaaattagacaattgttgggtaaccggggtaagcggaatgaatttctaagaatttctaagtgctactatgaaaatagcaacagacaaccttgatgacttgcaaaatggtcagatcacttctgtggctaatcgggatggcttggagtcagtcagtaattgagccatttcagtcaattctgaaataaatttgtctgcaaaaaaagtagaataaccatctgtaaacacaaagggtttatcccagtatccaatatcatggtgaatttcattctgcaaaatgcagttgctggatgtttaaccattaagtagtaagacacattatttctgttgtattaaaaaacactatagagatgatgtgtcatttaaaatacacaaatgtagccctgacagaccaaayagatgtttcttaatacaagcatcttttgaaaccctggcacagtaaagcaatcgctaaagaatgtttattgtattagttgaacaagtccgttaaatccaataatgttgtcacctaagaaaacaccaaagctgagtttttaaccttacagaaatattgatggcataaagtggaggctgatgaaataaagatttcttattacttttactaccttggaataaccttctacctgtgaactgtaggaaaatgctttgccagtgccaccacctgccctccagggtagccctaccctcagttgacaagtgttcgtagaaattttataggagttttcagtgaggcatcagttgtctttaatacttgaaagaaaattgaatggaaggatccaattactcatgtgaaaaatgaatcttctacccaaggtttggccactgctggtatgcttgttttaaaactgarttataggcgcaatacatttgccagagacacaggcattaatttctctcaaaccattcaagattgggaggacagaatagaagggagcagagagaaaataagatgataagagcttcacgttgatttattcacctttgtgcaaagtaatggggacaagagggaggcggcccccggagcctggaagagagatggaggagctgagaaaggaaggattgcagggcagcctgccaaatagaaagtcagattgttgttcttagatgatataagattgctttatttctctagytgctttataaaaatacatatgcataaaatatgccacaygatgcagctggagtgaatgaagtccactctatttatccaagaaaagattgtattcctaacctgcctgtctgttagctcattctcttaataaagataaactgatcctctacctagcagagctcaggctatgattccaatgtgtttgatgctaggagtgcatgagtgattggctcacgacstgccctaggcagatggatggatggatggatgctctgaagcacaaagttgacaccatacagaagtctgcgtatgtgagctatcatagttgcagaggaggtactgtccttcgcagaccttacgtcaggtcacttagcataggtgggagaagtattggacaaggagtctgtgcaatcctcctcagctactaactagctccatgcaggactaggctcataattttcagggcccagggcagtaagaaaatgtagggatccttgttaaaaagaaaaatgagaattttaagactgcagtgtcagtgcattaaaccaaaggcagaacccttctaagtatggtgatcttttgagtgcaggactctgtgggactgcatgggttacatgcccagagagcctaacctggctccatgattttgtgacaagaagcttctcatttgggactgtcagtttccatgtgttaagagaagccaactggaagtgatcagcagctttcaccctaggggtgttaaacgtgggcgtggtcagttagcaacattaatggtgaggttggatcttctctgtattatggaatttgaatcttaattccaagaaaactttccccttcctgtttttggaaccatgtgacagtgcagaggggaatacccactctcttgggtacccaggagatggggagcagaaagcttgtgtccattgtcttatagagcaaaagaaaacttatattaacaaagagtatattttctcacgtctataaaagaaaatcaagtccattccataaattagcccttgactttcttctaaaacaacttaatttttttttttgtctccaaacagaaattttaaaaaatagcataagctcatttatcttggaactgacattgcaggcaaagttgtcaggtttatctctttgaaaagagaccttgaaaccaaaatgccttctttcaagcttgggctctgaagttgaacttctgggagatgacaaatgagaatgggatgaagtataacttttcttattttaaccataaaagtatcgctaaacccaagcatattacttgacttataagttctgagaaatagaactctgtccagcagttgcaarattagtaactgtggttctctaggtcattttgggaaggttctggagtcaccagaaccttgctgatatttcagtttctcatcttaatgaaagaatctagtataattctgtgaatttgctagttttccctgttcacaccccagagggtagccaatgggtcagtaaaaccttagaaaccattcatcagcattggaaaagccatttgataccaacttgccattttgcaatgaacaggtgtgtttctgacttatacatatttttacytttttaagaaagattttttttaagagggagaagctgatttggaagaacagacatcccaatatatttggcctattttcatgggtttttaatttcttttttttatacatccatttaacaaatgcagttgatcctcactattcacagatttgtgtctgcaaatttgcctacttgctaaatttatttgtaactccagaatcaagacttgtagcactttcacagtcatttgtgggcatgcccagagctgccaaaaatttgagttgcttgaggtttgcagctgaggttgaatgaaacaacactctcccttcttgttttagctctcatactgtaacctggctttcttgcatgtatttggagacttggtttttgcactttcatgctttttgttgatttcactgtttaaaacggcccctaagtgtagtgccaaattgccatctagtgttcctaagcacaagaaggctgtgatgtgccttgcagggaaaatacatatgttaacaaactcccttcaggcacaaggtatagcactattggccatgagtttagtgttaatgcatcaactatatattaaataatgtgtctttaaacagaaacacataaaacaagattatgatttgagcatttgacaaaatgtgaccagaaactcataggaacctagccctatgtttcctctaggagcattggttcagtattcactaattaatgtttcattttatttatttatttatttatttatttttgagatggagttttgctcttgttgcccaagctgttgtgcaatggcacaatctcggctcaccacaacctctgcctcccaggttcaagtgattctcctgcctcagcctccctagtagctgggattacaggcatgcgccaccacacctggctaatttttgtatttttagtagagacgtggtttctccatgttagtcaggctggtcacgaactcccaacctcaggtgatctgcctgccttggcctcacaaaatgctgggattacaggtgtgagmcactgcaccctgccattatttatttttttgagacagggtgtcactctgttgcccaggctggatggcagtggcagcatcayggctcactgcagccttgatctccctgggctgcagcaatcctaccacctcattctcccaggatgctggaactacaggtgcatgccaccatgcccggctaacttttttttttttttttttttttttttttttggattttgtagagatgaagtttcaccatgttacccaggctggtctcaaactcctgggctcaagcaatccacctccctccacctcccaaagtgctgggattactggtgtaagccaccacacctggactgcagcaactttatagaacataattacttagaataacaagaactgactgtatgtgttgagagtctgctctgttcaaatgccctgaaggaggcaaagtacaataaaaggtatcctatcttcaaggagtgtgtttaatggcaatcttttccgtttttgagtacttgttccaagcatcttaaatatgtatctgctttaattttctcagtaacactgtaagttagacattaacsccatttatagaaacaaagacttgagttatctcagctactactaagtagagcaagcaggatttggactgtccacatcatgcattcatcctaycacattctyctacctacctagtcaaggggaagaaaacttgcaggttatggtttcataacaagactctaatgcctgtgattgcttcgggatctatggaattgagacaaacgaaagtacccaaattgatatttctggctagttttcttaaaaatactaaattcatcctaatttctttctctctctttctctgagacatctgtgaaaatgctctcagagaagctcttcagggatttacagtccttcctatgttaagttctttctcttctgatttgttacattaaataaggcaggaattttaaacaagcaagaaaagaactttatactctagactatgatctttgacgacaataaatgtcactgaagattttgtttggttctgtttctttttgggttattgctctcctatttgatcaaattatagaccctatctaaagctttaggaagttgtttccatgaaagtaacatctttctatcgtgatgcaatcagatttctcctgctttttgttattttgatttaaattctttgcaatgaatggaaccaatctcaaatgacagatacagagttgccttaaaaattagtaacttcagtttataagtattctttgtatattttcattattatttttcttacctcccctttaaaggtctgggaactcattgaaaacagagtctctgttccagacctttctccttccaaacaagacttaggacgatgacatttcctttttctgtttcttcaaggttgctgtgaggataaagtgagataacctacaaagtcaccttaagcagtgtgtggattgtagcagatatgtattaaatattcgtttctttcctatttcccttattaagcagtttaattactattcagcagtgcatgccatttacaaggttggtaagcaaatgtgaaagcctaacttgactatatatattaaccttatacatgtagatattttacactttacacagttcccccctcctccacaatcttgacatattctattcaatttaattcttacagcaacactataaaaaggatggagcaggtgctgttgtccttttttgataagatgatggaactgaggtctagagtggatgagattattcagggtgagatccagatgtcactgaaaacagcctattatatttcctccatttttatcataagtcaaagcatgtgtgtgtgtgtgtgtgtgtatataaacatatacacacacacacacacgtatatgtatttgtgtgtgtgtaaccataaccatattgtttactagttgcaaatatgtcttggaaatactcaacaaagatgataaaaaacaccagaacctgaatcctgcatgctgctctctgatgcttctatctcctgctgcccagatgtccccagtttcagacttttgtctgataggactatggaaaatgattgtctttgcccatcttcagtattccatcagcagatatttaagagcgactctctcgtaaactcctaatacccatcttgcttgtgttgatctccactttattcccctttcattctggcccccctcgggccctggactctcctggaaaactcatttcctcacgatattgcctccatctccttgttgctaggtgttcagctagctcctgaagcgctaggctttgtttctcagtttctaaaacccaggcttctttgaaatttgcttctgacccccracagccttaggaccctgtttcctaatttgaactcagcattctcctggtcagcccctggtcttcctggcaccattgctaactagaaccactctacctatgccccgctgtgttacctgatgacaatcagatcttttgcaaatgcaatggtaaaggaacacaagtgcagccagtgcttgggagggcataagagatgtgtagaagatcctgtgttcagcagcccgtcttcatctgaaacagaactgccagagaagtcactggtgaactaagtccgtggcttctccccttaaagtacgctgtttcaagtcatctggctgattgtgcttgcaaagagccttgattttgagctctaactaccagcygctaattcaagcctggcctctgatcattcatcttttaagtgttcagcttctgaatcccatttgattccctgtcccctctctctttcctaccacctccycttgatgtggccagaatagttaactcasacaattagtaaatgctgaatcattgagtcagtgaataaggcaagtgtctgtgtgaggtatacaacttcctgagtgggtttaatggaagcctaaagagatttttcacagattcatgggttttcaaaggagaaatttgcatattaataagaagctgttcagactgattcgcttaatgtgtttggagtaagtataattaaatgtcaagggagatatatcatgaagtaatgaagctgaagccaatttatcaaaaataagrtctggagagagacatttcaaataataaacagttctctaaccttcctttttaaggtgatttgcttagtctgggccaagatttacatgttttttgagacttggttcaaacaaagatgctgggaactgggtgggggtggggaaggagaatgaacattttttcccattcaagtttataacattcaaggaggtctttcctgtctgaaacacttttaaaggggacaaaacctatttygtttttctcactcagatatcgggatgtgggtaggatcagcaccccacccaaactccaccattatagctgccatttgaaaactcctgttctgatgaaagggaaggtgatatgcaacgggagctagttcatcaggaattgcaactgtgagaaaaatggatgaaaatacaaccccgagttcttgattttgaagagtgagctatttactaatggacatgttttaagagttggtcattctttgagcaaastcaacccatgctttgctttgaattcacttaggaaagatatcgtgataaaattgcacagccatctttttgtgcttattccctaaatgcttgattaaattaagaagtttaagctcatgcaatacatggattctcttgagttcagatgacactgaatcgacctcaggaatagttgcytgacccaatcaaatggaaacactcaatagcatctgattctgtttatcaggatgtgaaagtcactgggttcatttctagccagagaagagggatcaggatcctcactggcccacctcaaagaggtctcaggggaagagaggaagggcttgagtcaatactgtaaaactactgggtggaagaaagaaaatgcctgcctcgtattcatttgtcacaytgaaaaaatgaaaagccacatacagaaaactgagmgattgagttgcttatacttgtattgactgtgacttgtgctgactgtggccatggggaggataaagcagagaaaggccatgattcaggactatcrgcttttggggtggtggcaggctcccccaagtctttacaaagggaggtaactttgagaagcatcaatctattttgtttcataaccaaacagattgttagattgtctatatatgatttttaaaagttagtgtgacccactgcctttgtaacaggaccgcctttgaaatctgcctgtcttgggttcaagtctctccacacctccttatcatctggctaacttggtacaagttactgaagctctctacacttcagtcatttggagagtgggaataataatgccaccttgcttggcgtttgtcaggattagagatgatgtatgtgaactaccttgttgatattrttgttgtgattgtcatttgacccataacttcttgtcaccatcttttctgratatcctttgtagacatcatttatacctcaaatgattagtgataatgatccttgcaatttcctcttaacttattcaaagctaaaaataagaactatattttaggtgggactgcatatgtctgagcaggagtgtcctttgggaactttgtattgcatctattcaaaggaatgaaaagggggcatttcttyttctgagatcaagcccctggtctttctccttttcctaatggtaggtatatgcccacmccaacccgtgtgtakgtgtgtgtgtgtgtgtgtgtgtgtgtgtgtagttacataaattgattgattgctgttgtggtttcaaatatttgtagcactagaactcattttttttccttaaatatctgttacaaattcttaatatataatacaattcatgatgactgaattggggtgggggggagctctagaacccacctgcttagccatcctctcatttcatggagtaaccctaaaacatttacaaggagactttggggttgtgttcagcaagttttgataggaaatgcttttgaattcctcaaagtcaacccacaaaatgttttccctgtagtgttatttccatatctttcttgagagccgtgaaggtaggaggattttgtgatcaaatatgaataggaaatgaattcaacaaacataaatggattttttacagtagacttttaaagtctgtggacttctaagattcactgtgaaaagtcaaatgggatttgtcacatacagtgtttcccatattacaatgacagtggaaagcattttaatgaaaaacccacaggactctgtgtttcttggaatgcagtttggtaatttttttttaataaaagcaaattatgatttataaaataacttccttaggatggatggtcttccttgttagaatttgataatgggcttaaggaagttattttagaaccacataaacatgtctttttcttctcttgaataagtagtcagcaataggaatattaactgccattttctttcctcaaaacatgggcctagagatgaattttacatgatagattggtgttaygatatgattgatttaactgtaccatgggacaagtaattcattctctccttaacaaatagcaggtgctattttttcaaggaaaccacctacatagaagtaaaatatctgttttagggctgtcaaaaatactatgctatggaattctacatattttattgctttgtacagctcattcttctcccaggactaccatttccctttatcagagtctacaaaccaataggagtatatacatagagtgtttgtgacagctgtttatgttggatcccgtatttcccagctttatctccccgcttcatcccccaccccsaccactgcacacgtccacmtggttccatgcattacccatgctcccacatcctgctctttataacatgcctttgtgcatgtgtccatcccgctgcttgaaatgcctattttcttctttcctactcattcaactcctgttcatcttcagagtcaaytcaaatgcagtttccttcatgacttcaccttcctcagttcccccagtggttggatccatcacaccctcttctgcattgcatgccactttgtttgcaactcatcctctgtcaccatgggggttctccaggaagcagatcctaagagggagttagaagtacaaaaggtgtcttagagagggaactctgtacaagtaaagggagggaagttggattgggtagaccctcatgcagacctgacagtctctgccagaccaatggggaactctggagcaaagatcgctcagcacaggagtcactgggctaagccttggtgtcaccaccttgttccactattgaccaagctctgctctgagcaatccatgagctcgagagtgagatggagcctaaaggctctaacagctgaaacctgtcggctgcccacacgtcacacagctggatggcaggcaagtcctttcctgaagggtgatctgagtagcacatctctgtgcctgtcacatttcccatcctttttgttgcctgccagagtttttattccttgacccacatgtccagaaggttagaggtagatgggactttggagcccatgcagtgcagccttcacattacattaggaatggagacgttcgttacttatactgcattataacttccctgactgtatgatccattctgaattggatcccaaatcagaatccagtagatcccctccttctttccgatgacacggatcagtatacatgtatctggccaccccaggaggcactgcttattcctgggggccaagaagaatgaatgttgatagctgtaaaaaaaaataagaacattattagtgatatcgtgatatctgcagtaggtcattgtactttaattatacatttcccaaaaaagcaaacagcaaccaagaatattgacactttaaatattagccttttgtgacttgaagtccccacgcaattacagataatggaggggagctaaactccacaaagccagatccgctgcagccatagttggaagcctacgaacaaatgtttgtttgtaaaaggaggaaaatcaatgagcagaatgggaatacattggagcagagtttgtttccctttctgttgatcaatcagtcttcctagaagctgctgggctgtggggttatcttagacgcatttccaaagacctgggctcttggcactttgtggtgagcaatctttgtgctgtggggagcaggggggcttcactctcccaccagggtccactccgctcctggggtgatggataatgccttaattaccaaacccagagcaggtgatgtctgtcttcttggtcctgagggctcttgattacttaactccctccccaaaaggaaacactttccacatcaataattaaacagagcaattaggggaattttaaaagtataattggacagaatcaactctgtgtcccttgggtattctatctctttttctttttaatgctccatgccctccctctcctttttctaaaggatcattttgtggatatagcagataggaacatagttcagtgtctttagtgcaggcaagagagaaaaaaaatcagtttaaaggaatgaaagaggggtggaaggtaagtgcagacccaggctgtctgggttcagtcctgggacctgctgtttcccacgtatagcagcctcagctcttggggcttgaggaaggcaaagcaggtaggttgtttggggctggaacaatccattgtgcaggaagtctctggaaatgggattctcagttcccagaatagtgcccagccagcagcaaagtatgtggcagcccccatagaaaaccaccactgtgggccgggtgyggtggctcacgcctataatcccagcactttgagaggccaaggcgggtagatcacctgaggtcgggagttcgagaccaggctgaccaacrtggagaaactcgtctctactaaaaatacaaaaaaaaatattagctgggcgtggtggcacatgcctgtaatcccagctactcgggaggctgaggcaggagaatcgcttgaacctgggaggcggaggttgctgtaagccgagatcatgccattgcactccagcctgggcaacaagagcgaaactctgtcttaaaaaaataaaaaataaaataaaataaaaagaaaatgaccactgtgagtggctttaactttactctgatctgcctagtatcctcaggtgaggagaatatatattttttaaccttgaggaaatgaaaattaatcacagaccaacccaataatatatatatatatatatatatatatatatatatatatatataaattaaagttgtatccaagttcaatatggcaataaaaatttttgctttaagtgtttccttccccccaattcccagtgacatggccaaagaaatagtagcaagaaggaaaaagcactgtcagtaayggaaaaagaacaatcaccgtctacctactaaagagctcataaattctctaagatacaatgcagggaagtctggattgaggcgacagcaactgggaagttgggacaggagcctctgaaggaaagcttgttctcagaaggaagcagaagggaccatctgcaaaccccagagctcagatactgggccccagggagggcgcactgcagggcagtgacacagggcagattctaagactgccctgtggagacgccaagggccaggactgaacaagcaggattcaggcctgcagatggcaaggttggtgcctggaggactgatatcccagtctcctaggatatcatgtcaagtacagctgggggcttagtgcagccagcctcaggtctcagccttggcataccagttcctgtgctgtctccctgcctcctcctcttgggatatttatttgacttttaatttgataaagtaaatcacagaaaaaaaaaagggtaacatttctcttctcccttcctctggccctgaacagatttcaacaggcactcagaaaaacagaagctgtttcagtcccaaatatggacaaatatagattcacctctggtgccctgtaaggtcagcaggaaggaacatgatcaaacataaaactcagtcgtttagaagaacagagtcaattggagggatcagaatgaatgtcctgccttcctgaccctctatgatatagagtttcagtatgaaatgggagaaaacaggagaaaatctctaatttgttttctccagatttcagtctgtaatttgaaaaggttaactgagtatcatgcaaaagtaatgaaagtggcctaaatgtatcctgattccaaggagaaaagtttaatcaagggaaaacaacaacatcagcacacaaaaaccctgcaattatctagrtgacaaaaacaggttgcctcagaggaaaaaaaaaataatgctggcattagatgtcttccttgaaatattacatttcagaaagcattagcctaatattacagttttaaggaaaaaaaaattaggacaataatttttaactgtccaaattacctgatatggttaaggtataaagaaagttaagacatcacaataaaaatgaatgaactaaaattacatcataataggaggaataagaatctgtgatcattatttcttatttgtaacagacatactaaaacaatatgaaataagtttaaaaatgtaggatggtcaaagctgacttaccagacttgcgagtatgcagacacactcatacatacatactccaagacagaaaagaaagaaaataaaagaaagcaagctggggtaacaaaattagcatcaggcaaagtaaaattcaaggtaaaacatgttaaataaaacaaaaatatctatttttaataatcaagggtataatttatagcttaatatttatgaacctttatgtagtagatggcataaccactaacatcaaaatatatgacatgaaagctgttagaaatgcaagcagtgacttttaaaatttacttttacttttatttggaaacaattatagatttgtaggaatgtgaataaattttgcagaaagttcctatgtacccttcacccagcctctcccaatgttatcaccttctataactattgtaccatattaaagccaggaaattgatattgatacaatccatagaacacgtagaaattttttaaaaataccacagtactggtggaatattctaatacattcatttgaacttttgccagagcaattggaaaaacaagaataaatatagaaatatcaaaaatatgcttaagccgggctcaatggcgcacacctgtaatcccaacactttgggaggctgaggcaggcagctcaccagagtcctccccctgggcaacgtggtgataccccatatctacaaaaaaaacaaaaattagccgggtgtggtagtgtgtgcctgtagtctcagctactcaggaggctgactcaggaggatcgcttgagccctggagcttgaggctgcagtgagccgagatcatgtcactgcactctggcctgggtgacagagtgagaccctgtctcaaatatataggcttaattttgatgtgataaatagctatcagaaggctacttatcyacacagaaaatagtcgtttcaaaagtctgtgatgtatttgtaaaatgtgtatatacttggccacaaactcatactctgtgagtgacaagtaataacaaaggaaaaataaaattaataaaatcaatataaggttaaaaactattttttaaaacctgtaaagaggaaatcaaacatgcagctaaagaccatgtatgtaagagccaaatgataacactatatacctatcatgtttgtacagtcagtgatgtaaatagaatgaattcacatttttatgtattttaatattaaggtaggaagaatgaaaatgggtaaataagcattcatgcccccaaacttgaaaaagaacaaaaagtaataaaacaatgagactagatacggccaaaaataacaaagaaattataaaacatacattacataactctacaataatgaattttagatatatctgaaataaattctctatcaaaagacacaagttgctaaaactctctgtgggaaacaaagcaggcaaaaacaaccaattgaaaacaggcaaaaacttaccgagagaaaactattggagatttttccgtgtaaaactaactcttatctattttctgtagcacccagaaaacctctcttagtgtggagggcacaaattctatggaaagttctttccaggggcaatagcaatccaccattatcagatctgccatttctcaacatctttgcaacatttgatattcaacaccatagatcacaggtacatttaaaaatgatttcctgcatccttttcgtttcctcttccatatgacactgccctctgtcttcgtaattttcccccaaatgtgggctctcaaatatccaggctttgtcttacccattactacgttatttgtttccgttaactgatccagtttcctgctcaagaaattaactagactggccatattctttgtcgtttccttgttatttcacccactttccacacaactatatggccagttcttcaaatgcagattgggttgtttttttcttttctagaaaggaaatatttaagaaaaaaatagagaaagcttcactttgtctttagcttgatcctagagtctcagatgctggactcttgagacctagttcatcctctgtcttctgtgaacttcctagcttgtataacttctcacttctgcctttggtttccatcttgacccttttctattttttttctaagtattcggcatttctcactcaccctagctgtctgttttagctttaccactctggataaagctccacttctgtgttctatggttaccacaaacttatggccaaaactgaaaaggttatcttttgtacttgctttktgtgtgtgtgtgtgtgtgtgtgtgtgyctctctgtgtgtgtgtggtgtgtgtgtgtgtgtgattatgaagcttgacttgacttgaaacagctttggtatcattaaatattattttgccatttttttattgtttcagtttttatgtgttcatgcatatgcccccaactgacagcaaatgccattttcttgtctaatttgacttgatattaaccatctgacctgtgtcatctgtctgtaaagtgagatttaaatacacattgcttaataattgtctcctgaaatatataataagcccagagatggcaagattgggcagctttgcacatattttgctatttccttcagcatatagactccctaatctcctgaatgacccatgatattttgttttgatacttttatattatctaaggtagacagaaatcactaaacttgtgttaataaggtagaaaacaaagtgcccattagttgttgaaagaaaaccatattaaattaaaacaaccaaacaaaagcatacaatacaatattgaagagaaatagagatttctaagtgggagactataacccatctcttagtaatagcacagataaataataggctttctgagggtcaagatactctctcggtattgttaactttttttttttttaccataatccatgttatttatctgcatatacatacatacaaacagatgaatatgaaatacatgttcacgaaacaattacttctcttatgctatgctgtctgatattttttatctgatcctattttrctgtattccactttttaaattaaatgttggtggcaattttctaaagcagtggttttcatcagaggacagttttgcccccaggagacatttggccacgtctggagacactagcagttgttatcacaccctagagggggagtggagggaagggaggttgctactggcatctatctattcagtccagagatgctgcctaaattttacaatgcatagaacagcccccaaacaaagaattatccwtcctggaacgtcagtcgtgttggggttgagaaactcctatctaaagagttgtatccacagatgtaaacacacttccctcratcctagggttaccaagaagagaggaacattgcctgtaacaatatgataaagttcttctaagaggaataattagagcaatttttgtctatatgaagaccccacaaagtaggcccatctttcctattatagtgcttgatgtactctttcttcaagtttatatcaacttgtgagaccttgaaggccatgcagggcacgttgaggttaaacgttaacgaatgcctctctaagtgtccatgaaagcggattcatcactcggggagattagctgtgttgggttagaactaatgagctttgagtgccagtagttgctatgtgagcttagtggggcattgaaactcaacagcactcaacttctttctgacctgcctggccctctattacttcaaaacccggtagtgagaaaactgctgaaacagcagtttattccccatcaggctaattacttcttttcccaagatcaagactacattttggaagggctgacacatctgaaagcagagaacatcctgcctactggggcagggaagctcaagcagtttttgtgcccctcaaaagaaagaagcaattagcaaaggatctgaaagcagaacacaaaacacggggacttctgatggagtctgtagaccaacccggccaagaggcaaatggtgactcaaactcagaagcaagagtttgggagttctgccaccacagacagctgctgccatgtagaaaaaagggtgtcagtgggactggggaagcccaacagaatgcttgtaaaccatagagaatttggaaagaagcccatgaagttgcttttggttggaaggtttgaggttgtcagagcaaactctcaccaaattcaacaaacaaggatattgttccagttttccaatgaataagcacttaaaaatctaaatgatcccaccaytttgggaggtcgaggtgggcagatcacttgaggtcaggagttagaaaccagcctgaccaacatggtgaaattccatctctactaaaaatacaaaaattagccaggcctggtgggtgcctgtaatcccagctatttgggaagctgaggcaggagaatcgcttgaacccaggaggtggaggttgcagtgagtcgagwttgtgccattgcactccagcctgggtgacagagcaagactctatttcccmaaaaaaaaaaagaaagaaagaaagaaatgaaaatatttgcatattcttcagcattgttggctcactgttgactggttctacagacatagactggttgggawatatttcagacgttgctctggcctgcagaatagggtcctagatttttgttcctattcggttgatgtaacatttggcaagttaccctgtcttctgaccaggatcttataatatccgaatgtgcagtaggactgatacaattttcaaaggtttgtttcccttcaaacatactgtagctttaagaggaytggatkatagtgaaactgtcctaaattatatcagattttgtttcgcatcactgcttaagcagacatgagaaaataatagcatactggggaagagaaaattaatgagtcaaagcaatagcataagagacatgaagagtgtcaatagcaataacatatccattctttattgaacctttaccagcctttttattaattagaggatagatgtagggaggtggtggcaagcaactgaatttaatttctataacatgaattttctattcattatttcttttcaatggatgaggaaactaagatacagaaattaagaaaattagggtcagatagttattaggagatggaatcaggyacttttaaccctcaaacttgacatagtttcatgctattttcccatcctgctacctctaataagttctatgcttcacacgggagaagactctctgatattttggatgcctacagtaattttaaatgcttgccatttgttaaaactattggttgaagcttaatgtggggtgagcaatcaaaccaaatcaataggttggagttacttttttttttctagacttggtaaagattaaaacaataattaaattttctcccagagagttggcatgaatgaataaaataaccatacatcagaatccacttacttataaaataactcagctcttttaataatctgaaaggccaaattaggtcaatctcaagaagattaatagatcatgtagcagttggctcttagtgtgggttaaaattaacaaattatcatcaccatcatcatcatcatcatcatcattgctattctaagcactttcagcttataatacatttatacagaactttgggtacttttaacagtttcttatatggctgttcctcttcaaaatagacataatcattatctcaatgatctcacccccagcatcagccgtttgcagctttataaataaagaaaaatgggctaaaatagaggttaagtgtctcattcactgatgttcaacctatcagcgtgatagataagaacaaaagccaattattctcaaactttttagaacgttagttctgtaaccattcagacttaatcttaaggccctaggcagctaccaggatcaagacctattttcttatctatttttggtgttttaagaacacattaagcagagaaaatggatcaaagcaaaaacagcaattcaatttcttagagggtacatcaatactttcagtgtatggaagtacaatgttaaccacccattccatttcctagaggtaaccactgttaataatttgttatgtatctgtccagatttttggtaagcacatattatatacaaatatagcctatcagttatctagggctaaaataatgcttcataacattaccacaaaacctcagagacatacaataacagttatttattttataagtctgcaggttttagctgatccaggctaacttgggatctcagctggccttgcttatgtgtctgtggtcagctgtgggtcgaccagatggctctgctgatcttggctgagcctgtgcagaaggaattagctggctgaaggctgacctagggagggctttcctgggataactgaagtaccttgactttgttccatctgtctttcatccttcagaaggctagtccagagatgtcctcacagtgatggagaattttcaagtctcttcttgtagcacaagtgctaatgttccattggccaaagcaagtcacatggataaactaagtatcaagaaatgggaaaacagattccactcctgatgaaaaaactagaaagtccatggcaaatggcagggataaagagaggaatgaagaattggacccgtcaacacactcaacctaatactaaaacacattctaactcaaaacatttttttattgcctgtttttacaaacatgagatagtatcttattgttttatgacttgttttgtaacctaatactattttggggctctttctaagccattggaaacagatgtaactcaatctttttaacattgggaaatgttacattgtatgaataaattagagatttttcagcagtcctctaatgatggattaagctaataatgattaagttatttcctgttttgagaagcttgttaacagtgctacaatagacaccatcttacataaatatttgtgtatttccactgtaatttctgtaaattaaatttgtacaagtcagactgtaggatccttcctacctcaccctccagtaagactgagccacttatagttctctgaatatgcctccatttttacaagcactagtctcttatgcctccattttttcaagcacttttcttctagaatccttcctctcccagttgactctgataaactataataaaactctattagaaaataaatttackgccaggcacagtgactcatgcctgtaatcccaacactttgggaggccgaggccaatggatcacctgaggtcaggagtttgagatcagcctagccaacatggcaaaaccctgtctctactgaaaattagccagagatggtggcaggcgcctgtaatcccagctacttgggaggctaaggcaggagaatcgcttgaacctgggaggcggaggttgtagtgagccaagattgcaccactgcattccagcctcggcgacagagtgagactccctctcaaaaaataataataataataaaataaatttacatataattgattattagttcccattctctatatctgactcactctgcaatatctcaagtttacagaatatgcaaattattgggaggtcacttatggctctagttttatcatcattcttttcttcactcaagcacttctgtatttgtgaagctttttctaaattcctcaggcagattcagtactccttctgtgaacataaacattcccttatagtaattttcccattgaaatacatttgttattatgtctacctgccctctagatggtaagctttttgtctcagggacattacctttttattcatgtagccaataggatgcttggccaaggtagacgttcaataaatgtttactaaataaaaattttgcactttaggtcaaacctaatgttagccatttattaataacgttcattcactaaatatttattaaatttgttcagtgatttagatatgtttgaaatgagagtatggctagaatatgaatgtgcctaattgaaaagggatgatctttttagagtatctgatgacatttcaaattttcccctcagaaaaacgcatgtatgctcatttccacacttttacatacacttattgtaagttcactgtttcctgatactcattcttggaactcaagttaggaacctctgccttggcggggcacagtggctcacgcctgtaatcccagcactttaggaggccgaggcgggcgggtcacgaggtcaggagatcaagacyatcctggctaacacggtgaaaccctgtctctactaaaaatataaaaaattagccgggcrtagtggcaggcgcctgtaatcccagctacttgggaagctgaggcactagaccataattctgtgtaaatacattgatctgtttgatttaatgggagaaagaaaacgtttccaaaaaatcactcgattgaaagtataacttctgcatcttaaaaaagaacagcttaaggtatatttagatcaaatgaaacatcaagatctcattcacaataacagtaaaaattaaagtatgttgaaataatctcaacaagaagcgtgtacaacttgcctgttaaaagctttattaaggcttcatgacttgggtctaggcaaagagttcatacacaggtgctaaaagcataatccataaaataaattgataaattggacttcatcaaaattaaaaaacttttgctcagccaaagacactgttaaaataaatgcgaagtcaaactacaaactaggaaaacacttggaaaaacctcctatccaacaaaggacttttattttgaatatataaagaacttttatttatttatttatttttttatttttttgagacagagtcttgcgctgtcacccaggctggagtccaatgatgcaatctctgctcaccgcaacctctgcctcctgggttcaagcgattctcctgcctcagccttccgagtagctgggattacaggcacgtgccaccatgcctggctcattgtttgtatttttagtagcaasgggctttctccatgttggccaggctggtctcaaactcctgacctcgtgattcgcccgcttcggccttccaaactgctgggattacaggtgtgagccaacacgccaggcccgtgaatatataaagaacttttaaaactcagcagtaagaaaataaacagccccatgtaaaaatgggcaaaaaactgtaataaacatttcaataaggaggcaattaaacacataaaaagacgttcaacatcattcatcaataggaaaaggtaaattaaaaccaccatgtgataccaccacacaactattagaatggctaaaattatttttaaaaactgataacattaagtgctgacaaggatgtggagcaaaagaaaccctcatacattgcttttgggaaatgagaaatgggagacactttttaaaacagtttggcagttacttataaagttacacatatacttgttaaatgacccagcaattttgctccttactatttagcctatggtaaaacttgtattcacatacaacctctgcaaaatgttaataacagttctagtcataaacattgaaaactgttactgaccacgatgtcctccagcagttaaatggataaacaaatcgtggtgcatgtaggcaatagaatactattcagcaaaaaaaaaaaaaaaaaaaaaaactgaaacaaactggttggacacagtggctcatgcctgtaatcccagcactttgggaggcgaaggcaggcagatcacctgaggtcacgagttcaagaacagcctggccaacatggtgaaaacccatctctactaaaaatacaaaaattagccaggtatgatggcacatgcctgttatgccagctactcgggaagctgaggcgggagaatcgcctgaacccaagaggtggaagttgcagtgagccaagatagtgccctgcactccagcctgggcaaaagagggaaactcgtctcagaaaatatatgttattgcaattttatatgtctcagatctaatgtgaaatttcctattctagaacattttttattgaatgtattttcttccaaatacattgaagaattatacaatattttaattaaatcccctttccctcttcatttccatttgaattggcatttcataaaatgtaagtactagtttaggaagagatgactttttagtacatatagttcattaatctaggaaaattatatggcttttattgatataaattttcttttatgttcctcagtaaaattcttattttgttttatatttaaattaacatttagcaaaactgacatttctggaagacaactctatgaaatccagtatgtgtactgatttgcataaccaacaccaccatctgaatataaaacagtttcatcactttaatctcatgctatcactttgtagtcttaccctctcctcgtctctggcaacgtttcctcaaaaggaaacgccatacctataaacacctgacctcccatgatccaccctccttgtcctctcaaagtgctgggattacaggcatgggccatcacacccagccaaattgcaataattaaaagagtgctctactaatgccaggacaagcatagaacagtatcaaaactccaaacacaaaatgaaggatacatagcaacttagtatatgatgtaggtggcgtgtcagtactggataaaaggacaggtacttgttcataattttaaaatatatatatttcaaatttgactttaaccatgatttaaactgaatttaaaaataaataaaatacaagtcaaagatggatatttatttatttaatgttaagattagaaaggcctttcttaggaaacatcataaaggaaaagcaaaagtcataaagaaaaacattgatggatttaaaactattttttaaaaaccactataaataaaaaaagaaacaagaaaggataaactggatgtttgctacctaaaagacaagggataaatatcattaatgtaaagaaaatrtttgaaatctaagaaaaaaaatcccattagaaaaaaatagacaaaacatacataaccaaaaaatgtctttgaaaatcataatcttgataaacatctgggaaatggtctaattgaaaacataagtattaaaatattaaaaaatcatttccctatgcttactagaagcaatttaaatataatacaaagtgttaaggagtgtatgagaaaatatatactttaatatactgaaatggaaccaaaatattttaaataatatattaagattcaaagacaaaatataaataccttcatagaagttttacagtatggctccaaagcttttaaaatactcatgccttcatttctacttcgaggaaacaattaaacatgtgaatgaaaatgtttgactttagaaacaacccacgtatccaataataagggattcactaaacactttatggcatttcataaaataggatactgcgcagcaatttaaaacgaagtagatgtgtaattaatgacaagaatggtgtttctatttattccagagtgcaaaaggcagtttagaatagtgtgtgcacaatataattgaattttataaataagttattaacataaagctctgcatagaatgagatctgcatggatgtatttttaaatgctatatcggagcggtggttgagtaattttactttctagaattttgtgcttctctgggaattttctaagttttctgtaatgaaccttttttgcatgtagaattttttgaatgttgttgaagtttaatttttttaaaagcccatttggaaagctgctattttccaaatgggctgctccccccagagcctagcatgtttcgttttcctgtgctgaaagaagagggatttctgttccgtcacacagatgtgaggcgtctgcagcatttctgctgcggtggagccacctagtccgcgtgaagtgcctcatctggaaagtttagctcctgacagccccaggcttttttggaatggacagcctgtctgccggccttgttttccttcaccatgacttagctctaagtcctggtgtgttttcttctggcccaccctttacatttcaggtccctgaatgaaggcccrcataccmtatgtctgaacatttaaaaagttatgaatcaagctaataaactgttacatgaaatacatcctattctcctattttgacaaatattccctcctaacaacaaaacagaaaaaatatataaatctattatttttctatgtctgaaagttggcaaatgaccaaaaatgactcaatttaattattattgctcatttgggcattctgttgatgggccagcaatgttgggatgagtaataaaacaaagacatacgcagatcatgaactactacatacttacgcagtacaatttatttttttatcccttaatttcaacaaaatactaattatgctacaatcaagattttgaatactaattttattctactgacagcaatggtctaaagcaggaggtgaaaaatgttttatgaaaaggtccagataatgaatattttgcaggccacgtgatctctgtcacaagtacccagtccagtgtttgtggttcaaaagctgccgagaggatacatttgcaaatggacatggctatgtttcaataaaactttattgacaaaaatagctgaccaccackgctatccaatcccagagcactttcatctcrtcaaaaggaaacgtcatgcctgttaagcactcactcctattccccacacccctcagcccttggcaacaactaatctgctttctgtcactatagatttgcttattctgaatgtgtcatataaatgggatcatgcagtttttttttttttttttttttgagacggagtctcgctctgtcgcccaggccggactgcggactgcagtggcgcaatctcggctcactgcaagctccgcttcccgggttcacgccattctcctgcctcagcctccccagtagctgggactacaggcgcccgccaccgcgcccggctaattttttgtatttttagtagagacggggtttcaccttgttagccaggatggtctcgatctcctgacctcagggatcatgcagtttaaaaaactagctggtgttggcctgtgggccatagcttgatgacctctgatctaaaggatttttgaagtgcaagtgtacaaatttgaatatattttgatccaaaatatgaattaaagtaaatgtaaaatttaagaaatgaaaattatttccacgtgtatttaaaagttgtctttatttctaaaatattccaagttatctatcaaaattcaaagacaaaatatagattctaattaataaatataaaatgttgaaataaaaattattttaaattgacttcctaatttttaaattgtaattaaatctcaaacatatttataaagttagaactgttctccattctagcttttaacatccatctagttgccactagaaagaatcagtaccatgcttcagctgtttcatctagacctacatatttatacatgtcagagtggcatcagttgcttcattataaaatatgcccctccacctccacgtgcgaatgttgtgattacctccataatgtgttaatatcttcaggaccgtgaactggattaggaggagaagcagagaaatgagcactcagtaataccaggaaatgatacttttacttcaagaggctatttcatgctctctgataggaagcactggataagctacttaatttgattttttttctcttagctaactacttccctcacccaaatccttcccctaacttgaagcagtgtctatctgctgcaacacaacccctgtatgttctcagcatttggcccttttgttttaaagacacagggcaagaggtttgcagaagcatttccctgggatttaaatatgagagtggatatttagggtttctggttgcactatgctgatgctggagtgacggtttctgtaataaatttgtgtgtgtatgcaatttgtgggaactaccaaattgtgggacttaaagtcagagcccttcttacctgtgtccctattggatggatggttttacttcttcgtagtggtacgtggtacagctgcactaagaggctatgtaaaatgccaactccgggatggctttcccaaagtttgttttgtctgcatgcctcatttcatgatgacattattattttggaggttttatatcataagagtgattaataagagattattttggaagtttgttttgatctgtatgagacaaaatgtttctccttttctcctgttcaaaatcaaggacatggtggtgggtgcctgtaatcccagctacgcgggaggctgaggcaggagactcacttgaacctgggaagtggaggttgcagtgagccaagatctcgccactgcactccagcctgggtcacagagcaagacttcgtataaaaaaaaaaaaaaatcaaggacactgagatattcacacagggtgaggatggcaaattttagaaagaatatcctagcagttcaagaccccagactcctgccaaaatcatagctgcaagtcacttctcctggttcaaacttaaaagacatattgatttagcacctaccgtgtgtccagaatctaactagtagaataaaataaactgacagaaaaatagcgaatgaacaaacaaccaacaacaaaaaaaaccaccatygccaaaatatgacgaagaacctttctaaaattttgatttatcctcatcatgtttctctctcagcttccccactctccttagattgttgatttgcaagcaaggaaaaacacgttttccccccttatctccagctgcacatatgcaaagactcgataattcctggctgatgagagctctctgttccgaagcagctgcctgcagttgcacaaaagccgatagcacagctctcagactaatcatttataaaactcctgtcaagagcgcagatcagcctagatgtggggtttgctgtggcagccaccacagagccaggagaggggcctgcccttggcccaggctctccccactttgaataagaattccattctccccttctagatgctgacctgagaaccaggtaggctgaagaaaagccagttctccctttaatcaggactcaacatttaatgtaactttcacagttcagaagcactacgagggaattccacccccagcccccaagatgaattttgtttttcagataatcaagccctgggcacattatatttctagaattcaggcagaataatgtaacatagaaagaacagtgagccaagcatcagaagactcagaatctaagcctggctttttgtgttctttcggctgaatgacttaggacaagccccttctcaaamctttcaacatctgtgaaatgaagcagctggattaggggatttctaaggttctttccagttctaatttttagtggtgctgcttggaagaatacagtccttgcactttcctatctctggtagattctagattcttctctttttttcttctatcttcttgctctcttctctgtctccttgtaacctatcaatctctctctgtctctctctcgcacacaaatacacacacacttctaagggcttgtaaatatcgatcaggctttagatcctaactaacttaattacattttatttctgctgtgtatttgtcatcatttttatggacacattaagaataattctttaagacatttctattttgactgattttacatggcccctcattttactgaaatacactcactttttcattcttgtgcttttaatttttctctatttattgttcagttgaaatgaaccttcgagtttgtttgtttcccagggttacatgggtgttaagttttttaaaccattgcatatctgaaaatgtcattttcatatgtcatcaaatgaaataaaacttagctgagcataaaggtctttttccctttaagctcttctccactttgggcacttattactgaaggctaaagcccaactcccccgtctcctccttcatttgtcagtagcctaggtgtcatgttatttgtttctctttctgtttaaatgccaggaagtacttccttttttctcaaactctaaaaacttgctagtattttcaaattgtggatctctgccagggccaggaccagggtgaggcaagattggcacttaggctaaaaaaaaaaaaaaaattaaagagatgcttaccctcaaagtaggaaatattactttttgcttggtacacaaagaatgtcggaagtccagagatggccccacggtggggaagtacaacatattcctacctttcccaggtggtttctgaggctctgatcatcttacagattctgacataattaggttgtttgtgaattttagttttcagtgttgtaaagttatttctttggatattatttgatactttgataggacattgatagaagcacaccggctcctaggagacagaaaccactttaaaacagaatttgggacaatgcctaccgtgttagaaatggtattttacatcttatgaatacatgagttccctcaatgaagttaacatagaaagggggatcaggggttgaagcaatgagccttgtaagttactggtttatttttactgtttctaagagtcaatgaaagagaaaatgtgtggaattgcttgggaaactctaagatccaacagaaacataaaggattcttacttgaatttatgagcccaaaacactctcgccccttgtcttccaggaggactctttgatctgacctgactacagatggattcgttatcttttcatgaggttccccaaaattaacgatcaagagtccttgagttttctctcctcctctggagtccagggaaccctgtgctgttttcttgaagtaagctttggtacatattgtgtcataaagactagtgagaataagaatcaatttttttttctctttcttctttacctggtcgttaaaagttttaaaaggagtctgctatcaatggcgctggtcagtgtcctgggctctaaycctgatgtttagcttatcttgatgatgatttggttcttagaattgcatatccagattcggttrgtgtgggagctgcttcaaaaatataagtcttcctctcccacagaagccaattcaaacaacaagtaaagggagttttctttccatccttataagtcacgttttcagaggggtcccacataacaacagcaggaaaagaaatattgatgtgagtgggctcggcccaagggatggcgagctgacagcacagagagttcccagcagtttcccctgctcccagacacacaccatcgaggacccacaggaactaccttcttgccatggccatgaaaagagcatgtttttctagcatgttctgctgccagaggcttccaaaaacagacacagttctgtttggctgtatagacttaaaaaaagtacatgtacatgggccagatttatttattcctcaaggcacactacctttgcattacaactcagggacttccctttgcaggatgttcttcccttgcagaagatagcctttgaaaaacgtgtgatatatattacctgttcggaagatttcaggaagggtgatttgcattcagagatggataggtaaagaatgcatttaacactcatatgttttggcagaatgtcaaagatggccaggaacatcaaccaaaagagtcactctgatgttccctggctgtttgggaaggttgaaagaatatgcactttggagctagatggacctggattttcattctagacctattagcaactatgtgtgcttggataagtcacattatctctctgagcctatttccccatctgtgaaatgaagggaataattctagctcttcattttagttgtgagactcaagaaataatacatcagaccttgttctatggtaaatgctcagtatgtattcattttcttctgtcttcatgatgctcttcccaaggaccctgaacttgaatttctggctgccctggatctattatttttaatgtagtcctatccatgactatgaacttcatcttctgactttgacatctttttttgtttgtttttttttttttggagacggagtctagctttgtcaccctggctggagtgtggtggcgcaatcttggctcactgcaacctctgcctcccgsgttcaagcgattctcccacctcagccacctgaggagctgggattacaaggctccacccccaggcctggctaattttttttttttttttttgtattttagtagagacagggttacagcatgttgcccaggctggcctcgaactcctgagctcaggcgatccacccgcctcggcctcccaaagtgctgggattacaggcgtgagccaccgctcccggcctcctgactttgacatctcatttcaacgtgtcaggcacagaggaagcatcgcatagacatgggtctcctccatcacatgccttgtggaatatagtgagacctctctgctcatagatttcctggtctttctgctgcccccaagccttagggatatgtcaagttagccttcatttgaattaacctcagcactttctcttgcatcagttatttgaactgcattctttcagatctcattgattttgaaatcaattccgttgatgcagaattgctctgtgtaattatttatacaaatctcttgatgtgattggtggagccttacttcagagcacagcagcatgatgctacgcagagctctaaatatgacaagttaaaaatgaattaaagtcccactgcctacatggaatcttagaggtggaaagtcctacagacattgaggacaataaactttttttgtttatgaagaaatcgaggccaggagaacgaaagtgatttgcccaagatcacacagcttattaatagcaaaatcaaggctgaaatccttattcctattcctgcttttgagtttcctataaaactatgttgtcttcatggagatacatgatccatctgtgtcatagtttagaataaaactaatactattttgtctccattagaaacctcatgcagaaaccctaactttaaaaaaaaaaaaaaaaaagtaactccaactctactgaaacagaaatccaattttttttttttttttttttgagatgragtcttgctctgttgcccaggctggagtgcagtggcgagacctcggctcactgcaacctccgcctcccgggttcaagtgattcattctcctgcctcaacctcctgagtactgggattacaggcacgcgccaccacacccggctaatttttgtatttttagtaragacggggtttcaccatgttggtcaggctggtctcgaactcctgacctggtgatctgcccacatctgcctcccaaagtgctgggattataggcgtaaaccaccatgcccagcccaaattttcttttttaatggggagagggcaccacttccttcttcaaaataattgttcactttaataaaatttttattcttttccgccttttttttttgaagatgtctacattgtttcagtcataaatcagctatctagcctcaccgattatactctaaatattccttttgtcctcacmcaccttgtctttcccactatcagcaccctaatcctggtctttaactcctcgagcttggattctgttggaagagccccctaaagtattaaaccacctgcagtcctttcctgctccaaacctgcacactgtttcagatttaatatatcactgacgttaatcaagtcatcatctttttggtctaatttcatacagctcctcagttcaagcagacaaatttcttcgtctcatctgtattcaattcaggatttagttctttcaggattttcacagctactttctggataactctctcaggttcccatgttttccctctgtcgaatttgctccattggagccgtcgtctgtatactatttttgtaatcccctttggctgctgactttctcttatctgctgcaataraaatactctcgcactaggcattgggaggaccacccattaccttccataccctgattgtgaacatgtcagcatactgctcagtctctctgaacctcagcttccttgtcagaaaaattagggaatgtaattacctaccttatctcttttttggctgagtaaagattagctgagaaagtcgtcacccaaatgttttgcaagtataacttattcttcagttctctctcttctgagttcacactcttgaaacacatcctccaggttacactgcacaccactgtgctcatagtggcccatgtgaggggcagctgctgtccttatgatttgcctgaggtgagggagaagtggtcttggagaggacgcctgactcctaggtatatgagctccmctcctttacctttgtgatctgaatttacagaaattggaaacatagtgggcttcgcaaataccctttaaaaaaatcatgcttttcttggagcattatgggatattggtccatttattttttataagcatagtaaaatctttattcaagtacaacataaayagaaaaaaggacacaaatcatgggacacagctcaagaaattttcacaaagtggatacgcttctgtagccagcacccgggtcatgaattgggacttttccttcagcctggaagcccctctcatgccctcttctagacaccgatccccctaagggtaaccaccattttgatattgaatgggatagatgagtttggcctgtttaagaacattttttataaaggaaatcatacagtgtttccttttttgtgactggctgtgtttgttagcattgtaatgttcacccacaggttttttgtttgtttgtttgtttgtttgtttgagatggagtctcgctctgtcgcccagactggagtgcagtggtgtgatctcagctcactgcgacctccacttcctgggttcaagttattctcctgactcagcctcccgagtagctgggacttgtaacaggtgccygccaccacacccagctaatttttgtattttttggtagagacggggtttcaccagttggtcaggctggtcttgaactcctgacctcatgatccacccactgcggcctcccaaagggctgggattacaggtgtgagccaccacacccagcccactcacaggttttaagtcattcattctgtgtgctgtttaagatctcagtatgtgtctacgtgcgtctattttgggtggacatttggagagcttgaattggggactattaggattgtctgtgaacattcgtgaacatgtcttttggtgaacatatatatgatttccatgagtatagccctggccatgaaatggctgggtcacagtgaatgcgctcgtttggtagatagtgccaaagagttttctaaaatcactgtgccagtttactctttaaccaccaaagtgccagttccacattctcacccaaactcagaattctctgtggtttttattctagatgaccagtgggtgtgtcatagtatggtattgtgttttaatttacattttcctgatgaccratgaagttcagtgccttctcgtgtgtttattgattacttactttatttatttttcatttcatttttagttgacacctaataattatacatacttacgggacacagagtgatatttcaatatatatacaatgtaataattaaagcagggtagttagcatatccatcacctcaaacatttattactttttagtgttgtgagcattcaaaaatcttctcttctagcttgttgaaaatatacacgaaattgttgttacccacattcaccctacagtgctacagaacactagaacttattcctcctatctagctgtaattttgtggatactgtattttgttaacaaaactttacttccttcaaaagtgctaattccagctttttgcctgtttttcttctatgctgtgtagctatttttacttattgatttataggagctctttttttttcttttttttttttttttttgagatggagtcttgctctcttgctaggctggagtgcagtggcctgatctcagctcactgcaacctctacctcccaggttcaagcgattctgcctcagcctctcgagtagctgggactacaggcacacgccaacacgcccagctaattttgtatttttagtagggatgtggtttcaccatgttggccaggatggtctcgctctcttgacctcatgattggcctgccttggcctcccaaagtgctgggattataggcgtgagccaccacccctggccctatttttttttttttcgttatagttactcctttaagaaattaacaaaactttacctccttcaaaatcatcaagatgttctacgtttccttccaaaaggtgattgtttcaccacttatatttgtatctccaggtgatctggaattaatttttcctaaatagccagaggcaaatgccaagatttatttttccatataaatagaaaattgaccaaatatcattggttaaaaataaaatggggaagggtaatagggtaattgttttttggaagaagtacttccagagagggccagtagcagttccagagggagggtgaaggagcaaaagacaacatgagggcaacgagaattcagggcaaatggcccaaattgataagaagagtgaggcacatgggggaagttmtttttattctttcttgcatatatcggatgcaccatgcatatgtgttgttgagtgtcatggaragctctcccaggtggttccctgatcatagaggtggcagtggtgcagccagtgctagagtgcttggcttgcctcttggaccatcgttaaggcacagccatggaggcaggtctgtcccctcagtagtgtggcagtggraaagtcctctgggtcattttagtactcccaccatwaattcctgacctggttgaaggctggggtagaaaacagaggacaacttagcatgtgtatcgtggttcctgcttgaccataacacttcctgcaccacagacagcagctctaacaaccctaggccccragacccttacccagggtgacagatcagatccagaatggaattccctagcacggtagagtggcatgatgtttgagccagataggaaaattgccaagcagtttccttcctggcacaactgcacccatgccatggaaggaaatgaaatccccttaaaaaccgagcccatctctctcacaccataataagataataagctaggctctgcccttccaaataatgtagccagctcatggccttcaaaccaggcatcctcactgtctgaatgacaaatggtcaggtgtgtcaggaacatggcaaagagttctaactctctgaaccctttgttagctgaactaagtggggttctcctgaagttgggaattcagaacactgggtgtcacattcttaagaagagtgcttccatgtattccctgtagtaataatggccatgttgacacttcattacagtccaggaattttgaacctttggcttgattttcctggtaaggtgaataaactgagcatagagatgctaaattactatctagtgatcatgcagcaggcagtgggcatggaccacaaacctcgtttttttatttgagatcagctgyacaaaaatctcataaattattgtatttcccttttagcaaaaccagagcccccttcagcagtaccttgttgtaatgtttaattagccataaagcaaaaagactcttttgtctaactaatttctatcaatgccactgaaatgtttgtcctcccttaagttcttttttttaaaaaaattgtagtaaaatacacataacataaaatttaccattttaaccattgttaggttcagtggtgttaagtacatacacgttgttatgtgattaatctccagaactcttctaatcttagaaaacacataacataaaatttaccattttaaccgttgttcggttcagtagtgttaagtacatacacgttgttacgtgatcgatccccacaactcttttaatcttacgaaactcaaacttcatacctactgaacaatagttctctgttcctcttccccacagcccctggaaaccaccattctacttgctgtctcaatgaatttgagtaccccagatatatcatataagtgaactcatacagtatttgtctttttgtcactggattatttcacttggcataatgtccccagggttcatctatgttggagtgtatgtcagaatttctgaatagtattccattgtatgcataaaccacattttgtttatccgttcatctgtcaatacacacttgtgttgcttccacyctttggctattgtgaattctctttgagttctatggggagaagaacaactgtgtataacctaccttgtaataattcttaattcgcttgtgaaatttctgcttatctttgcctccctcaggacaaaacaaatacatttctatattttttccttatagtgttggtctcaacccatttcctcatcttcatacctactgtaaatgtctccaaatcctgttcactattcagaagggaggttggaatggtctacactacttagcttggaaagaaagttctcctaggacctatgcctcccatcatccagttgaatttctcccatacwtcttcacctgttgtgtcttcaggcaaacctcacgtgatttatcagtgcmcacaccttcgtgctcccatagcctgcctcatatttcttcagaccttttataatactgtaatagatctttcactacccrtcccgggccccagtttttacacaaagcacagtcatagtattaggttkgtgcaaaagtaattrtaggttttgccattaaaagtgttaggttgatgcaaaagtaattgcggttttgccaataattgcaaaagccacaattacttttgcaccaacctaatttgtgccttactcaggtaaagaagaacaatttccaagttatagacattttgaaatgcagtattccaacatacacctgccttttgttttatatgacagtgtggtgctttgttgaacgttaaaatccagtaagatttgcaataaaaatgtatgaaaaaaatttatccccttcattgacttgtttgaaaaaaaattttatatcccttttattgacttttttgaaaaaaataatttaagattgcaatttaaagaattctgttgtgagtcctgttacaaagcaaccattttctacaatgtaagcttgattaggatttatttagactatcgtttctttatttttgcagaaagaagcttgcaggtagcttatagttaagcccaactctccacacccatcccatgctaaatcagtcagttttcctcatcctgcaaatgacagtaatgaatgtgtttttcttttgcaatcctattttagctgtttcctcttcaaactcctcttatgttggatagctcttttccctactctattgagattatttaaaatatggttccttgttttagtggttttagcagtgtttcctctggcccagcgcaatctacagcctcaatctctgcaaaagtctcctacagctcttccccaccccaatcccacccatatacccagccccttccccaacaggccaaccaggagctcccaagtgaagtattattctctctctattttactggtcaaaatttgaaataaagtagttaaaagtcaaagatatatagaaaaaaagagaaagtaatgatggctttttcaaaaaaaaatctataaatactctttcttatcacttcagtgtagttgatgattgctttccaagcccaaaactttttcacgcatctgattaaatttccttcactgagaaattccagccatctctggatagatctcctggctcaccttagacaagagtaacataagcttttatattaggctggcctagccaacttttcagttccacagaaggagtcacagagggatgagttctatgcattcatgtcacaccgcggaatctgcatcacataggtggttatgccaatgtgtgtctcctttgtgtcaacaccaaactctctggtgttcacgtactcttacccagaccttaatgtgtgcctaagaggtgggtaatgaggtccattaagaattattttgaaaaaggaagttcacatttatttcaaaaattaaaagctcagaaacagaaagcaaatgtctataaaaagtaaagataaactgactgaaatgacaaaaataaaccccccacccaaaaaaaaaaaacaaaaataggaggaaatctgagtatgggctaagggaaaacttccccttcaactcctgaagggttgctgaaaatcactgatgagaggccgattcacaggagaaaaggcatacacgtttattactgtgtatgcaagaactttcagggtgaagacccaaagatacagaggaaattgtccatttttatgcttgggcttaactaaatttgaacagttgtatagaaatatgactggacaaaaagggtatgatctaacccaaatagacccagtttggggaagcctgcaaggcctctctgtctagattcttcttggcctctgcacatgccttccttccttctaggtacggggcaggaccctctcaggaatgaaggtcttatgacctacagtcaaacgggataggtcagataatttctttatggacagtttttatacagaaaagtagaaggaaagttagagtaatgtttttaggttttatggctggctttggggaaaaggagttccgatctgtatgacctgccttgggggagagagattttagtttctgtggttagtctttggtaagagtaggattgaaagacagaggggcaagagaagttcasagaaaaacttctgcttctgaggctgcttttgaggccttcactttggagtactgttttctgagtcccagtacctgcatcattaaaactaaggaagtatcggggccatcagattgcccaagagattgaggaatttgtgctagaaataatgcagatgggagcaggaatacttattaatccattaataggatgtttgtgaatgactttaaaataatctaactggcctgctggggcagcagaaatgaggggatttataaataaaataggcctttatgaagttttgaagctggatgtgaggtgtttgagactgatttgacaattttctctgcttttgtttatgtttgacatgtctcacaaaatatagttagcccagatagtgtaggtgggacaaaatcacagggaattaataactgcaagctcccatgatgcaaagtgtatcttttccttgcagatgcgaaataaaaactaatcacaaattccatgaacaaaagtaacaaatctatcatcaggattaaagatacaatataatcctagataatgcctacattaaaagagaagtcaaaactacaaaatgaaataactaaagatctctatctatccaactgtctgtaactgtctcaacaaatagtgcatttaattgcagtatacttaagttggaagaacaaatagatttgatctctcctgttcatgtgttttgactggccctgactgaggccagtagaaagcctgcttgaacagagaagcaatatctgctgtatcaagactccaactggatttttgtttttaatatgataaagtgatatctcatttgtcaggaggaataaacggaccagaatcatcaaggacatgttgaacaacagaaagtcagaatttactttggtgtacatgaaagtatactatcacacgataataacttataattgggccaatgtagaaaggaatcaacatatttagaatatgataatgatggcatttcaaatcattaggcaaaagatggattctttaataagtcttgtttgttgcaggaaaactcagtaattacaaacataagtattttgtgtaatatgctacattatgttgaatatgattgctttgtttataagaaaactacaggaagggctcaggatattttaatactatctcatagcagtataattgtgtttatgacaatattctaattcacctgaagattttgaccaaagttattttcttacagcattgtggataaacaataataaaacacagaaacttaacgtggcatttattcggtgccaggcagttttctaagctgtcgaggtatattaactcatttaatcatcacaaaactgtatgcaatgggtaatattattattctccgtttaatacacgaggaatctgaggtgcggggctcgttgtgcgacrtcaccatcagatgtctagcaagtggggggttgcgggggctggaattgcggcctggctccagcgtgtacttgacagtctctcctgggactgagctctctctgcacatctctgacatgyctttttgcgtttctcagggacctgatgcccagaaccctggacgggcagatcaccatggagaagacgcccagttacttcgtcacgcgggaggccccygcgcgcatctcggccatgtccaaggacaccaagctcatcgtggtggtgcgggacccggtgaccagggccatctcggactacacgcagacgctgtccaagcggcccgacatccccaccttcgagagcttracgttcaaaaacaggacagcgggcctcatcgacacgtcgtggarcgccatccagatcggcatctacgccaagcacctggagcactggctgcgccacttccccatccgccagatgctcttcgtgagcggcgagcggctcatcagcgacccggccggggagctgggccgcgtgcaagacttcctgggcctcaagaggatcatcacggacaagcacttctacttcaacaagaccaagggcttcccctgcctgaagaaggcggagggcagcagccggccccattgcctgggcaagaccaagggcaggacccatccwgagatcgaccgcgaggtggtgcgcaggctgcgcgagttctaccggcctttcaacctcaagttctaccagatgaccgggcacgactttggctgggatggataaccatataatttaaaaagaaaaaaaaaatcaaaatataatatatttttttaccaatcggtagagaagagacagtttaatatttgtgctgaaaatatgtttcagtatttttttcaatgaatgttaagagattgttctcactcccgccccatcttaatgtataaccaacaccaaacacgtggawcaacagaaaaggaaaatttcactcgtctaaacactttcaattttcagtttttattttatgttctatatacccagtcataaagtataagcatcagttgtcattaaaagttttcagaaaatcttgaggttaaacatctctctctctttttttaaaatacaaggccctgataaaattgatatctatccttatatttttctccctttttcccgtgccactttttcttaaattatttcccagttagtattatcatatgtttgtacccgtcacagttttcatagtgctttcaaatacacctttttgatcattaaaataaaaaaataaatcttgctctgttgtataagatcacaataggtaaatattattatccccattttacagaaaggaaaactgagtctttgggaggtgaaataatgtatctaaaggtcaaatgttggatggaccctggacaaaattccatcttccacttgttccctatttcatgtcactttttccagggagaatggaaaagaagacatctgcacctttagaaatggttaggtagttttcagatgatatgaaaagggaaagagagccccttgttttctaaattcccaggctacccctcatggcacccagtctcattacatagttgtgtccaagaaaaccactgagacctggacacaacctctcttaagagccagtcttgcctcttggctatttaaagtacactgagatatggaaatcttgactgatgaatgcttgattgaattggagaggaattattggattcttgcatggaggacaaggtggccagccacactaggggtagcacaagatgtgttaggaacgtaacttacccatttgttgatttaattgactttaaaaaaaaaaaagaaacagatttcaattagcacttacaggtatgagtctcatttgttttttagtttacctctttttaaagagagaaaacctacctttctttgtaatatctcacttctaactttggagctagtactctgaaagaattaattagcagttcgtttaaaatgtttttatttttcatggatggaggactatcattttgtcactttattcccccctcccacttcctatttataccatttataacctaatgttcagtaatatttggaaaaatattctaggaaatgcatttgtgggtaaaatggtggcttttcctcttctctcgtctgtttctgcccatcccccatttaaatcactcaaataaatcaatagtttattaacagtattcctttcctctctgagtgggtattaacaagattagcattaatgggaattaaattggtttagagaggaacacatatgcacgaaatatataaaacatttataattagcctgtcagcaacattttattagaaatttaaacccaagaggaaaaatgtcttctatttcatggaagttttctttatctgccaaaatttaaacgaccagacactctaaaataatattctttttcttctttaatgttgtcaatcaaaagaaactaaagttgttttaaaatatgcagtacaattgtacatttaccatagctgctgcattaggtgatgtaaatatttcttgagaagcttaacacaggattaaaatgaaggaaaaaatattttaagtgttagatattttgtcattgctccaaatctttggatttatctgttaatatcccatttatagaagttaagtaaaccccaaatccaggtcaccttttttcagttgatttccttcatgtctatgctctcaatttcccagtgccacagactgtttttattctacttgaatcactagctgcaacaagatactcattttaaactcttgtcatcatttctcttagctcattttgtttgtacaactgattcttttgtaagtgtttgcttggcattatgcaaaagtggcttgcacaaagaaacaattgcattctgcaaccttcatttttttaatgtgaaagaaataaaagaacagaattgaatgcaaaggatccctttttgaacatagatatttttgttcatattattttaaaaatgaacgactatggaaaacaccgggaaaatcttcaagcttctgtgacttcctaagagtgttggaagtaataagtcccagcaaaatgtataaagatttagagtcagtattctctaacaggaatgtccattcatttctgcctctatatagtactcgtccctgctgtgcatgaagttggcctcacatttattttgtccatttagctacaccaaataataggctttgaccttgattggaacatcttagcgtccattctctgagctgtctgctccaaagccatgccttccaatccccttcctgtttcttagaggtagagtgttgtctttcaagaagaatatctagaaaatatctacagcttcgtttcaagcagtttgcttccaagatcacatctgcagtgtatccattctccagagaacttagtcacttctagggaaatgaattttatttcaataaatggagattaatatgcttctagagaatggatattgattattctagaaatattaatcccattctaattttcttattttcaaaggatcttcaaagctgaaatcaacttcaatggtcatttggatcaaagccctgttcagcacctgaatccttttgttaacttgttatgcagggggttaaaacattgacgtgtctgtaaattcgtaactcttgatattacagttgaaaagaaagaggatacatttctcctaaacagcttcatcgtattctgccagctgagacctgctgagtccccagctccccatgaagagatcttaaatacgtgaataaataaatatgtctataaaataataatgccttatatgtatattgcaaactagtctttcaaatgcattatttcaccgtataccaacaacagcagctctctactctcattagtttcacctcatagatgtttcactaagtttcgttagggcttaaggcactggttctcaacaaaaacatgattttgcatcccagggcaacgtctggagatatttctggttgcctcaagagttgaggagtgtagggtgctgctagcaccctggatagaggccagggatgctgccaaacattctgtaaagcgcaagacagtctccattactaaaaatgatctcaaccaaaacgtcagtcatgctgcatttcctgagttaagatgtgtatcagtcacagctagtgtgtgcctcaggtctaaaagccagattctaattaatgctagactggtaattcttccagtcaccattctatattttctcttgaaaacctcttttctattattttcttccctcccttcctcctttctctttctttctttctttctctttcttttctttctttctttttctttctttctttttctttctttcttcgttctttcttctttctttccttctttcttttctttctttctttttctttctttctttctctttctctccctctctctctgtttctctctctctttctttcttctaataagcagagcaatgtttactgttgtgctttgctgggaaaaatgctaaaggcaaccaaactgtgtttttataatgaagatacagaagcagcttgtaacaaatggatacctgcaattgtgagaaacggaatcagtcagcttcaggtggaaaataacattccaataaaacacttctaaaggctctttcaagttcaagtcttgcagtttctatttgcctccacaacagggccgtgactgtatttcttgtcacctgacaaaaccaaagtgcctagggagggaagtaaatatctccatttctgttaaacgttaaattcaggtggatgtgctatggttacaaatagcctcgagttgctgaataatagcaaaggaaagcaaattcctattgcctcatatcctagaaaccccagaactttgtgcataatttcgatagactcagagaacagaaaaacgtatggttctcaaacacagcaaaagtgttgctgggattcattccaatataagccttggtgtagaaaaaaaggacccctacttattctcctattgtatcctgtaatcattgaaggagagtggaattttaaaagcccaacctcaagccctgttggtgaagcattggtgttattgtagaatttgtggtccttgaaatatcttcatcaacatgcaaacagatttgcattgagtttctaatatacaggagaagttcttcttccatgttcatggataggaaaattataaatctgtttgctacataatggaatgttgagatggcaggcctttctttaaaagcttgaaaaaggatgaatttggggaaattatgaggcagtgtgacatcacatacaaagtcataaaataataaattttagttacgctaggaggaagtaaaactgaaaatagaaattgcttctaatatatggttctattgtgggatattagaaaatgttagtatgtttcaggctatagcccaattgttttagtttaatttccaactgttggttgtgttcttttaattacaatatgctcaacaacttactctcctctagttttactgtaaaaataaaagggaacgctgaatggggaacacattctgctgtgagtcctttttgctctcaaatgtctgggtatgatattttagttacctttgaaggatcagataggatgagatctggtgtccattagctctgcctggatgatccatgactatgctagattttgaacttggtgctaactttgattattcctaagagggcttttctgtaactgtctgatctgtacgttgaccattaggtctctcctaaagtcattttgtaataaacctagagtgttctcccacaccccaaggggagcttgctttcattgcaaataggaataatgagtctttccccctcccatcttctacctccatgcttctttcactttccggtggcttctgccacatcctgccggtgactagtgatctttggcatctgattcttccctctcttcagatgtaccatatctgaggatgtccatttcctacttcagattcctggggaaaaaactgcagcccacctagggcattcgctgtcagcttcagctccaggaaaaacagtctgaatatctgatatagacccctagagagatgaaagtcaagtaggcttaactttccccaagagggtttacattaggaaaaaaaaaaaaaaggccccaaaggaggatggatggaactgaatctgaaagaatggaggcatgtttgacataggagatggaggtgttgttgaaaggatgcatacctggcttccagtaccccaacccctcaccacggacctgaagaaccaggggcagcaacgtgtggccttccactcccaaaaggttatctgcctctggtctgggcagtggcatttttctcccacctgttttcccagaaagccttatctaagctcggatttctttatttcaggcctgcaacagctggtcaaccagggaactgtaggaagcaaggaaactttagagtcatttcactgcaatttttcagaggcaacaagagtttttgattaagtgttatcaactgatacctttatagccaaacctaatttttatttcagactacttgatcttacccctaaattctagatcagttgttcttcattatacaaagtccaactaaatatcctatagtagtaataccttacctttatacagaatgattcaaaacatgtttatatcaaagagggtatagactttagacttgaatagttattttttctttttccttcctttctagattaaaaaaaaaaaaagttgatatggtctattgcagttcattcccaccttggacaaaccccacatttctccttagctgaattacttacaaaagtcttttcagcatctttccttctacacttcttgattttatttttttcctcatctgagtaaacttttactcttcaattttttcctgtatcaaaatccttatgtcaaaaactatcttacatatttttttattcctcctttcttttttttttttttttttttttgagacagagtcttgctctgtcacccaggctggagtgcagtggccctcggctcactgcaagctccgtctcctgggttcacaccattctcctgcctcagcctcctgagtagctgggaccacaggtgcctgccaccacacccagctaattttttgtatttttagtagagatggggtttcaccatgttagccaggatggtctcgatctcctgacctcatgatctgcccgcctcggcttcccaaagtgctgggaatacagatgtgagccaccacgcccagcctcctcctttcttttcaacaagacccctaattgttattt

SEQ ID NO: 94058 - DNA, 765267 bp, Homo sapiens
  misc_feature (1)...(765267): n = A,T,C or G
ttttatagaacagggaagatacatatctggaagataaactgactcatgaagattatatatttacactggtgtgtctcagtcactatatctgagggcccagagatgacggagaaggaaatagggtgaggtgggtgcttcttgccatcctgaggcatcatttccgcagtcttctctgcaaacacctgcattttccatgaaatctggattgtgctgagagtgtctctccttaaacattttttggatctgagcttccaaattctttttctgaaattgcgtttaaggcgatcagccagatttcaatgaaagcctttgctttatatgaagcataaagtagagcttaaatgaacagaaggtcatttgtcttgtttttcaaaaagaaaaaaaaaacctcaccatttttgtagcataactaaagcaatctgaaggcttttttcttttgtgtgatagaatttagagaaacgtactgtgctatcaagaaagggttcaaataagagcttctaaggaagatgttcttctcaatgtgtgggtgataattttaagttgtcttcctttgagactctgcctctgtcagtgttttacttgataacagaactcactgagtcagaagctggcaatttcatcatgatgcattttcttatttaccattcaagaggtgtaagccttatctcttatattaatgtgaaaagtaatgaaaataatgatgccaaaggcatttaattcttggctctaatactttataagtgtgcctcttgttcacataatttactgggcaggggaacaagtcatcagggtgacctttttccatggagttaatcagggactcaaactaacagaagctctgccttcttcagtgcgtggcttccaaggtcaccaccaggatcactttcattctggccagccaggcagggaagagcatggatcagcacatatgggagggtttgacctgccaaaggctactgactgtaacccagatgtggttattataaagctggttctgggtagtttttctccatatctctcttatatcaaaaaaggtgagttaaaggagccctgattcttagatgcaattagaactcatttattcatgatggaaaagagcttttcagttctagaaggttagagacaaaaatgaatatgattaaagtttatagaatcaatgcagccaaaaagaagtttactaaatcacagaccacagaattagaatgctgtcttttaagactaaaagagttatttagggcatagaaagggaatatagtagaatttcagaataaccatatgtgtgttaactactattgattaccgctgtgacagggacttagatatatgatttcatttaatctttgcaatacctctttaagacagcttactgtggtggttaaatatgtaggctctggggtcaaactgcctagtttaaattctggttcactcacttactagctggaaaatgttgaacaactacttaacacttctctgactcagattacccagctataaagtggagataatagtaacccggctcctaggggttaatatgacagtgaatgcattaaaaatgtaaaaccctgagaagagtatgtgacataaaaagctttgacattattattatttctccatttacatattaggaccttgtatttcagaagagataagagactttcccacggttacgtacgtagtaattggtagaactggctgttaaaagatatgtctattcaaatcaaaacactgtccttcccactgtggcaggcctcaagtgagttatgagctgacaagagactggagtacataccacaatctagtttctagggaaattaggactatttatattacactgtggttaaaaggagagagaaactactcatatctgccttataagttgtagaagtatctaccatggtagttaagagtctaggttctaaagtcagacttcctaggtctccatctcaattccgaattttgtaactggaggaggttaatccatcctccaaactttagtatataaatcagtaaaatagcatacaataatattatctaccagatcagctgagagtaacaataaagcttaaataataaagagatttattatctcactcattaaaaagtctaaagaaaatttaaagggtttaaaaagctcatgaaggaccaggtttctttgcatctttcttgtcagtgtcctctttacataacaatatgagacagagaaagagaatttccctgaagacattagtcagaactgagcccctcatatagctcttaaaccagttacagacaaaggggaatggaattattgacattagtttaggccaatcatagtttgttccttggaaagagagaggggccatgtttcctaagcatgacgaccacccaaattaagtcagggtttgcttacaagaaaaagagggtggagagtggtgttgaataggaagggttatgttttttagtgtctgggaagtgcttagcttagtgctctgacccacagtgagtgctcaataaaggttagctttgccagctccctgaggctgacattcccagagggcaattctgtgctctcacaaaaaacagaccttcctattgtttcaaaaaacagtacacagcaccgaacttgacggatcacaggcctggctcacacaattttggatttcttacagatccctttgcatagcaaaaatctccacacttggacacaggaaggggaacatcacacaccgggaactgttgtggggtggggggacgggggagggatagcattaggagatatacctaatgctaaatgatgagttaatgggtgcagcacaacaacatggcacgtgtatacatatgtaactaacctgaacgttgtgcacacgtaccctaaaacttaaagtataataataataatttaaaaaaaagaatgggaaaaaaaacaaaaaaactccacactttagaaacatttctatcttgtatactgaacaaaaggtgtggaaaatgagggagttaaaccatgctgcttcaagcatcatgctacatgttgaaggtatttatcctgtagttctcctttaacaaactgcgtcattttgctggctgaagaaactcttgcagcccatgtttgtcttgaagacaaatcctgttcagatttctacagcgttctctcctttttacgtccacgttcacagcaacagctgggaggaatcagggatgctagatgaaatactcaactatccattgccaataatggtggttaccaaatgactcccaactcagtgccattcaacaatgaacgtttattgtcatgttcatgagtctgcaggttggctgagtctgggagatctaggatggtttctactggacttgcttccaagctgtaaatggggcttaggtctgtcctgattgtctccttagatcagaggctccctgaggcatgtttatctcatggaaatgataagaaacccaagagggaaagcccaacctcaaagcatattttgagcctttgctaatatcacatcttcaaacatgccattggccaaagcaagtcacattgtccaacatcaatgggatggataaataaacagggtgtctagtaaaaactgtaaggtcacaaagaaaaatgtgtggacgcagaaaggagcagggagcagagagctatgatgcaataaactaccacaggaggctcaatctacttcttattttgcttagagctcattgtaactctccaatctcctcttctagtgagcgcagccctgtcttgccttcctaagccactgtgacaggtaaaaactatttggccaataatctttccagtaaataacaaagagatagaaggagaaaaggaaaagaaaggaaaggaaaggaggaaaggaaaggaaaggaaaggaaaggaaaggaaaggaaaacaatttggtatgatcagttgtaaggacaattgagaagttctggagccctggaagcagagtttcattgcagtactctgaagtagagaaaatcgacttgagacggtgactgataccttctgtgaggtaattagcaagccaaggctgctggctagagggactgtggaccattcaggttttagtttagggacatgtgatcaaaatgaaaccagtcagtttttcatgaaattctttgtagcaattggcttccaagcacaaggcaagaccctcaaatgacagcaagagtcatgggtcttgttcaccaggttatccatggtgattacaatagtggctagtatacagctggctaccaataagtatattttaaatgcattgaaatatttaatagcaaatttctgtattggattttggtaatcttttgactgagttcataagcattgggccttggagtcctgagggcagagaacagggagaatgaaggattaagagaacgtagtgtttctctccatttttctctcttcgtattctttcttctttttaaaaatcaacctttttgagatataatttatttaaaacaaactgcactcaatttaggcgtacttacagaacttacaagttttgataaacacacacacgatatagaacatttccgacatgctcatcaggtgctcgtagcccttccctgtccatctctacctatccctggccacaggcaagctttctgtcaacatagaatatcttgcctattctgcaattcctacacatggaatcaggcagcatacagtctatcgtgtccggcttcttttacaaagcttaaagtcgcgattcatccctgatcttgcatgcccactcatttttattgtggaatagtattccaatatttgggcataccacagtttgtttatccattcacctgttgattgacatttgcaggctactaagaagaaagttcttcacatcactttacaagtccctgcagacttgaacgttttcatttcttttggacaaatacttaggagtggaatttctaggttgtatgataagtaaatatcttactttataagaaactattctccaaagtggttttactattttatattccctccagcaatgaacaagagttccaagctatttctctctccgcccccccacctcccgcgtgtgtctctctctctctctctttctctctctcacactcactcactctctctctccctctcctctctctccttaataaaaaaaaaaaaaagagttccagttgctccacatcctttcaagcatttggtattaccagtctttaaaattttatccattctggtcctcctctttcccttcttccctccctccctccctttctttcttgaattgagaaatgtttgtggaaggagtgaagacaaacattcctggacctatgttcctaaatgagcaagtttctattaataagactctcccccacccgccacacatcctacacactcaaggagaggagcgggagagggcaccctctttcttcctcggaaaataaaacctttgctttctttaggatgggctttctgtctcgaaagcacaacgtaaccgtttgcccgggtttcaagatcagcgcgctgcaaactctcaggcgcggccaggtttcctcaaagagcctctcaactgcgctcttctctgctgataaatgataattctcttcaaaaagctggtttgtggccggcgctggagagctccagctagagccaaaagccaggggttgcctctttggttcctcccgatgggccccttttcccagccagttgggatccaaagacgctccggagctcgagcccaaattcccaagaaaaccccaaagagcgtaaggctcctggggacccctagcacctctgcaaccagggcacggggcatgctcagagcgaatgcgggaggcaggcgttggctgcaatggggctcgggagccaggaggtgccgctgcgtccccgcttcctggcgcctgacccagcgtgcaaagttgggctgggagccgcggggggaaggaaggacccagcgagcgagggtggcggggaaggggggcgggggggaggaggagggaggagggaaaagagcggttagggggggcgccgggcgtgtgtcactcgctctctccctctgtgtatagaggatgtgctgaatggtgcgctttgaggcggcggcggcggaggagcagaatccgccgcgactggcagcctcggctgaccggctcggcttctcttcgccttccgaggctcctcatccaccgcgggctccagacctcgcgtcccgcccggggcatggccgggcgctgcgcccccgcgcgctctgcctgctgagcggcgccggagggaggtgcggaggccgggaggccggggaggccggcggggagcagagtcgagcgcctccggagcagagaaaggagcccgcgccccgcgccccgcgccccgcgcacggtccccagtccctgccgcgctcgcccgggccgcccggagcccagatgagcccagatggccggggctcaacccggagtgcacgccttgcaactcaagcccgtgtgcgtgtccgacagcctcaagaagggcaccaaattcgtcaagtgggatgatgtaagtattggggcggcccgagtcggggcgctggctcgggcaccgggcagggcgggcgtcgtgggggtggggcaaggggcgcgttatgcaatgggcgcactgggagcgggcaggggcagcctcgggcgcacaggttggcatctgccaaagcggatgtccaagggcagaagctttgcgcgcgctcctgtttcatcgggcttcagtagttgccatcctttctgggtctggcaggcgccccctgagggtcttacatcttttgggccagtggagagggaggggcaagctttgcctggtgacaggtcctgagagttcggaaagtagggagtgtgaagttgggaccaactggaaagcgcctggtgtgaacaaatcgcgtccctctccgcctgcggacgcaccccctattacctcttttgcccgatttcaagaaggaaggacctgaagttcaaaacactttagtgattgcgaaccctcttggcgcttttgtgggagccmasgcggcggaggacacaacggtccagccaacaggtggtcgttgatgccaaacttcagcgcctggctccggagtgagggtccctgaaaagggctgcggggacacatctggggagggcgtgaacagaatgggggcccttgaggggtcctggagggctcatgggcctgcaggcaagtggggagggctgacttttgagaactgagctgattggagtcttctgcctgaaatagacaggttgagagtttgccccacgatttacctgcaccgtttgccaggtagggcagagcctagcccagcgccggggtctctaatgctttacgagcggcccagaccccaggacttcaaatgacttccccttcccctctaccccagttgtcttcaaaacacgtaaattagttatccagctgaaaacatgcgaatcttcggatggagaacattatggtatcagttttatgtcctgggtgtcattctaaaggttcgataagaaaaacctactgaaataaacccgagttgccaggctctaagcaaatttaagtccaaatgactaatacatctcttaatcagaaggaattataggagaatgaggcgttcttcttgccgaaaagattttccacctagtaaattatagcctgttatcctctagggtatttttctttaatcttcttaagccattttccagtgtctgaaaacaatttaaatattccagktagtgaatccaattacttagctgagtgcgtctgtgtctatattttgtccagctggaagcgcaaacggaacttggagtatgaaccacagcttccttgaaagctcgtgccarttattaaatgctgtaggcaaggatgtaaacatacatctttttaccatgggcttcacacttttcttctttctgttccagtctaattgtactgaatgtttctgtaaatggaatagaatctaaacaataaattcagacgcagattaaatgctttgtgtcagggaaaaaaaagacaaagaaaatgcagttcagcaataaacaagacggtcttgcccattttgagatccttgaatagagaggtgatgtgatgatggatttactgagaaagagagtgaagggcagaggaaagagaaagagactttgcagaatttagaaaagggagtttcagcgtaagctctggatttgtatacagtgatgattctaaactgtattttaaataattctctataatttcttgtttgggagagaatagccaacatcacattgagaatgaaagtattctatgaaaacacattttggtatatccaggtagatgactttcattatgtgcatttctgtaacacatatttcttgctcacctattactgccaatcctggactggattctggggtggtgaaaaaagtagacaaaatccctgctgttacggaccttacatgctaggtggaggagacaaaaatcatcaaaaacaccaatgagagagagattgggtgatgcattgagggtaatagagaggacgttagtgaaataccaaccaaagaagaagttgaaaagagctccttctgagcattgcagcagtgagtttccaaggaagccctcctgaaagaaaggacatagtcactaaggagaagaccagaagaatttcaggtcttttttaaaaaaaaaaaaaaaacctagactgcactcaggagtcaagttatctggaatataatgagctatcttgcaggctctttggttctctgggtcttcatgctgatcagtggactacaagggacccagcctttcttaaggttgcctttctcttccccaggcatcccttttctactcttctcagctcgtatttgcccttccagaatcaagccagttcaagttatctggctatttatattgtaccttagtgagacagtgtgttgaagacaaaaaagaaccagatcttgaatcaaaggcctgagtttacctcctagttctttcaccagtaagctgcatgactttaggcaaatcacttagcttctctgtatttttgctgcttcttgtgtaaaagcgtggtaatgttacaggacattcaaaaatgatgaatttggggctgtttaggatgtgwagaaattatctcttgttcctgaagtgattaaagcagtataatcactggtcttgttgtcttgaccaccatatggaatggaagatgtcacccagaggttgcagtgccatgcataatttgctggccacctaccaagtcacagtgaggctgtggatgctctaagggtggtagtcgaaagctttaacataggcactaaacaatcacaacagacagcaggggggtaatagatcctggagataccctgttgtaccagggccaggcgttaatatttttgctgcttggtcatggggaggtctgggagtccccagggtctgtggatgggtgggtaggtagctggagtttttttgactatttcagtattttaaaactcatggtgtatattgtctgaacatcaaggctatacctgtccttctgaacttggcatgaagataaaggactgacctaatgatatttaaaaaattcaacctcatgtctttgcttttgttttgcatttgtctgttagcaggctctggtggtaggaggtgggtgtaaaggactatgggtatttgtgggagaattctggtgaggtagacagtggaaggagagttactttcttgatctaagctagggagcttgggagattgtgagagaagctcctctctcttctggatcttggccttggtctatattgggcaggacatggagagaaagagcaaggactgtaaactgtacaataggacccccagccactgatttggccctgttttccatgcctaagcactctgtctcactgtcgcacaacctctgagggatggaagggttttcatttatttattccttctgtttcttcattcttacctttcaaattcagatcttactgtgggcaggttgcttaacgcatcccaacttcagtttcctcaacggtaacatgcaaattgtaatatttcctaactcagaacagctgttgaggttaaataaatgaatgcatatgcattgctttgtataaagcctgacatacaggcaaccttcaataaaacatgtttttaaaagttattgtcggccgggcgcggtggctcamgcctgtaatcctagcactttgggaagccgaggcgggcagatcacaagaccaggagatcgagaccatcctggctaacacggtgaaaccccctctctactaaaaatacaaaaaattagccgggcgtggtggcgggcgcctgtagtcccagctgctcgggaggctgaggcaggagaatggcgtgaacctgggaggcggagcttgcagtgagccgagatcgcgccactgcactccagcctgggcgacagagcaagactctgtctcaaaaaaaaaaaaaaagttattgtccctcaaaaataagatggacgtgaattttatcaaggtgattagcaggtgttctatggctcttttattctactagtggaaaaattcagaccttacttccattccctttaatgtgtgttttgattttatactttataatttggagaaaaatcaggtttctcaccttcttttaaaaatccaggtgtttcacggaaaataagtacgtaatttagagcaggatccattctctacagcaagtcagtttacaaataatccaaaagtttatttttacttaaattccatataaaatatatttatgtatatatgtgtatataatttaacattgcacgttctgtcttacaagcatattctaacatggaaaaataattgctagactaagttgtctgagaagtctgatgaaactcagaagtttggatttgcgttaatgccatctggatttgaatcaagtaactccctcctttaccacacctccaacccccacagctaaaacaggtaatttaagaaatactagtatattgcacacttcccagcatcctacacaaaagcttagaacttttgcattatgtggaatctgctgttccagtttccaaaatgatgacaagtaaatgatgacaagatgacactcacaagattaatgagagagcagaggggaaaagggtttgcgaggtgggaatttagtagcgttcactttggaaaggttatgggaaacagggaggaaacttctctgagttggtagctggctgatgtggatggagcaactacaaagtgcaaggtggattttagaatggaaggctagcagatgccctctaaggagccacttaaatttgcccagttatgtccatttttcttgtccaaagagctttgagaatttctcattggcagtcaataattactgtaatctaagtgtaagagcataactcttttgcaagcaaatcaataaaactacttgaaactttttaaaaaatcagtgtaacatgcgtacaacaaaacacacaaatcctgtgtccagctggatccattttcacaaagtgaacattgccatgtcatcagtaccagatcaagaaacagcatcacttgccccagaattcctgagtgctctcttccagtccctacgtccccttctaagggtaacccttatcttgacttctaactttatagtttggttttgcttgtttttaatctaataagctatttttactttgaatgaaaactttaaaaaaaacctcttcagcctaaarcatttttattattgctgaactgatcctcttgaacaacagcaacaaaagtgacttacagtcagtttagatggccattgattgggttcttgtctgtcccaagtctgggaagtayagcaggtatagtaaatgccctgaaggagcaaacagttcaacaaaaccctagtaatttacagaggaaatgtaatgccttcaggctgttattggcatggcaaagctgactagtacagtactgttgctggaatataattttctctcataggttttctctcttatcttgcttaacactaatatttccccacctatggtgaatgaggataatttgcagtggctattagtttcatttgaaagtttagcctatcagtaaatagcttcaagttatatttatctgcaatggtatataaatggaatgggaacattttacttttttatgtgggatttggtaaactgtaaatgtttccttatcagaattgtttcatgttatcatgaacaagaatcgccagcagaaaatggaaggggattgctggtgaattgttgactaacgctatgggtctccacttaaataacaaacccctggtaactgaaatcattggtcttcttgttactggagctaataattaggttcatgcaacctttcagatcatatcataaattccaaatgctcaggcatatttcacagtcttttccatctaatcttttccctttctgttctatgtctgatccccctaagcagagccttgtgcccctatgtgtaagtaggcaaaggaaatatagacatatttctgaggtcatttacatatatgaccataaaaaagccattgatttttgtaactaactaactgaaataggatataaaggaactaactaattggaatagattataaaggatgcttatgttctttaagagtctctctggttttcctctgatctctttaagagctaatgttcgattttattatcattaccatgtgttaattctcaaaatttttatttcaatttgtattccaaaaatggtttgcatgtacctattaattgaggttgactaaatctatgcatttatcaagaaactaaattattataaattgagtaacaaactattatataaaattggaaaaaagttatttttatttatactaaaattattttatttatattaaaacagaaataaaagcatcctacatctgtcttttatttcaagggtttttttttttttttttttttttgagacagagtcttgctctgtcacccaggctagagtgcagtggcaccatctcggctcactgccaacctctgcagccgggttcaagctattctcgtgcctcagcctccggagtatctgggattacaggcacatgccaccatgcccagctaatttatttttatttttatttttagtagagacgggggttttgccatgttggccaggctggtctggaactcctgacctcgggtaatctgcccacctcggcctcccaaagtgctaggattacaggtgtgagccaccgcacccggccttcaagggctttttttgtttacaatatttggttaatgttctgtttctttttactgaattgacgtttaatgtacaagatcacagaaagtggattagttagtaaagaaaacatttacctgaagtagtcacatggatatcaatatatagcattgatatctagaagattaagatattattttgccattaaaaaaaacattttttttggaagttgtctatgaaatagttaagagtaagggaaatttaatttaattttaatccattttatagaagaagccatacaagctcatgaagctggaaaaccatagagcgaatcagcaattgatctggtcaaaaaatgttaaagatgccaatcatgatcctccccaggtgtgctgtgttggatatggttgaatctcacatagcatcgattcctacatcctcttagtaggacttcttataatacaaaatctggacttctaaagctacatttaccagactcctttttgacgaacattcttcttgaaaattaatatttccaccaaataaattcatgcatatgagatatggagggcagaaacattaaaggggccaatttcctgcatcctttgggttgtttctacagatacgtgagaagctaaaagaggtgggactttctgtaatagttcttcagtgtctctgagaggcagtggtgacagtggccactccctgttggcagcttacacttctttggcttcaacaaagctggtgttttgtttggaccccgggagttccttcttgatttctcacctttctgaatgtggtagatacartagctctccccaagggtctgtgctgctatgttctgagatcattcatggagagccaacctaaagcctgctcctccaacccttccagtttttctgtcaagtgcttactttatattaagtccctttatcttcaaaattcaagagaaatttctgtttctcgcaccaaatcctggctgatatggccttttgcggttctaggatttcacagctttcagtcctaaatataataatcatctaagtatcctacatagttttctccttcagtactacygttgagtaaaatgaagttttgctgtaatatttcctctggaattcaaaatccagactaagtcctaatagcaggcattcatgcttatatagcagccctgcttacccctgttcagtcattaagaccacctcgggtggtaggaaaaagagcaagcgtttgtcttttgcatttcacgtagaagcaaatcgaggctagtgattgtgatttgtcgaagggcacataactaagtagatctggaataggaatttaaaactacgtcttctggccaaattcagtgtcctttccagtctaccatgatgtccccgaacagggtccttttagtaacaacaacaacaamaaaaaactttttatttttttatttttttttttagacggagttttgctctttttgcccaggctggagtgcaatggcgcaatctcggctcaccgcaacctctgcctccccggttcaagcgattttcctgcctcagcctcctgagtagctgagattacaggcttgtgccaccacgcmcagctaattttgtagttttagtagagatagggtttctccatgttggtcaggctggtctcaaactcctgatgtcatgatccacccgcctcagcctcccaaagtgctgggattatagatgtgagccaccgaacgtggccaacaaaaagcttttaatagagtctaaatgaatacaagtttraagagattsatagacttttccaaagaatctctgttatttttaggattcatacatatgaagcttagatccctgcaaactcagtttttgagctattgtcttcaaaatagctctttttcatggtgtatgtacagtccgtttttgtctacactgtgcaagatgtgtgagcattggaaaacctcattgctgctttgagacaaaaagggcaggccagccgcagtggctcacgcctgtaatcccagcatattgggaagccaaggcaggtggatcacttgaggtcargagttcaagaccagcctggccaatatgatgaaaccccgtctctaytagaatacaaaaattagctgggtgtggtggygcacacctgtaatcccgaccactmgagaggctgaggcagaagaatcacttaaacccaggaggcaggcagaggtttcagtgagccaagatcgcgccactgcattccagcctgggcgacagagcgatactccgaaaaaaaaaaaaaaaaaaaggagggggcaatgtatgctctatagtctttaaagatattctacatcagtcagtcagcgtggaaacatgcatgtggaaagacaggtattcaggtatggtgttaaaggtctttttttcattgtcgagtaagtgacatttctgcattcagcaagactctttatatctgttactccaccttttcttcttctcgacatacgtgtaaatgttgtcttttgctgattcctatttaggcttgtctcatggcctctcatagaaatcatggaccatggaagaacaagaatatggtagacatgaaggaaatgtagagggtgagttgcctgctctcaagcacgatgcagaatgcaagacagtgtcaactgagaggccagatctatattacttgtgcagggaggtagataggccttgtttatattacaactagagcaggacttctggagggctatagctttataattatcattattatttttttccctaggggagagcataggcctggcactgggaggtgctgatgctcaggggatatttgtggaatgaaggaactgtctggtgtttgtctggctcacagtgggttcacacaggggagtgtgcagccttgaggcagacctggagggcagtcatgctcctatgagaccttcgtgacctttgaggtgttgtgttacattggttggaacaccttgctccttgtccttccattccatctgaaatctcctagggtcctaagggactctgtgrccttcttaaatgggatttctccatgtgtgtttgaraaggaaactatttattggcaatgcagagctcactgctgttacagtgctgatttcatttaaggtccaaatatgtcttaagattgagtgtatactacactgcaattcaatattggttgaaggtgatgatgcttaatgtatttatttctcatattctaaattttaccattagttcctattttctgaaaaatatgctcacccatacacccaaatattgcaatgaaaagcccttaaagaaattcagargcgttgggagtgacagaacaaaagatgcatggttgtgaaaacatcctatcacgataatgattcacaaagagaaaaaagaatacttgtgctttattgctaaagtgagaaaagtaacaagacatagttctaaatctgatttataatgaacttccacctacactattctttgtgtacagaggcaatggaagtccctggaacaatgcttttaatttcctcctttctccactcctcgtttaatgtacttgggccacctccattattccagctgccctcctgcccctgagaaatacctcaccttctgcatttatattttggagctcgaccttcctggcatctctgaatcctgacttcattattatctgacaccactcccctttcttttaacagtgtctatatgagtttcccctcagttgaagctttcctaagaacatagcaatatgcctttactagtaaaaatcccaacctcaaaaccaacacaatgttccccagtcccttttcctcctttagttaccgtcttcttcttcatctccttccctctactatgcaagtgtaacttatagtcactgtctccctgtccttacctcctacctacttcttctcagccttccaaagtctttttctgccctcaccactactttgaaatttctttatcatggctgtgggcaacatggctcccagcaaccccaactgatgyttttcagaatcttccttgtttttatttgctgcagtaccttccaccccttcatccattcattcaccagtcatactttaaaaatgtactgatgtctcttttaagcattgtgctagtgttgtggattgatgatgattaatgatttcatgcctgcccttattgcggagacagatgctaagcaaatagaggtacaattattttcattataactgctatgaaggaaaaaaagtacaagtgagtataggaagcatggaaggtttccctggaaaattctatttatgacaagtgggatttaggccagcatgagtagaagaatgtgtcaggtggagggaacagcaggtgtgggtattccaaagagccaargaacacaagattttgaaggagagaagcagaattagcacaggagagtgtggctcagataatgtggttggatggcaagggcctgcatatatactgcgtaggtccttgcaggattttagacgtataaagtcaaccagaaaccattaaaaccatgttttcaaccctggcaccattgacatttggtcccagtagttttttgttgtggagtctggcctgtgtattatacgatatttagcagtatccctcgctctagatactgggtgtcagttgcaaagcctcccagtagtgacaaccaaaattgtctccagacatagccaaaagtcccctggggtgcaaaattgctcccagttgagaaccactgatgaaaatgataaatgatatactatgcttttaaaagtatccggccagttcactgccctccccgccaccccaaaggccaataagtacatgaaaagatgtttaacatcattagtcattggagaaatgcaaattaaaaaacacattgaggtgccactgcatacccaccagagctatatgttactgaaattattggtttttctcatctgatgcccccactaagccaggagcacctcggttgatttgggatctgggctttaatttggttctctcgtggattatctgaaggatcttgcacgacacttgaagaacaattcttccaacatttccctacattgtgttaaaagggatttttctgcttgttctgtaggaagccagtatcttcacattgcttctctccactgttttgcaccctctactctggaccttcttcatctcttctgcttttctttattttgggaaatttcagagtagagacactcctggaggaaaagtctcatcaatgctgatayacgtggatgttttactccaatgatcttaattcctcacctggcatccaagactacgtttataakgttttcatttcatagtcagggctgtattgctcatgtttagtttgacaagcatcacatctgattttctgtgacccttagaactctttgcccgttgcatagctgttttcccccsagtgtctctatttgctgtatttggccctgctgcttcctgatgcaagtcttgggcaatccctgtggaacatcgcttgttacttttcctgttgactctgtggtatcgattagtttagacgtgcatgcctctattcatgtgtgttctcttgtaataccataaaaacatgagaatcgctgtggagtgagaattgtggtcaaccttggccaggagactttctgacagtggtgctgaggaatgtgccatgggtctgtggactggcccttgacatgagccttgaggtttagggttatgctttgtagtagtttactaagacttccatagcaaaggaccatagcctgggtggattacacaacggaaatttattttctcacagtttgggaggaagtgggagataaaggtgtcagcagggttgcttcctgctgagggccgtgagggaaggatgtgtgccaggcctctcgtcttggctggtagatggcctgcttctccctgcatcttcacatcattttccttctgtacatgcctgtgtccagatgttctcttcttataaggacaccagtcatactggattagggcccactctaaggcctccttttaacttaatcatatctgtaaagaccctatctctaaataagatcacactttgaggtactggggattaggacttcaacatgtgagttgttggggaggaggccacgataaacctggtgacatacctccgcctggtaaagcgtagctcagagggtagcaacatgacagctctagttagatattgaagaactgacacttagagaagaagttagatttattttgtactatttaaatgttaaaaattaaatggtagctgcatatgtggataaaaccataaactgccttgctggaattgtgtgacaagagcactgagattgctttgtgagaaatctccctgttaaagagtgtccctgtgaaggtttggagttgccctgcctaacagaaatatagcgtgagccacacaggacacttgtaaatgttctagtagcctcattaaaacaagtaaaaaagaaacagatggaattaatacgaatactatatttaatttaatccactgtaggcattttgacatgtaatcaatgtcagaaatcattagtgagctattttctattcctgtttccattcttagtctttgaaatcttgcagcacatcttagtctcagcagtcgcatttcaagtgctcagtagtcacaagggagccacagcagctcctgtactggacagcaccagtatagggcatccattctcaacaggggccatgtcgcttccaaggaaacgaaaagtggttttggggaacaaaagaaatcttcttactgtttttgttttttttgttttttttttttttggtataaggcacagttatacatacagcatataaacagatattcagcctatctgcaatattgaagtgtcatgggggatgattagaaaaataaaaacctaaaaagcctcccttgcagggcaataatggaaaaagttgagaagcactgttatagagygcgtacttgaaggtttaatttccagtgcttcccataccagcttaactggctttccttgaggaagtcacttagcccaagccttggtctaggtatctgtaaaatgggaataataatagtgtctacctcttaagttattgtaagtattaaaggagaaaagccacgtgaagttcaccacagtgattggctcagagcaaatgttgagaatgtatcagttactattcagtcagggatttttataaaaaggtatactggtattagaagtgagtttggattagtggtgcctttgtcatttcgtctcagtttctttagtatttattattgacttatatcagtgcattgatgagcaaatcattgtaatgttaatgttgattccagtgactcttttttttcttgctgaattgtttctcattcttcaggatttcgaggttttgttaaggtcttttgctttgccccttgattgtttttgatttggcttaaagactctttagagattcatgtaaattactaaataacatcttcttaattactatattaatcttcactatttatgatataggaatgacagtaaaacgtattatatcaaataaagagcagcaagtagaaatttactgaacattatctgctattactaacttaagacaagtatgtttattggttttcttttttacagacaaacatttatcagaaaaaatacaactttaagtaaattagagttgaattcttagaagcaatatactcacaagatatggtttgcctgcattctaaggtcacaggtgttcttggaggtaaacatcatcctattcctgacccaaagcctcacctattgtaggcctacatccgtggttttgtaagtgtggcccctggaccaacagcatcagcatcaccatgagcttcttagaagtccagattttcagactccgtcccagagctactaaatgagggactctggagaaagagcccagcaatctgtgtttttacaagatctctcagtgaacttgatgcataggcaagtttaaaaaccacaatcttatgaaatacacacatgttatagatgttgatggagaggtaaaggattaaaatatagaccatctgagagctgtcttcatcattctacagtcaaaggtcccaagagtcrcaacccatctgcagctcctttgtcaatgaaggatggtcatatatttcaagtttcaaacctgggyatatgttctgacaattaagaatatttgggatctgggttgagtggctactttggtatggggagaatatagatactagcagctatgtgggaggtgggaaaacaagcaggtggaattgaaaatagacattcatatatttctgggtcagatcctactttgcatggcaagaatgccaagttccagctgatcttggaatgttagaggtgattatgaaggaagcgggcagggagccgagataaatgatcacttaacagaggaactgtggccggaagagtggggtcaagaaaacattgaacaaagaagggttaattttgaaggaggggaargaataagctagaaatggaagtatctgaaacaaactaggcagcatagaacagtgttcctaaatataaattttgaaaagttttttttttttttttttgagayggcgtctcgctctgtcacccaggctggagtgcagtggtgygatctcagctcactgcaagctctgcctcccgggttcatgccattctcctgcctcagcctcctttagaagttttattctgctcacttaaatatttgattgtatgggatccttgcagggaatcgccaccaagattttgattagaattttgtcagatgctctgataagaaaagaaactgacctgaaaaagataagttacacctacagtttattctaaagtcctctaraagtgggaatgtgtgctgtgtgcagcctgtcaaaacttttattttggcaacttctagaagtaacaaaacaggactgaaaatattgctatgatttattggaaacattggtgtgagctgttatgcatgcaatctcatgaaagaagcctaaactattttaaaaattagtctttcattataatatcgtttatttccaaatgtctttttttgacatttagaagtaattgggaaattttaaaattctagctgaagttccttgcaacagcacggtccttgtaaaagatatttttcaaactgcatgttaaggatgtatatatggaatatcagcataaaacagaatggcagttcctcaaaaaatgaaacatagtactatcatatgatccagtaattccacttctgggtatatactgaaaccaaggactcagatagatatttgtgcccctatgttcataacagcattattcacaatagccaaaaggtggaaacaacctagatattcatcagtggatgaatggataaacaagacatggcatatacataaatggaacattattcagctttaaacaggaaggagatatgacacatgctccatgaatgaagttttaggactttatgccaaataaaataagccaaacacaaaaggacaaatattatacaattttacttatataactacttagaatactcmaattatttaattacctggagtagtcaaattcatggatacagagagtaagactggtggttgccaggttataggggcaagagggaatgaggagttagtgtttaatgcatgtggcatttcaatttgggaagatttaaagttctaaagatggatggtgctgatggcagcacagcaaggtgaatgcatgtaataccactgaaaggcatattagaaaagagtaaatgttatgttctgtatattttactgcagtaacacagaatatcctgataaacttacatttagtattttgatacatctgtttttaattataatccactataataataatgaacatttttatgtggcaaacatgcccagatgctttaccccaaattatcctagctatttctcacagcaaccttctgagttaggtattatgattattcccttcttttttcagttgtgtaaagctatgcactgagatgggacaggcaggaatttgaacccagagaacattttccagaaccaggctcttacaataaaacttaatatgtagattaaaatcattcatactgctctgcccattaggaagaaaaaagtcccaaatgccaaaattatctctgcaagttctaattttcattacaagttcttttaataagctagatgatatgacacactatggttatgtgtatgaaaaaattgaaaaaactggcaatttatgtctctctaaaaaatgcaattcctgcaaaggcctgagtgtttcagtataaaaatccatatccagtggcatgtattttcttgtgcagatggtatgtctttctgaaaattgctaagagaaaagaacacatattttagaaatgtttaatattataattacaatgtatccaagttttgctttatactatgcatgctttaaactcagaagactatttacctatgatgttttattttagcatgtaaaattgaaatttgcaacaagtttgtatatatctttctgaatatgtagaagatggccttatttactgttaccttggaaacagtgatgctcaaatactatgttttactctattacaattaaaaatcattttatggaacaaatgtaatttaaaatactattcttaagcatggattttagttaatattaatcataaaaataagtaatgatgtttagtgttaaaattatttgaaaagctaaatatagatttttaatagaaaacataccttaatcaataaatcataatgctttttcctttacaagttatgtataagtcttctgattattaggaaagaacctcagttacataatggataattccatgaagttaaaaatgccatgtctaatttcttttgaaatttttcttaataattgactactttggagaatctgtacaattattacttcttaaataactcctggatagatttttctacagtgatatatgttgatattcatgtttcttcttacatttctaggactcaactattgttactccaattattttgaggactgaccctcagggatttttcttttactggacagatcaaaacaaggtaagaaatgaggtatgcctttcttacatttttcagtcgtttactactttgaaaagtatttatgtatcttatctatagaagaacatccatttcacagatcttttgcagtttatttaaaggttctacttttaaagaatatctaaggtattcttaggacttaggacgtttcaaagtcactagtttgaaatattagatttgctaaattctagagcaattggtatttttggttctgtttatattatgtgttaggataagaacagggaaatttgaattacatttggtgtagcacataattagtcagcgttactgatttaagtccccacccataaaggatgaagaaaaatgatgagaaaataacttttgacccaatagccttaccccttggcttttctttctctctcttttcccctgtgctgttcattaaggactctctcagaatcagcaggaatttggccctgataatttgttgatgtcagaaaaccaagaataaaattcctttagcctattccttcagttgtcaggaatttcttactaaattagctttctgcccacaatagcatgaatttattatctcatttgttatgaagccaattgatgattctgtactgaattattaaaaagtagaatatctgctgatcataagatttatttggagtttaatgggcagttagatgagaacactcatggaaagtggttattatttcaagcatcgttgccacagtcctacacttgaacctcagaggccacagaatatagaatgtttttgttctctaagttttgatatatggagaaatgggatagggtttactgagaatgctaaatacatactgaaaacaatagaatagtaatagtataccattaaaacagctggaacctccacagttacggatgaaggaggaacaaattgttagctctttcaaaactctacattagtttcttatatccaaagttcctggagttgcctgtcagctttgccttctgtctctgaggcaagctcaattatacctgtgtctggtcccagggccactcctgaatgagcctgtttacacatcattcaaaaggtgaatttcagtcttgttgtcctggaattagactctaaatcagtgtgccctggaaccatgtgtggctgtagaagtggaggtaaaccacagaccctacgctaatgtcaaaaattgtatgagtaagatttcctacttaacgctcacatttattattgggtgtgttaatcgctttggcttagacattctgtttggtttcctgctgttatgtgtaaaacaatggcttgcaagaggttttgttttttgggtgtttttttcttctcctaaaggatatttttagaactgttgaaactatattcatgaacgatgtacttataatgcctagagcatttctaaacgttgggtatttgtacgagagaccaaactgtcagtttgatttttcaacttgtagatcaagcttctataaaagcaacagaagatattctgggatttttaaataattcatggcaactcagttaagctcccctctagaccaatcatcaatatttatttccttaataaagaaaaagggtttaggaccaaaggctctttgttgcatttctgttgtgaacccagtattttgacccatgcttattttcaaaggtaggaaaatttgttttcattttttacacaaacttttaaatcttggttgcaatgctgtttatgaccaagcgaaacagataatgtggtagcaattccttttatcatgttattgcttttcttttcatggatattactcttacagttctagccaagagatagaaatagtaaattttacttttcactttctaaatgccaaagtcatctctcagtcatttatcagaatttggaggctcatttcttagtgatcatatatcttagaatccaaaagatgagaggatttaagaaaaaaaaattaaacttaccatgctttcaagtttgtcattttctttctggcttgaagcccagccctggaaccagtaagagtgattcatccacttttaggagatggacgactccaagtgatgaattagagtaaatgtgtgctagaagaaatggtgcatgcaaataaaagatggcatgccaagcttttagtggggatttttttgcataagatcatttgaaggtacatgaatgaatggtacattcatgatgctacttagagggccactttttaaaaaatattttttatctggcaattagttttaggaatctgccacatgtaccatagagataatctctcagaaaacaaaaaaaaaatgtgatacctttaagtttatcccttgattttatacactgtgttttccattggttgggaagcttgcattggtatttattgtaatatgcctctcttcttcctttgggcttcttccaatatattccctctttggtccacgaagcttataccaaagcacttggattagcaatcatctgaggcctagtctgctcagaggtgagcagaaatccctagcagaggggattttacaagtgttttttatttttcttttttatagcattggaggtaaatggccacattttatgatgttctatgcatgtccgtctcttgtcatggctacatcagatcttgtatcagagccacttatttcaagccactggctttcccctctgtagacaatgacatgctaccttccaaaacccctcctttgatttgtcaccacagaaatgataggtgacaaagaagacagcacagatgatgaatttaggaattaaaaactaaagctagcgagtcatttttaggtagcagaaatgtgctttagtgaaacactgacaggatgtttggagttggtggaagcagataaatatgaatatcatttttagggataaatgttcatgctttgtaccagctctggacttattttaataattcttttcactgtattgttggctctgtaaatcttattgaataaaatgagcaaaaatgagtttctgaatatgactattttaagcagagtggtttttcttgtgtaagtgtaggtgatgtgaagaggatgaatttatctgtaagtcatgggtgagaagggagtcctgcacagcctgagtacttgagaggtggcctacattaggctataacttttctttggatccgtgccatgtgaacactagaaaccaacacaggaagtgttagctgtgaaaaccatgtgaactataagaatctgctccaccggttttgaaagaaaggctaaagaagaaaaaagtgtcaatgttaaagagctaaccaaaacctatcctgctagaatatgaaaaaaattagacctttgccttgcaacctgatgccctgcttctgtgccaaggttggtgtaaaaataaaactagtcaccactagttcagatccaagaagttcaatatagttcagtaaacccttccttgtcttcataaaactggagcttgggggaagggaaaaggaacacatcattaaatttgaaaaggaatgggaggaagaacacacggtttgcatgaagaactcccattactttcttttttgttacaaattttatttgtttttaatattgtggataatatacaaatatctttttatctgtaaaatagtaaagcaatgtaactatctttaaactgcactctcccattgactccaatcctagttctctattcagagtcaactaatagtaatagcttcatggtttcttcctaggtctcttttaaataaatttgtgcatgtgtaactatggaaatatttcattttgttttgcttatgtccatttttatactaagtcacatcatattaaccattctacaatttcctttttaccatatagtgtgtctcagagaacttttcaagttagtacatgtgtgtctatatcattccgttaaattggcctatcttagggaatttttcatgttagtacatgtgtatgtatcacattctttcatattgctctatcgtatgttaaacaattgattaccacattttatttaagaatacagaagttctcactggtggattcttggtgtttgtctctaatttggggttacaaagaatcctataatatggagtaatagtcagctgtgtgtagccctctctgggaatatgggtcagggattccctaaggtaaatgctcagaagtgcgattgctgatttaaggctatacctatcctaaattataatgaatggctgtaccattttataaccctacctgtcttatatgagtggaactgttttcttaagcccaaccaacagtaataggaaatattttaatttttgcctaactgatgcaactgttatatcaccttgttttaatctgtcgttgcctgatttgctagtaaactgtgtatattatcatacatttattgatcatttcagtttttccttacatggattgcctatttatatctcttgcccttgtgtggacagttctctgtgtattctagatgtactcctttagctgttataaatgttgcaattacactcttcctgtctgtggtttgtctttgactttcttaacatctaatttatgggtaacaaaagatgacttgaagctttaarttttcatgtagttacattccaactacctccccactttttgcttcctttaagatatttctgattccttctcatcaccgttattaatctaggtttttaatccatatgtaatgtattatgaggactggtgtaaggtggagctctaacttcaatttcttcatatcactcgtagagctgacatttcactacctggtttggatggcccaaagatctgttatgttttaatgcctgtggactgctgggttctgatttcctacttcattcttatctcatttattttctgcctttcttactttgtggttcaaaattgtaattctttttgtttacccgtgatcctatattagagatttaaatttatacctgcatatttagtcatttctggagacttagggcaagaaagattggttctaccattcatgccatctgccatcttgttctgccctgtgaatttgcatgagacaccattctggatgtttgtacagagtgatgattcagtttccattaatggcaaccatagatagtcttctcttatgataaccttaaatttctacagagttcaaaagcaaagtttaaaagttaaatatttacataagtcacagtaacatttttcagcatgagtccagagttcaaaaatattttgaatgatgcatcataaatgtcaacaagaaaatctagtgatttcctattaaaaatagtctggcttccataaagaactactgggtaccacacatttcattaatgatttttagcagtggggctttctctttgggatatgcttctctagggtatcccaaaattgtcaactttgacccttcttgtgtatagtaaatgggataggtcattcaagagtccactgagtgattaaatgcaatgatgtagttataaatttagaagataagtgctatttattttatttggtagctttctctaaaagttgaaacaataacttacattatctgggaaaaaaaccagcaaaattcacgtgaggattgctttgtgagggctgggattgttccttggcctggagcagtgtgtcagtcattgttgactaagcagcagcatctggggactaagtcctttccttcaccttccttgaatttccttcaccagtattgatgatattaatagctaaaacagacacagtgccatacccacaccctcttcctcaccactcctgagaacataagccgggctccagtggctggccagtgcctgcattcttttgctttgtctggctactagaactcatgttgctacccatgcagctgcccagaagttcctggcaattcacactcaccctcaccaatgggattcagtggataaataccacagctccctcacctcttgggtgggataacttaaaggtgcattctttatattatatcccagaactctctagtgggattaagcccagttacccacagtggcaactggcttgaaaatgttccccttatgggcttccttcccttcctgtctcacttctccactcctgattgtgttctaaaaccacctctaaaataaactacttttactagaatccttatctaggaactgcttaatgcagatgcatagtgcttaacaacttaatatagatgcccccaaatgaagggttttaaaatgattccttggttaagagagattggaacatattaagtgaacacttttatttgaagccaagtctgattttcctaaaacagtcctaatttgggaagcccaaagctggttgaggaaaccagctttgaagctgtgacagatgtggtttgtcacagtctggctctgctgtgtatttaatgagtcaccctcagtgaatctctttaaaaatcaaagccttggtttcattatctataaggtgggtattactctcttagtgttgttgtgaacattcaatgtgtaaaatgaatgacttagcataacacctgctactttgtaaactctccatcctttgtggtggcttttattattgctacataataaacaatgactctctgaccaaacaattgtccataagtattagagaccacaaaaatgtgctgttttgaaaaccaagtgaccatttatttatgtatatctttttattccttttttcttcttcaaggcaacactgacttgttttctatttagactctgctgtggtcttttgatctgaaacattgaagcttaggtctgtttgggcaaataagatgtttatttatgtatttcataatgttgtgggaacagagccatggaaggcaaaagaaggatttattgtttaaaagactttccctctggggataatttgctaataaatagtccatcataggtgaaagtttcttggacccttggaaatttgaagcatcgtatggaacaacttttaagatgatttagaggactttgataggagaaaattgtattattcacaagaaaaattggacacaatcatggttgcctatgcctttttcctaagatagtcactttaggattgtgacaactacatgggcatcaggccactcctcttcctccctactgaccaagaccttagagattaaacttttagtgtttttgaggatagtttagccactaagccaaggttcagattgctgaggaacaaatctatcctcaccatatcaacttccaggttaagtttttccatttttattaacattaccttcttttcacttctgtgactcctcagagattttgcaccagtgaactctggctagcatagaatagacatgtcatgatgccttagcttatgtagacacaacatacaaataaatgttattagaatggaatcatttacaagttcttcttagaggatgtgatgtatgatttttttggtagaatttctaattgaagtgtagccttttaaagtatattttaaaattaggctagtcattttgagatggtttcattgcagcttctttggaatcatttttagagtagaaatgcrttagtataatttttatgtcacaatcaccacacttcattatgggcataacaacagcaatgcttgttttaatatattgtaaccagagtttagaaacatgtaataccacgaaaattcattactcctaatataatttaattacaaaattgttccttggtttcataagttgcatatatttagctcttcccactactttaggagaaawtaaattggatactttccatgctatgaagctattataatggaatatttgtactttttgatgccaaaaaatggttcgagccattggattggcagaatatgtgaaggaaatgcattctgcatattgttcataattttacttcctgttacggagaaaattcctttgactttgttacaaatagaatccccgggtacttggtattgatataatgccatgctcttttgtttgaattacaaatgttgtaggtagagtaggcatttttggttgttctgtagttcattttcttgccaactcaagattgttgatggtactgatggagacattattgtattagtccattttcatgctgctgataagacatacctgagactgggcagtttacaaaagaaagaggtctcacccacaacatacgggaaatcaagctgrgatttgggtagggacacagccaaaccatatcattctgcccctggagcttcccaaatctcatgtcctaatatttcaaaacaaatcatgcctttccaacagtcccccaaagtcttaactcatttcagcattaactcaaaagtccacagtcccaagtctaatccgagataaagcaattcccttctgcctatgagcctgtaaaatcgaaagctagttactttctagatacaatggaggtataggcattgggtaaatagagccattccaaatgggagaaattggccaaaacaaaggggctacaggcctcatgcaagtccaaaatctagcagggtagtcaaatcttaaagctccaaaatgatctcctttgactccgtgtctcacatccaggtcacactgatgcaagagatgggctcccatggccttgggcaactccgcccctgtggctttgcagggtacagcccccttcctggctgctttcatgggctggcattgagtgtctgtggcttttccaggggcatggtgcaagttgtaggtggatctaccattctagagtctggaggatggtggccttcttctcacagctccactaggcagtgccccagttgggactgggggctccaaccccacatttcccttctgcactgccctagccgagactctccatgagagcaccaccccagcagcaagcttctgcctggacatccaggtgtttccatacatcctctgaaatctaggcagaggttcccaaacctcaattcttgacttctgtgcacccacagactcaacaccatgtggaagctgtcaaggcttggtgcttgcactttctgaagccatggcccatgttctatattggcccctttcagacacagctagagtggcagggatgtagggcaccaagtccctaggctacacacagcacagggacccttgttccaacccacaaaaccattttttcctcctaggcctctgggcctatgatgggaggggctgccatgaagacatctgacatgccctggagccattttccccattgtcttgaggattaacatttggcttcttgttacttatgcaaatttctgcagccggcttgaacttctcctcagaaaatgggatttccttttctattgcattgtcaggctgcaaattttctgaacttttatgccctgtttcccttataaaactgaatatctttaacggtacccaagccacctcttgaatgctttgctggttagaaatttcttccaccaggccgggcgtggtggctcatgcctgcaatcccagcactttgggaggctgagttgggtggatcacctgaggttgggagttcggaaccagcctgaccaacatggagaaaccccatctctactaaaaacacaaaattagccaggcagggtggcacatgcctgtaatcccagctacctgggaaggctgaggcaggtgaatcacttgaacctgggaagtggaggttgcagtgagccaagatcgtgccattgtactccagcctgggcaacaagagtgaaactccatctcaaaaaaaaaaaaaaaaaaaagaaaaaaagaaatttcttccaccagataccctaaatcatctctctctagttcaaagttctctaaatctccagggcaggggaaaaatgctgccagtctctttgctaaaacataamaagagtgtcctttgctccagttcccaatgagttcctcatctccatctgagaccacctcagcctggaccttattgttcatatcattatcagcatttttgtcaaagccattcaacaagtctctaggaagttccaaacttttccacattttcctgtctycttctgagccttccaaactgttctaacctctgctttttacccagttccaaagttgcttccccatttttgggtatcttttcagcaacaccacactactggtacaatttactgtattaggccgttttcatgccactgataaagacatacccaagactggacaatttataaaagaaagaggtataataggattacagttccacgtggctggggaggcctcacaatcatagtggaaggtgagaggcacgtctcacatggtgtcagccaagagaaaagggcttctacgggaaactcccatttttaaaaccattagatcttgtgagacttattcactatcatgagaacagcagaggaaagacctgcccccatgattccattacctcccaccaggtccctcmtacaacacgggggaattcaagatgagatttgggtggggacacagccaaacctatcacttgtcaagctctttctatatttaatcagcaagacaagtctctttttgtcttttgggaaaataaatttagattgatagttggattatttaaacatttatcacacacacacaaaatattaaaataaataatataattactttcttccactttaaaatattttaaatttactttaagtaatttaaaaggcaaaaatgcaaactttgaacaactgacttattaggacgttggtacctattataaataagtttctcaaatctagcaaagtatgtaatattcactaatttactttgcacatacctttttatcgttgttatcattatccttgttatccttagcatcaccaacagcaaacacatatatgctgttttatccttgccagacacaattctaataatatatagtctgtatatttatagcatatacatatttttatacatatatttatatagtatatgtagcataggtatacttatagtctataatagtatgtatatagtgcatatatgctacatatatacatacatagtgtgtctatatgccgtgctacatatatacatacatagtgtgtgtatacttacacatatatatagtgtgtgttaacagacctatgcaatttcgtcatttccataatcctatgaatgacagtgctactattatctacatttaaaagtgagtaaactgaagtgtgaacagaggttatgtcatgatccctggttgtacagttggttaatggcagagtcaggaatagaaacaacagtggcagtgcagtctggctctatgttctggctcttaactttttgctgtttaaagaacctgtttaatatgtaaagttaagtttgcctgcaggatttttttccttggatttgtttgaaaaagaaacctcagtaggcctagtacatttgctaggaacagacaaactgtatgaagaaggtattctcaagttgggctgcacaatgaaatcacagggggagcctcaaaggacgctgctgcctgggcttcctgtctccagagaatctgacttaattggyctggggtgtggtcagaacattggactttttttttttttttgaaagctcctcatttgattctaatgtacagccaaggtgaacacagatagaaagcaagctgaccttacaaattaattcagtaaacttcctgaaaggatgtgctcactttgcctttcctgcctgtgacgtggcctactttctactcagaagtaacactccacatgagcaactacaggccctaccagattctgaattatttgactatgactggataatattccttacactgtgcttagtaaggcaataaattactaggatttttttagaattagtctcaatatctaaggttgaatcaaaatagtttttttattatattctgtcgatgaaaatttttttaactttccattccctgaatgttacaggtattagctgtttgttttatcgttaccaaacatgtcctcagaattcaagtcctgtttattaaccttatatttgtgttttttgagacccttgtttagatcacagtactgtgtaaattccatacttaattaaattagctgcacccttgaatgagtgaatgtggttttaagaatgaccttatataactattttattttatagctaatttttcatttctgggatacaaaggcagatgttatcttattaaattgtagcattatgtcatttcttatcaatttgtaggaatccttccttaactgagacatacactcaactgggcaaaccagagagagctagataatttcaggtgtgataggaagtttgcctttcatcacctctacatgatacatttcagaatagtaaaattcacatttctcctgttagaatgtttggttttttattctgcttctatagggaatggggattgtggtaatgatttttcatgagatttctccctggcattgtgcaaaactccacttaggaacagtggtctgaaaattatattgcatcacggcaaacaatgcacctgtgtgaaatgaatgcttaagtgaaaagttttatgggacagagctagttgctatgctaagaaactaatgactgtgctggtatacataatggattctatttttagatgaacacttggtcctatagcatggcttcattatgcaagaggacagaagtttcagcgttatattgtgaatattgagacattaacatatcagagtatatgccttcttagatactaaagtgactttttcatatattttaaccctgacatagttcataactagaggaaaaaagtaaagaacaaaaacagaatttcaaaataatttcaggtttctggtgtttgtaggttgagtttttccaacagttgactgcaaggaaaggattcaagttcaagtggtttatttgggaggtgaccccagaaagtgtgggcagggccatggggaagtgagataggcaagggaagacagccattaaagggtgcactatcaaataagttaccatggtgtacaagtgaagctccgtcccattggagagccctgggagacagtgcagagaggagagggagcagtggtatacccaccagttcctaataatcagtgactgggggcagctctctcaggggttattttctcagctcttctgccagcctctcctggagactgaggggcttccaggccagtgggccctaggctttgagaaatccctcagacatagatgcagctggaagctgtccgttggcatacatgaaaacacatgggcaccaccagcagcaaccactctggtgrctttaatttctggtaagtcagacttttaaaatctatatcgcagtgtgcaaactggagcctgcacccattcacgaacagttcttgcttggcctgtgcaaataattaaatacataaacatgagttgccagcatttaaaaatctgcaggttcatatacagatctggatttctcaaaaaatcagaaggcatggaaatgccggccgacatacccccatggccacatttggctggggcagtgcagcagctgcctgctttagacagggtgtgtggtatgcaatctgccacatttcccaccaggctagcctacctaatttacatgaacttttaagctcatttagatgtttgagtataaatatcgggcctctatggtaacatcctatactggaagcttcaataagctaatgattgcaaagcttcatatggaatgaggttaattctgtcacagtgggcctattggagtgctgtggcataaagactagatttttacagtggaaaaatggctgaagrtcagcatatccaggtcttgctcgtaatggccataagcaaagcaattatgctccaatcccaattcttctctgtgatgtatggatctaaagtgtaggagccctgaggtccctctctgacttaaaaggctattattccaaagtgactttcaggtgtcattttgctaggtaagatttataaatatgagtccttggcaaaggattttcgtgtcgaattgggccattaatctagggaaaataagaatggtggactccaggacaccaggcagaatgacttcccttggttcccttggttgaatgaatgggattaacttcacccccagatcaaggcagtgagcattgactggtttagccaaccaatgtagtccacccttttctcaccgtagagctgtgctgtctcatacagtagcctctagactcatgtcactgtttacagttaagttttaattaattaaaattaaattaaaaattcagtttctcaatcccactacctacctttcaggtgctcactagccacctgtgtccaggtgccatttccatcattgcagaatatgttattggacatcactgcacagagcttggatcaggaatggctcttcagagccaatgcaaagtttcttgcaataagaagcttccttgaacttgtggggaaagaaactttccttctttttctggattatgtgctgcaaggatgtaatatctggactcacttttgttatcttgttcccatgaaagaagatattggagtagctcagatgccactttgggagctcaaaggggaagctagccctgcagaagacaagccagtgaagaaccaagtccttaatgatgtcatttgagataccagatcagtccatttcagttccatgaatgaatcaatccccttcataggctatgccagtttaagatagagtgtttgtccctttgcagttagaattactgactgacacattggacaatcatttatttgaaggaaggcagagactcaggtgttaaggatccagctaacatctggcccataaacttgaaagagaaataaaagcgggaatagaatgtgttaactctgtcagtggctatcattccctgtacaagacattattgttagttttgtatagttttctaatctgggctttaacatttcaaggataattttagtggcttctagccatcatgaggaaagaacatgtcttgagaaacatggggaaaattgaaaactgtacagagaatataagtttttggcaatgttgtatgttaacctaatagccttaatggtaccatgataatttctgggtaaggaaagtagaacttattaataaactgttgtgctgcagacattgtgccaaggtaccttatgtggacaaactatcacatgaattcatgaattgattgatttttttccattttgcattgaggaaactgaggctatggagagggtgatttttaccctggaagactctctctaaccctgccaatttagaatgaaaccctctcttctgttcttctggaataccttgtgccttcctttaccttagcactattaatgctatgttgattctgtctgactctttttcctttcccagtggatgatgaaggccttgaattcggggactttacctcatttgtttggcattttgaatacactgctaacatacagtcactgctcaatcgatgtgtgtcaaatgaatgagacttacaaaggctgtgcatcttgtctaaggttacaggttactaaatggtggaaagccagatctgtcaggtccaaagccaatgacctttcagtagttcattcattaaaaccctctccttcttgtttaaatctccagctgtcttactcttagcagtttatgtgacctctgcctcctggagaagagagaaaacacagtattccctgccaccagacctaatagcacactttcatttacagctgctttcctctgtctccctcttcctttcccagcccatcctttccactttgaccctggaccctagcttctcaatgatttcayactaaaattgatcccttccctttcttatgttgtcaatatttcccctgtaaccagatctgtacatcaatattaaacatgacatgcttacccatcttaaaagaaaaccctatatcccctcttgaccctcactggctacttcctttctttctcgctttcactcatagcaagcttcttcaaagacctgcctatgctctccccattattctcacctttcaccaacttttcaatacatatcaacctggattctgtacccactactcctccaaattagtctttcttaacccatcaatgaccttcacattttaaaacatgctggccatcttgagctctgtggtgcttgattatttttatataattttacattgttgataaccccattttcctcgaaacactttcttttcttgactttctttttctcctacctcttcctacctctccagccacatgttcgcaatctactttactggctgtaagttgcagtccttctctactcacatgttagggaatctcacctgcacttaaaacttattttaccatctggatacattggctcccaatttcatatcaccttccaataccctgttcctgagataccggaaagcaaacatttccaagattggtatcatgttcttcctcccttaaatcctgacctggtcctggtgccttattaaaggtaccacccttcacagagtggcacagtcctgaaccctgaaagtcttccttaacaccttcttttccaccttccctccaagttcttggcccctttccttttgtgctccgtccacaatagccgccttctgtttccctagacacggcatatttctttctgctgaaatttttcacaatacttttcctctgcttggaacacatgttttctccccatggattagcccctcccctgcttcaccacacttctcacagttgtaatcaaatgttttttacatagttatgtaatatctagctcccgtattaggtttttgactcaatgagagcagagtccagaggtgtccttgtccgtgtttaagacctggctctcttaatggggaaagtaacttgtagcattcgccaatttccatggtgtaaatactgtagtgtctgatttcgagatatggatacttcatcactgaacacagatttggaaagtgaagggtacagttggctctcataagcttacaagctttccccagctcacccccagggcagatgcttgtctgtcttattgactgctgtattttcatgagttagggcagtgcttggcacattgtaggaactccaagactattagttggaggagtgactgcagtgtttttattaccattggaaatatagtaaaaagtgctgatgtttcagagaaaaatgaaataattttttaaattttagaattggacccagcctgaaagtttatcatatgccatccctttgtttttcttcattagaattgagggtcaggaagtgagatctgccacaatcacatagctacctggtaaatgagcccaggttaaaatgcacatcttttaattaccgaccaacactccttctactgtagtgcattatcacttctaaaaggaaagtaatttctttccactagtgatttagttcagattgcattattagatagtgacgtrgttgaatgtataattaaatctgctttacaaaagaaaaagcagtattttatcatttctttttaaattatgagttgtctcttaagagggatttctcttttatctttttcttctttaatattctgatgtacttatttatagaacaaagacattagtcagcttttgtggtgtagcaaaccaccccaaaacttatgccttaaaacaacaaccatttttttgaggtcacccttctttgggttaacaatctggtgcaggctctgggggatcatttttctggtctcaggtgggctccttctggcttctgcagctactcatgggttggatgtgtggctctgctgatatggctggcctctcctgtctgaggcttcagctaggatggctaggctgacttgtatctgtcccatgtggtctctcatcttccaacaggctagtccagcttgctctggtagttcactggcagagttctgaaacagggtggaagctgcaaagccctagaagcagaattgccatactggcacttctgccacattttctatgccaaagcaaatcattcataggttggggaaatagatgccacctattgatgacaagatctgaaaagtcacactgcaaagaggcatggttacagtgagaagaataatttgtgactgtttttgaattacatacaaaaaagtaatttcttcttcaaattagtagaagattgtctctctgatgggatagaactgactgatagcttcctcatccttctgaaatattaaggcaatatgaagtaccccacctggacaattgtgttaattatatatgcccaatattagagcacttacgctgcagtgaggtgggtgtctctcaccataccctagacttggaggtccctgataggtgttctgaaagaagatccctgtaaggttatagggaagtaaagccgcatcccaacatggtgcacagacagcagcctcctagcaacatctcttaaagcagatggtgttttcagacatattgaggaatgaggtgggttgggagcagttgcaacaagatagggaaaccttaagtcatctttgaggatactagtttgttgtgctattttttttcttcctaaatgatttggaagtgatttttctgtgcctgatgtagtcttttttttttttccctttctttgtatcctgtgttgggaaatggaaataattcaaaatctgtaaaaacactgggaaaatggaaattaaactttgggattctttactgcagaaaaatgatgatgggaaatgttcttcagtagagaggtagaaatcatttcagaccgcttctcctagccggggcccacaacatgcatttttctgggatgaaaacacatgagtttgaccaaggaaaagtttggtagattttgtcaatgaagcatgaaaagggatcagtctttactctgagctcatyttttttttttagctgagtgtgctcttggaagatgcaggcatcagtgtatttatatctgggtcaacagggcatgcggtgaaggggaaggaaggccattacctagtgaatgtatattgggtggggagccactgaggttaaaaaattcagcctactgccatctctttactttgggctgtatggaagttgttcatgacctccataattgttcttttgtaggatamcctgtatcagattatagactctgaaatccaactcccagggttcaaaacctgccttgaacactatgtatctctgaggaagacatttaactcattctgagcttccattttctcttctacaaactagaaataataaataggaatcccatgaggattaaatgagataacacatctgaaacacttggcacaacacacatgctgataggtgcttcacaactgctactgatttttaggataaattttagtaaattttaatatatattgtgtgaatctgaactaggacaggtattcggatacttctgattcatattctgagtctttttgcacccaattggttgaaacatcagggcccccaaggaatgccagtgtctcaggttgcagataatactgccaagttgcagataaatccctgattggacaactatctaagagttagtagatccactcagactcccaggaacttggagtgcagttttcgatgcctgaattcagagaggacagggtgcgtggtgcatgtggcctagtctacaattgcttctggcctattgaatcttaggaatggaaggctgaaggggagaagatagtttgtcatcaaaactaaggttctggacaaatttggagggctcagttgctgggctggccctggagaatgasactgaattctcgaccctttgaaaacaggtgccatgtttgatttctttttgtgtcagcaatgcatcttctattaaaagaatggcattagggtctcagtcaagatggcctgaggcattcagttaagggtacactgatatattcctcctgctggtcagtgtcaagattctgctcctgttctctttcatccctgtgtacccatcttagatatttttgagtgcccatgatgtgctctttgttgtagtatctgagatctctagttggggaaacctaccaaagtaataaactattctatccattgttaggacaaataggaaaatcttactgactctaggagaaaatagcaggtatttctttctttctttttttttaaatagactatttcaaatcctaaagtagttttacttgatatttacagagcacatgtcataaactctatttaaaaacagaggtaaaaagggggaagcactgaaaaatataactcgagtaatcagtttcattcaaaatgtaagtgggagaatcagaatagaaaataatatgatttgcagatttattttaaatcagatctaaatttttagatttgcaaggtctgagtgaaaaaaaagagtgtcattgcttagaacttcttaggaaaacaaatcaataaatctgtaggaaataggctgtgtgctgaaccttatttggtttctgctttttgaccgagragaagcatattatattgaaagggtatatacttggtacatagaaggaaggcgacctttaatctctgactttatataaacataaaaaccgtgaatagaaaagactgagcctaggaagaaataaaaaaggagccctgaatctatgaggctgagccatatgaaacagccataattgtaggccaaaaatggccaaacacaggcggtttctcataggccaacaatacagtcgttctgagagagcaacagcattacttttgcttagttgaccatctgattatgacagtttagaacctcatattgatgtggcaaacatgagttaacttctctattgttaatggatatgattttattctaatttagatctgatttaaaataaatctgcaaatcacattattttctattctgattctcccacttacattttgaatgaaactgattactccagttatattttcgagtgcttcccccttcttacctytgattttagatagagtttatgacacatgctctgtaaatatcaagtgaagttattttagtatatggtgcaacattttataaataacaagaaagagtatgctactttcaacaatatcatgtttaatatacataaaatatataagcaygtaaaatatatgtaacatatatacttaaaatgcatatacattatatacatttaactaagtacaaatataaatgttgcctaagaggtaagcttcaaattggaatttgagggaaataagcttcaaattcatttctcatatattcatcattttatttgttcatatgttatgttttttgttgttgttgtatgggagaggtactgatttaggttacttcttttgtagtagaggatggtagttaaaaatacatactctgaaccccatctgcctgggtttgaatcccagctctatcccttgtgagctgtgtgattttgagtaagtgacttaaactttctgcacctcagttttaatatatatgaaaaaaggataatattagtactcccttaaggttgtgttagggattacatgaattaatataatgtgtttggatcagtgcttatgttggaagcactaggtaagtgtttattattattacttctcattgtagtctcctttatgaaacgtgtgtgcatagcctgtctggaggatgactttttgtcttttaaagagagaagctgtactacttctactgtaccagaaattcatctgagagcaggttactttctcattgtaaagtccatgcaagccagataaacctatagggtagcacttccttaattagtttacaatttctgaggataggttggtgggagtaaactgcctctgagtgttcacttctctgggaactgtcccgtctgttgttgcgtatcatatgttctagtgcattttttttcagttatgtcctttcccacaaagcagtttggtgtaaccactgtaatcccagtaagctatggttggggtctatgtataggaatgtgcaccctgaaattcattcacttattcagcacaattttattgagcatctactaagtgttaggcactctctgtgtcagatatattatagataatatacaactacctaaatgcatagtaagcaagatattgtaccattgagagtagtaagagtgatgagaagagttcagggagggagtagtggtaactgttttacataggtactcaagaaaggaatctctgataagctgatctttgagcagagatttaaaggccgtgagggataagccatgtggttggttatctggaggaagaatgtcctaagcaaaagaattggtaaatgtgaaggtatgtgacttctgggatagtttgacaaacagttcaagaggccaattggctggagcatagtaaatggggattgggatcagtagtaggaggtgaggtcagagagattgctgaagacaagggcgaattatattaggtttttacaaccattgtaagggctttggcttttctctgcatgaaattcaaagatgttataaagttttaaatacagatgtgatgtgattggacttgtgttttttaaaaaaggatcactgagacttctgatctatacaagatggccagattagatattggacctgaacatttttctttgttcttcttccctaagtacaactatacatcccagacataatgtgagaggcaaccagcagaggactctgaaaggtgctaagaggaaggcagactggtttctggcatcaggaccagagaagcagcatggggcagggtatcttatgtttcccccagccagtaaaagaaggtgatcaggaccagcattttacaacctgtgacctagcaacagaaggtggttcaggaaagctccttcttttcatggagtccatccagtgtcaacagggaagcccagcaccattggcaaagggatcagtcgggaattcagttatggctagccatacatgggcagggtaaatgctcttcttcctgaccaggcctgggacttctccctctaccaagagatacaacacagggtcaccaggttgtaccagcaaaagggggcccatgcccatgacaacaagcagcctggcctgggatacctctttctccatgggtctgaaactcctctctcctgcccagagacactgagactgctgagtgacaccggtaagaggtatttcactacaacaagcgcttggcccatgaagcctatttgtctccatagacccaagatgctattctctcaccaagagacactgtagggtcagactgaaaaaaacctgtcagccctctcaggtacagggacctctggaagcccctctcatatcatctaaaccaagcagaccaaaataacacagcaaaggttctgaaaattaaaccatcggtggaatgacaacccacaaaagtagaccagaactcatgtgataaacttaaaccagggtgactacctgctaaaaggaaagatttgaatagaatttagtcttctaatatacaaaaataaaacgtccaggatacaactgaaagttgctcatcatactaagagctgagaagatcatggcttgagtcagaaaaatttagtcaacctcaagatggatcagattttggaattatcttacaagaattttaaagcagccaccataaaaaatgtttcagcagtcaaaaacaaattattttgaaacaagtgcaaaaatagaaaacttcagcaaaaaaatagaagtttttaaaaagaaccacatgtaaaggataaaactgaaaaatacaatggccaaaataaaagaacacaataggtgggttcaatagtagagtggaaatgatagaagatagtgtcagtgaattaaggacacattggcagaatgtactcaatctgaacaacagaagagataaaatagattttaaaaatgaactgagctccggggacctgtggaacaataacaaaatttctaagatttctatcactggagttgcagaagagacccaggggaattgggctgaggaatatttgaataaatcatggctgaaaatgtcccaaatttggcagaaaaacacaacctaagaatctgagcgcacctcaaacaggatacaccttagcaaatctacaccaagatacatcatgtgtaaacttctgaaaacaaaggcaaaggaaaaaaatcttcaaagcagactaagaraaatgatgcattaactacagagaagtaccaattcaaatgatagcagtttcttatccggaaacatggagaccagaaggcagtgcatctttcaatggctgaaagaaagtatctgtcaacagtgacttctgtgtccagtgaaaatatcctcctaggatttctctcagatgatgaaaactggaatttgtaagtagcagacccacccattaagattgactaatggaattttataaaacagaaaggaaagtatagaagaaggaaacttggagtatcagaaacagaaaataatggaaagagctgaaatatgtgtgcaagcaatagaccatcctatgcctcaacagtttgtaaattatatttgatggttgaaacattatgttagcatccgatactcaaggcaatgctatttaaaagtaggagtcagtaaagggacctaaatgaaagtaagatgatttccactcttcagctgaagtgtaaaatattgatacccataaaatgtaataaatcacatatgcatattgtattaggccaggtgcaagggctgatgcctctaatcccaacactttaggaggtcaatgcaggaggattgcatgaggccaggagtttgagaccagcctggccaagatagcaaattccatccctacaaaaagttaaaaataaaaataataaaataaataaaaaagatgggtgtggtgacatgcgcctgtagtcccagctactcaggaggctgaggcaggaagatgactttagcacaggaaattgagggggcagtgagctgtcactgtaccactacactccagaatgagtgacagagcaagaccccatctctaaaaaatattaaaagtaataataaaaactgcaattacttttgcaccaacctaataacaaacaaaaaccttacacttaaaaaatttataaagaaatcaagataaaatcctaaaaaatatttgactaacctccaagaaggcaagaaaaggaaaacagcagaacaaaaaccagagtaaataaatggaaaacaaataataaaaaggcagatgtaaactctaatatgtgaataaataccttaaaggtaaaagcaaagagaacctagatatagacccatacacatatgctctgctgatcttttacaaacatgcaaaattagttcaacaaggcaaaggacagtattttcaacaagtgatgatggagacattggatattcataggcaaaaaataagtaaaaataaaaaaaaaagtataaaatgaagttcaacataagcttcacacttcatataaaaatgaattcaaatagatcctagatataaatctaaaacataaaactgtaaaacttttaggaaaacacataggaaaatctttggaatatggatctaggcagagttctttgacatcaaatccatgattcataagaagaaaaattggatctcattaaaattaaaataatttctctgtgtaaaatcctaaaaagaggatgagaagacaagctacagactgagagaaagtgtttgtaaaccacatatctgccaaaggacttgtatctagaatacataaaggaccttcaaattcacaggaaaaaaaacaaaaaacaaaaaacctaaaccaaacaatccatttagaaaatgggtaaaaggtctaagtagacaatccactaaagaggatacacagatggcacataagcatatgaaaagatgtcgccttcattagccattagggaaatgcaaattaaaaccccagtgagttctcactgcacacctatcagaatggctggaattaaaatagtgacattaccaaatgctggcaagggtgtggaggaacagatcaatggtaggttaaacagtctggcagtttcttataaaactaaacatgtagttactatatgatataactattgtattatgaagcgttgatcccagaaacatgttttaaaagtatgttcacacaaaaaatctgtacacaaatattcaaagcagctttattaataatagcccaaactgaagatagaccagatgccttcagtgagcaaatggttaaataaagatggcatgtccatactgtgacatatgctactcagcaataaaaagcaatgaactattggtgtacttagcctggataagtctccagtatgctgaatggaaaaagccaatctcaaaaggtttcatactgtatgattccatttatataagagttttgcaatggcaaaattttaatgagggacaattttgtgtctgtaaagtgttaggcacaggcgtaggcagggagggaggctgctgtagttataaaagagcaacatgaggaatgcttgtggtgacgatactgttctatatcttgactgtggtgaggaatacatgaacctacagatgataaacttgtatagaattaaatacacacacatgcacacccacacacgcaagtcaaacgggggaaatctgaattagattaatagattgtatcaatatcaatgtcctggttgtgatattgtactatagttttgcaagatattaccattagggaaaattgggtaaaaggtaaaagggctccctctatattattacttacaactgcatatgaaatctgtaattatctcaataaaatttcaatgaaattaaaaggaacctccagagtagtgcctgaggactctcagtattagccttgacctcagaacatctctagacaaaagtgatagaatgaatattactttattaagagtttttcataatatattatcaccactcccttctcagtaatcagtagtataatattatgtttatagaaaaatatctcatggtatgtcaatgtttgttggtattaaaatcaaattaaaataattttacacgagagtgcaaatggctgacagatttaactcttatgtttttgtccccccaaaaaatcatatgttgaaacctaacccccacagtgatagtattaaaaggtgagtcttttgggaagtgattaggtcatgagagctctgccctcatgaatgggatttttgccctaataaaagaggcttgagagtctttttacctttccaccacatgagcattcatagaaggcaccttctgtgagaaatgggcaatcaccagacgctgaatctgccagcatcttgatcttggacttctcagccgccagaacagtgaggaatacatttctgttgataaattacccagtctaagtacggcattttgttataatagcctacctggactaagacgatgatgttaattcaaataaatatgactgctctgggagaaatgattttgggcaatatggctttattgctgctgtttctattctaggctgctactccctcctataagacacaagggcagaaatcagcaacttcaccctctgtttatgaagggtgctatgcagggcccaagtattattattattattattactatttttaaaattttactttactcatgtttgttctggtatgtgattcagctttttaaaaaacttttatttattttcaggggtatatgtgcaagttggttctatagaaaaattacaggtcccagggatttgctgtgcatattatttaatcacccaggtaataagcatagtacccaatagatagtttttcaatcctcaccctccttccactctctactgtcaggtaggtcccggtgtctattattcccttctttctggacagaaatgtgtactcaatgtttagctcccacttatacatgagaacattcgtgatgtttggttttctgttcctgcgttagttcacttagggtaatggcctccagctccatccatgttgctgcaaaggacatgatctcactcttttttatggctgcatagtattttgtggtgtatatgtaccatattttctttatccaggctactgttgatgggcatttaggttggtttcatgtctttgtttttgtgaatagtgctgcaatgaacatacatgtgcatatgtctttatgatagaattatgtatattcctttgagtatatatccaataatggggttgctgggttgaatggtagttctaaattctttgagaaatagccaaactgctttccacagtggctctgaactaatttacattcccaccagcagtgtataagtgttttttgatttttctgactggtgtgagatggtgtctcattgtggttttgattggcatttctctcatgattagtgacattcatcattttttcatgtgcttgttggtcatgtatttgtcttctgttgaaaagtctctgttcatgtcctctgcctacttttaatggggttgtttgctttttcttgttaatttaaatttgttatagattctggatattagacctttttcagtttgcaaatgttttctcatattctgcaggctgtctatttactctgttgatagtttcttgggctgtgaaggagctctttggtttaaattagatcccatttgtcaatttttgttttcgttgcaattgcttttggcatcttcgacacaaaattgttgccagggcctatgtccagagtgatatttcctgggttttcttcargggtatttayagttttyggttttacgtttaagtctttaatccatttggagtttatttttgtatatggtttaaagaaatggtcctgtttcartcttctgcatagggctggccagttatcctagcaccatttattgaataggcaatccattccccattgcttgttttgtcgactgtgtcgaaggtcatatggtagtaggtgtgtggctttatttctgggctctctattcggttccattggtctacgtgtctattttgtaacagtaccatgctgttttcgttactgtatagccttgtagtatagtttgaagtcaggtaatgtgatgcctccagctttgttcttttgcttaggattgctttggctattcaggctcttttttgattccatatgaattttagaatatttttttctaattctctgaagaatgtcattggcagtttgataagaatagcatcgagtttgtacrttgctttgggcagtatggccagtttatcaatattgactcttcctatccataagcgtggaatatatttctatttgtttgtatcatctctgatttctttgagcagtgttttgtaattctcaccatagagatctttcaactctctggttagctgtattcctaggtattttattctttttttgtggctactgtgaatgggattgcattatttatttggctctcagcattgatattgttggtgtatagaaatgctaccgaatttcatacattgattttgtatcctgaaaatttgctgaagttgtttattagatcaaggagcttttgggcagaggcaatagggttttctaggtactaggtataaaatcatatcgtctgcaaactgagatggtttgacatcttatctttctatctgcatgtcttttatttctttctcttgcccgattgctctggctaggacttccagtactgtgtcgaataggagtggtgagaatgggcatctttgtcttgttcttgtcccagttctcaaggggaatgcgtccagcttttgcttgttcagtataatattgactgtgggtttttcatagatggctcttattattttgagatatgtgccttcaatgcctagtttgttgagggcttttttttttttttttttttttttttttttgagacggagtcyckctctgtcgcccaggctggagtgcagtggcgggatctcggctcactgcaagctccgcctcccgggttcrcaccattctcctgcctcagcctcccaagtagctgggactacaggtgcccgccactacgcccggctaattttttgtatttttagtggagatggggtttcaccgttttagccaggatggtctcgatctcctgacctcgtgatccgcccgcctcggcctcccaaagtgctgggattacaggcgtgagccaccgcgcccggcctgttgagggcttttaacgtgaagtgatgctgatattttttaaaagcctgtaatcgtgtggtttttggttttagttctatttatgtgataaatcacatttactgatttgcatatgttaacccaattttgcatcccagggataaagcctatttgatcatggtggattagctttttgatgtactactgaattcagtttgctagtattttgttaaggatttttgtatctgagttcatcaaggatattggcctgaagttttccttttttattgtgtgtttgccagattttggtagcagaatgatgctggcctcacagaatgagttaggcagaagaccctcctcctcagatttttagaatagttttagtaggaatggtaccatattcccagggctatataagaaacagagttgaatttggttgaatttggaaacagagattaaggaataggccaaaagtgatgaatacaggggcatgtaatatactttcaggaatccaaagtccagttcattgaaaaaaatgtatttgtaaatttccttttaaattccaaatgaaaatttgggttaactcagaagaatatatgccatctaggataacaataaatgagcctaacagtctttaactatctggtgatatgggattgcctgaatcatggtacctctaaacattgcaacccttaaaactcatgctatgtgtgaataattaatgccacaggaaatacttatgagacattaaatttaaaaaaggaattgcatttgtcattttttcatacattcataatgtaaaagtgtgtgtgtgtgtgtgtgtgtgtgtgtgtgtatgtatgtgtgcgtgtgtgtgtaaagaagaatatgattgggaggccgagagaggcggattacctgaggtcaggagttcgagaccagcctggccaacatggcgaaaccccgtctctactaaaaatacaaaaattagccaggcgtggtggcatgcctgtaatcccagctactcgggaggctgaggcaggagaattgcttgaccctgggaggcggaggttgcagtgagccgagatcatgccactgcactccagcctggccgatagaatgagactctgtctcaaaaaaaaaaaaaaaaaaaaagaataagaaaaaaagactagaaaaatgtatgtcagaattgtaacagtgctttgctttggggaatgctaggaatgtgtgtgggatttagtttctttccaatgccattgtgcatcttcagatttctttatgatttctttaccttattgttgaaataaaaaaagcaataacaatacacaattattttttaaaaggaagaagtttaagcaaagggaaaactagcatatgacaaaatagctgaaaccagaggtagagcttataagccaatatgccaaaagaccctgcacttggcctttttagtccaagtgatctatattttagctgagtttcctagaagtatatacaaggattctcagtggtgactrgaatgaacagactagctgttcaggaatctaatgcctaccatagctattaatagctaccactggctgttcgtggtggctcacacctgtaatcccagtgctttgggaggctaaggcaggaggatcacctgagtccaggagtgcaagaccatcctgagccacaaaggatgtctacaaaaataaaaataaaaaatatctgggcatggcgaatcacatctatagtcccagctacttgggttggtgaggcagaggatcacttgagcccaagagttacaggttacagtgagctatgattgtgccactgcactccagcctgagctacagagtaagatcctgtgtctaaaaagaaacaaaaaagctaccactaatactgatatttaagagatttctccagtatatacccataaagatgaaaaaccacatcttttagtgagtgacatccctgtaagacacaggggcaatagcgttcacaggaattagtctcatatcattctgagacacagatcaaaagtttttcattactagcaattctagcagatataaaaccatgtgaaccaggtgtgcagcagctttccagtgttgagtgtgaaggatgggtagctctaatattccctttcctgtggcatacctctttgcagtttgactttgtagatcctcccattgagagttggagactatttcctcaccctttaaaactaggctggggttgtgagtttctttgtctggtaaaatgtggtagaagtgatggtgtgtcatatctgagcttggtcttccagtggccttttgtgtttctcttttatcctgtggacccctacgtctgtcaagagaacaagctcagattatcctgccatcctgccagaagatgaaagatcatgtggaaaagagacgagtcatcctataccatcaagctcccatttgacttgccagttgatcacagttgattatcttttttttctttttttttttttttgagactgagtcttactctattgcccagactggagtacggtggcacgatctcggctcactgcaacctctgcctcccaagttcaagcaattcttgtgcctcagcctcctgtgtagctgggattacaggcgcccgcaaccatgcccggctaatttttgtgtttttagtagagacagtgtttcaccatgttggccaggctggtcttgaactcttaacctgaagcaatccgcccacctcagcctcccaaagtgctgggattacaggtgtgagccaccgtgcctggctgcacagttgattatcttatttgcagccactgagataaaatttgactctatatccttaactaactattagaataaccacaaatatgactcttytggttaaaaaagaactgttttttttggtatttgagcccrtgaagctgcattcagctgagctgggcccagatcagcagaaccattgatatgtcccatacacacatgagcaaagatgaggctttgctgtatgctgttgagcttttgtagttgtttgttatgtggcagtgttgcggtaatagatacatgatccatctggcttcatccttgtagagaaggagattggctatctttccttcagggttccagtcctggttcttyctttaactagctatgtggctttagcaaatattttaacatcattaagtggcatatgtaaaatggaaaaaaactaatttttgtctaactcacaaaattgctaaagtgaagtgaaatatatgtaaatgtatttattatctatacatcacaaggtaaaatttgattaatctaaaactctctgctctgtaataatgtactacatttaagtttttttccaatgcatttgatctttcagctactacataaaagaaataaacaaacataaggactattctaatgccatgccagtcacagtgttaaaataacttaggcatattttgataccccttgatatgtttatgatgaatttgaaatatactagagaagaaattttgtttagttttataagtgtggcttacagaaggagactttaaataaaataaacccaaacaagttttgatttactcatggacatgttttagttcggaatgtcaagtatgaatgtccgtctccagggatatcagggtgtgaatcagatgtgcatgtttcacaatccacaggtttccatatgtttttgaaatatagaaaaaacttcactaatttaagcttatcagcattcaaagttatcttatttgcagccactgagataaaagttractctgtatcctaactagcttactatttgaataaccacaaataytggttaaaaaagaaccaaaaatagttaycttggtttgactgtaaactgcattcttccatcttgaaaattttgaatttttctagattttcaatatgtttttggggtaataatgatatgtaatattataaaatttgaagtaataataatgaatgaatgaaattaaataaaatggactccagataccttcacctagagacttatgctgttaattaacttttagagactacaaactcaggtatcagcctgtgcatatatacacatagaaagataatgcataaataggagtgcttttagaacaactagaatataggatgcatactaatttaattaacatcttaaatttaactttacttgaaattaagcataaaaaagaagctgaatataatctaagtggctgaactctagcaacaatttcactgcagaataagttgtttctaaaagatccctctaaagttcataagaaatgattatgaagaaattgaagtttacatcattacttatgtaactaaaaattttcctttaacctctctaattttgttatgaaagacaaagaaattagattaggtgggcttcttttttactttaccatctcagcctctgaatttgttagttatattatttttatatttttgaggcttctgccctgctaggatgctttgtggcaataatttctgaaattcttcaaacttaattttatcagattttataagaaacttagcaattcaattaaaattggaaatgcaaaaagtcttcagttgcataagaaaacccattcatgatagtagaaatgtaaattgtaaccacactgagtttccatttcttacctatcagattgtcaacatttcgaaagtttggcaatacctttattattattattattattattattattattattattattatwctttaagttctgggatacatgtgcagaatgtgcaggtttgtyacataggtatatatgtcccatggtggtttgctgcacccatcaacccgtcatctgcattaggtatttctcctaatgctatccctcccctagccccccactccccaacaggccctggtgtgtgatgttcccctccctgtgtccacgtgttctcactgttcaacccccacttatgagtgagaacatgtggtgtttggttttctgttcctgtgtaagtttgctgagaatgatggttcccagcttcatccatgtccctgcaaaggacattaactcatccttttaatgttaaggctgtggggaaacaggctttattatgcattgctgggaggagtgtagtttagtgatatctaccaaaactacatgtgcttagcttttgacccaataatttcttttctgggcatttatctttttatatatatctgcatgtgcacaaaaatgatgtgtttacaaggttagtcagctgagctrcttataacattctaacttacaaagaacctaagtgtccatcagtaagggactggttaaataaattatggaacattcatacagtgaaatatttttcagctaatggggagcagaaggaaaaggtagagaagggaaaaagaagagatctctgtattgatttaggaagatttctaaggtatgttgatcggtaaaatgttcatgtccagaaagtgtgtgtaaagagataagattatatttgtttgtgtatatatacatatatttatttattacttattttatatatataaacactttatatataaacactttaaggaaaatgtttaccttgtgtgagaggggacaggagaggaagggcactgggagactggtaactctgtctctttaatttgtttttatttatttatcactaataattacttattacaaaaaagaatgttaaagcattaagtggattcattctgaacagcagtgctttgtctcagactcctcattcatgacttctttaatttgattgactttttggttagctagattttgccgtctagttaattttaaaggaaatgaatgaatgttctgtttcctaaattgctgcatgaatgaggatatctatcaaaattgtgtgtatcaattctcccttgaaaacctttaaaatcttttggtctcacttgttttctacctcaaaacgttgttagtagtattccagtgtcctctggaatgagattgtggcactttcaaaaagtagagtttttcaccctatacttcgcttttgtttcagtgaattttttttgaggtggaaaaggagctcactaaaatggtttatactttctgattttatcccaaagtttggatttctttttgggttatcttttaatgttgcattattttgtggattttagctttctaactttctgttatggaatatactcagggaagtgttttacatctggagagatataattcaaaattttctctatgtgattatttatacatttttcctgagtgtgtgaaataaatttaagaataatctgaagttttgtgtttgttttagttgcatataccttgaaattgatgttaattgatgttgtctttacttttactatattgtttaggttatgaattgtgtgagtattctctaatggagaagtaggctgtttcatgtctttattctatattgactgtgacataagccttgtagagaaagtttttctatgtgcagaatgtacaaaatgtcttgcaaatctctgtgagtttgcccccgtgatgcttgtttcagcatcatgactgaaacaataaaaggaggaacatcatctagtttctctatttgcctgtgataagtccagattctctgagaagcagacatcatcatgggattaaatgtgcaaaaaccttattagagagaaaacctgtgcgagtgaaaaaagggaggcagctgggggcagctgacagagccctcagactgtgatgcacatttgaccctgagtgaaggagagagggagacaaggttggttggaagtgtcctggactggcatgaagtttcaggaaacctgaaggagcatcaaagttcacagttagaggagtcccatatctcctaggaacaggcatgccttaatctctctgttggcagtagtcattgctgggagtgctagatggccccagcctaaatggggtgatggctttcagaactaagcaggctgagcaccttggtcagcagagatccctatagggattcttaccagtacatctttctaaagcttatatgggactcttcttactttacatttgttcttggatgacctcatccactactatgaggtgaattatcacctagtctcagtctgtagtcctgatcactatctttacctggcatgccaagcctattttccaattgccttctgtgtactttgctgccctgcaaaccctcagactcaacaccccatgatgaacttatgatccttcacctcccccagtcccaccctttattcctgtattagtttaccatgtctcctttcttcccctttcccatattgaaaactaggagtcacctgtagctcttcctctccttcacatcaaatatccaaccagccaccatgtcctttgcatgtatctaaagttctaaactctggtgcctcctcccatttctgttatgacagttctaatttggttcatagattcttctttagaatcacatactttaagatggagtttgccactataggtccatcgtctattttttaacagtagtgactggcaggtatctctccacttcctagagttttccttgctgatctcatcctcagccattcttctgcacttagacttgtagaaaaggtccagatctgcaatgtggatgctgttggagtgctggcattttttccttctgcttctcacacggatattatgaatgataaatttttatgatggatgagttcctgacaccagagccagcaattcctactccccatatagtaatacagaaagcatgaaaagtagataactgaatctatgagtgcataggaccactacatatttggtggtggtggtggtggtggtgttatgtgtgactgtgtacatatatgtatgttaaaactagatatgataaaaccttaccactttattgctgtatgaatcagttatttgtgtaaccaacaaccacagaatctctgtggcatgtaacagtggttgttatctctagctctctcatgcgtggcttggctgaggtttggctgatttaggctgggctcacataagcttcacgtcaagctttgtcttaggcattttctgttccaggctcaggatgtgtatgaggctctggtcttcccaacatgtgtttgttgtggggcccaggtttaagagccagcagccatgtgaagaagcttcttttcatagatggcaaaatacaagaaagcaagaccaatggcacaagtacatttgaaatctttccttgtgtactgtccactaacattcctttggccaaagcaagttacatggccaagcccaacatcaaatggtctagtgggaggggctacaaaggaagtagacacagggaaggatgaagtactgggaacaataatgcagttgaacacaattatgatgattgctttccataagaagaaaataaatagaaaaaaaattggggttggttacgtgcaaatgcctttcctgctttatgtttaagtctaattagcagaggagatgcattttcctataaaaattagaaactaaaagaggagcaatgtggattgctagacagaagtatgtttatgacattattatgtgctaattctttcttaagagtggccatcaatttataaacttccacagttcttttggaaacttcctgggaattgtctattttcgtccatgtttgtaatctctgagccatataaagagtgaagtgtattgcgacgttttcactttcaaaactattcttagccaattttgttagggtcttataaaatgtgctaaagagtcaaacgttaacatatcagctttgaatatatcaggatatagaatgtcagaagttaaacttagaattcttacagtattgtgtagcagactgctaaaattagtatatgattgatgacattgtgatttgataggtaattcaaatattttgtaagtgtttcagaggaaaatattgctataaagcaactgatttagaaattgaaatgagaaatgtcccaagaggtgaatagttgtaatatttattyaaaagtaatgttgcctatcctgctcctgataaccactatttcattctctatctctgtacatttgactgtttccttctaggattccgcatataagtgaatcatgcaatctttttttwctgtgtctgtgccagacacagaaaattatgcttatttcacttagcataatggcttccaagtattgtgttcgagatttttgctaagtgaatagctatagctgcttttgccattggagagttgggggatgggtaactatgtgagatagtggatatgataatttgtttgactatagtaactattttaatatatatatatatataaaacataatatcatgttatataccttaaatgtgcacaataaaatgtattttaaaatatggcctaaatgaacatgatgtagggtttcctttattagtattaggaaggattttaattgtgcatgtagatataagacatttccatatgaaatttatataataacaaagatattacacaaggaaaatgggtctctttcacttctacacctgaaatgtaggcggcgacacttttatctagtcatagaaaacacaatgaacttgtggttgaatgtactcaaattttctatcaaattacaaaatttgtcaaaactgtaacacatttatcatccaaattgtcttaagaaacgtgcatatgacaatgtctttaattttcagtcacccaaattttcaacagttgtattattcacagtgagattcatccaacaaatgtatatccatttcaacttggacaattttaagaactgacaactttccatgtatgatatttgtcattctcagaatcccttagaaacctcaacacttaaccatttaccatgtttcaagggaatgtttttccaggaaaaaaaatgcacaagtgtgaaaaagcaggagaaagagaagtgcagttttaatagaatgtccaagatttaaggttatgatatgaaaactaggtagcatgttcttagcaagtcttgaattaatggcaaacttatgacttcattgattttctttaccccatcccctgacatataaatatatgagaaatatagcttccataccaacacctaaagacagatttcttattcaatttctttgagaaactaaattcaatggcagatgacagcaataccagtgtactgcagaagtatgctctgcattcctgtgttttgttcatggtatacattcctaatgccctttttgtgaaacctggttaataattaagcaagtcaggatgtacgaaccacctgaaattctcggataagtagtttcttaatatctctttttgtacttgctattgaaagtatttagagttatttttgcttgattatttacaattttacactttctttataaactaatttttcctaaataccctagtgtgattttaaagtttgaaatgccttaacattctccatcagggacaagttatgttttgtagttagcggcttgatacccacatgtagctctgtgtttatgatggcagagcaaagtgaagattgcagacaattatcttgatggtcaggcctccaggtcagctggctgctgtgtttacagataaagtgagctggacattgggaagtccactggcaacttctgaaatacataatggtctaaattgccttctattctcagggcccaagccacttgctagtgtaagttggctatttaagggcgagcattaactctcgtgggtcaccagggaaccatttaataagtaactagaggcctggagatgttcacgtattcctctaaatgccctggttttgttactggtgcagttcactcaaggtcattctgcagcttcaaatatttaatgtcctttctcaagtgaatgaccgggtccggtggagaagctggctgatttgttatttgtagtcagccagtacatagtaagctaatcaagttcataataattatattctggcaagaaaaagctgattaacagatgtagtaggagtttagagaggctgaaataaatccgagttatgataaaacaacctcattagagaagagtatatacatgcataaggattttgagctgaatacctttatggtttttttgtaacttttacttttgacataatttcttattttttattttttattttttaatttttatgggtacatagtaggtttatatatttatggggtacatgacatgttttgatacgggcatacaatgcgtaatgatcacatcatggagaactgggtattcatcctctgaagcatttatcctttgtagtgatataatttcaaacttacaaacaatttgtaagatcaagacaatgaacaactatacatccttcacacaaattcactgattgtttctcatttttttccatctgctacctcattatatctaccaagatatcaatccacttaatttttttttcctgaaccatttcacggtaagttgcagacaggatagcccttcaycttaaataattcagtgcatatactccaagaacaagaacattttttacgtgaccacagtgcataattatcaaaatcataatggtgcatactactatccagttgtggtgtatgattttaatatgttatatagagagaaacaaaaatgaaaatgaatgactactattccaaaatgcgaacgtgtgagttgcattgggacagattagtatgctctgtaaaggggaaattaagctgacttaattatttaagtcatgtattaagctaaatttcaattatgaaattactggatgatccaaatacatattagatgagggtcagtcacttattcaataactcatttgcctattttagtcaatgctcaggtgtcttgtttttcctaatgacttccaaaggtgatgattactggcacttactcaagcctaactttcacataccacttgtaaagcaggtttgaataaaagatgcaaggaaggttgacttcaatattcagccataactggacctcttggtgtgttggatttctggttttcagtatataattcagtataaatatagttaggatacaataaaaggctgatcaaatatgtctaaaggagagagtcagtatagtaacataagtaatatagacaaggcatactatttgaattttggattttaaaaaatgtcatccttttattcagactttctaatggtgcactattgcagtgataattagcaaggttaaaagcctcttcctgaagactttagggagatgcttgccattagaataatctgtttatacctatctcatgtttgtttttacagcctgtgtttcaaagaatagtattaagtctgatggattttcttgcccgagaagctaatttaaaaaaatcgtattcactaggtgaactgcagactgctaaaaggtgggactaagatgaacactaaagaacaacataaaggacagatatcactcacctgtgaggatttggttagcgatgtgggaggagagccttcctgagtatcttaacatcagtgcttctctgaaggcattggtagattttttttttttttaagaatgcaacatcatctgcaacctgaagtcagttctggaggcaggatgtacctcatccctaagccagttatggaggcaagactgtactcatatcactgtactcacatcatttacaaggagtaaatgctacataagtggcaccagtgtaagtatctaaggattcaggggatggggagatatcttagagacaaatagagcagacttaaggaattggataggtagaaaggagggaagagaataagaaatgatgtaaataaaaatatataactgcagagaagcagataactgttgaggagtggccaaatatggaggggggctaatgtgtgtgtcagggatttccagtttccagttctcatgaaacaggatgggggctaaaggagtggtctctaccatccagttagtagaacaggatgtacataatgagtggatacctttcaaatattcaattacattcaaaattttgctaaaacatttgttcatgcacatcttgccatagtgaagtccagcccaggaatttctgcctttgcatatgwaatgggatataaccagagactgacaaagaacattcaggataaagagaactattaacttgacacgtattttgtaggagatgctgtgggaaaataggcacattcacatattgctggtgggagtgtaaatcattacactacctataggagggcaacttgatgataactatcaaaattacaaatatgccctttgccctgaaagtccagcttctgtaatgtatcttacggaattacttctgtacgatgcataaaaagcagaatattaaatcccaaaccaaatatttgaaaatggaaactggtcaaataaaccctgccagccatagaatactatgcagctgtaaaagaaaaaatttttwaaaaaaaaggagaagaaaaagaggaggaggagaaagatgtgctctatgggttgatttggaaatatcccctagaaagaaggcaagaataatcayatttgcatatatttgcataaaggaactagaaggagatataaaaaacagaataaaagtgttttgtagtgggtggaaactggtagatggagacaagggtgggtgtgaaaktcttcactctgtaaaactttttatacttsawaatttctgagctgtttctgtactagttaatggaaaaaatgaaaagagaactattgtgttcttataagaatggcaaggactgctaattttctaccctaacatttattctcccaattgttttttattttaaaccagaacattgccctgtagacttaatgtttccagcttctcttgcagctaggtgtggttgaggtcaatgaggtayagtaaatgctgtgtggtatatcttggtactttttaaatggatctgttaagctatgagggtctttctgccttgctttcttctttccaatatagatgtgatgttcagaagctcagcagacatcttggcaatgaggggaccttgatattggaaaccatgtgctaagaggacagagaaagacagacccatgagtcccgggtgatactatggtgccaacatactggctgcttcttggtttctcttatatccaagaaagaaagctctaccctgtgtacatcacacttattttgatctttatggtgttgattaggcattggagtctaatccagtatttgccccaaatgtagaatactgtttttctttaagatcttttctttgcaaactttgcttgggccctctaagcttgtgactttacttcaaatccagttccactttgggttgatataattatggcatgtgaaaagtgtttctggagaatcatgagatgtgactattatctggtaaagtgtgttgcagtccaaagtgccaatggtggaaaaactcccgtaagtgcaccctgtcatttttctttttaatttaggtgtacagctgaatttttaatatttcatatgcagttaaattaaccatacttcttgtgtcaaaataaatatgcagaatctcaatcatggacttaaagatgcagaaacacattgattttaggaaaagtacatgtctcttttattaccacacatataattctggtaaaaattatgatgaataatagagaaaaaatatggaaacatggatgaaatttgttttatagatttgcaggatgcttgctaacatggtggtagggagggctgatgtattttcagtctgacatctgttaatgtgactataataaataaactgtatttactaagtaaacattcaacttttctctcaaaaagatttggtagtaaaagaatatgtcattgtctcattgctggaagcctcatactttttcatattggatggggaagggaattccattagtggtagcacaagtccatctgtcttacattagacatttgtctaaaccaactttgctcactgaaaagcagtgtaataacaccactgaagagagttcttaatagactgaggaagcaaacaaattcaactggtgtttcataatatctaaatttttagacctgagatcatttctttggattcccttctacagattttaatttgcatgcctgatttagcagcctctttccctgctttaagtagaaagtagaaataatattttaaaactaatttttacatctttttttgcattatggagatgggctttcctgtgtgctattagtagaaaatcttttaggaaaataaggaagaaaccatgcagagggacataatttttcaaaaaaggctcagaagatatagcagtttgtctttatgtttttcaagttaagattctcctatagatatattaaacctaatccccaatgagagggtatttggatttggggccactgaggggtgattagggcatgggggcagagccctcataaatgggattagtgcccttggaaaataggcccaagagaactcccttgcccatcagccaggtgaagacacagcaaaaagatggctttctatgaaccagaaaatggccctcatgtagtgtgtctgcatcctcttcatccaacttcccctaacatcttacatgaccatagtccaatttttaaaagcagaaaattaacattggtacaatactgttaagtaaacgagagacctaattcaaacattacccatttggcaactgatggattttttattctagaatcaactcaattttcccacagtgaatttaattgttgtgacgttatttagtcttctgaaatctgtgacagttccttagtctttccttgtctttcacatccttggcacttttaaaaagtattggtcagttactttatgcaatgtctctcagtcttgatttgtatgatgttttctcatgattatattgaggttctgcatttgtattagtcgattctcacactggtgtgaagaaatacctgagactgggtaatttataaagaaaagaggtttaattggctcacagttcygcttggctggggaggcctctggaaacttacaatcatggtgcaaggtacctcttcacagggtggcaggagcgagaatgagagcagagtgaagtggggaaaatctccttttaaaactacaaaatctcatgagaactcactatcaaaagaacagcatgggggaacccgccccatcattcaattgtctccacctggcccctcccttgacacatggggattatgacaactcaaggtgagatctggatggggacacagaaccaaaccatatcagcattcttggcaaaaataccacagaagtgatgctgtgcctttcccagcacattctatcagacagaaaatgatattttgaaataccatttggcagttggctctttgaccaatttrcctctaattcaaactctgtatcattattgagcaagcatttagtagcttgaaattgtagctgcatattctccattttgctcacaagtgtatcacatttagaaagaaagatgggattacttttatcaactaatctggtgtttttttctacctctgtagaaatggaaaataaaagctcaacatctgattattgtaggtgttcttactagctgggttaggaaaagggataaagatacatgtgctgcagtgcgtttatagaggcaggtgatggtcaagtattctttgatggtcaagtactccttctgtctaacagcctcaaasaagctccttttctttatatatatatataaaatatatatatttttaattatactttaagttctagggtacatgtgcacaacgtgcaggtttgttacatacgtatacatgtgccatgttggtgtgctgcacccattaacttttcatttacattaggtatatctcctaatgctatccctaccccctcccccaaccccacaacaggccccagtgtgtgatgtcccccttcctgtgtcmaagtgttctcattgttcaattcccacctgtgagtgagaacatgcggtgtttggttttttgtccttgagatagtttgctgagaatgatggtttccagcttcatccatgtccctacaaaggacatgaactcatcattttttacggctgcatagtattctatggtgtatatgtgccacattttcttaatcctgtctatcattgttggacatttgggttggttccaagtctttgctattgtgagtagtgccgcaataaacataagtgtacatgtgtctttatagcagcatgatttatattcctttgggtatatacccagtaatgggatggctgggtcaaatggtatttctagttctagatccctgaggaatcgccacactgtcttccacaatgtttgaaccagtcccaccaacagtgtaaaagtgttcctatttctccatatcctctccagcacctgttgtttcctgactttttaatgattgccattctaactggtgtgagatggtatctcattgtggttttgatttgcatttctctgatggccagtgatgatgagcattttttcatgtgtctgttggctgcataaatgtcttcttttgagaggtgtctgttcatatccttygcccacttgttgatggggttgttttttttcttgtaaatttgtttgagttcattgtagattctggatattagccctttgtcagatgagtagattgcaaaaattttctgccattctgtaggttgcctgttcactctgatagtagtttcttttgctgtgcagaaactctttagtttmattagatcccatttgtcaattttggcttttgttgccattgcttttggtgttttagacatgaagttcttgcccatgcctatgtcctgcatggtrttgcctaggttttcttctagggtttttatggttttaggtctaacatttaaatctttaatccatcttgaattaatttttgtttaaggtgtaaggaagggatccagtttcagctttctacatatgcctagccagttttcccagcactatttgttaaatagggaatcttttccccatttcttgtttttgtcaggtttgtcaaagatcagatagttatagatgtgtagtattatttctgagggctctgttctgttccattggtctatatctctattttggtaagagtaccatgctgttttggttactgtagccttgtagtatagtttgaagtcaggtagtgtgatgcctccagctttgttcttttggcttargattgacttgacaatgcgggctcttttttcgttccatatgaactttaaagtagttttttccaattctgtgaagaaagtcattggtagcttgatggggatggcattgaatctataaattaccttgggcagtatggccattttcacaatattgattcttcctatccatgagcgtggaatgttcttccatttgtttgtgtcctcttttatttcgctgagcagtggtttgtagttctccttgaagaagtccttcacatcccttgtaagttggattcctagctattttctgtagaacctcttctccattcaaggttgcagaagtctgtgacaaccaaggaaaagagacagcaatggggctctcttacctgtgcctaggaagaatcttacctagtatcttcttctgctaggaagagagaacagatgtataggatgaagtatctcaccttttgggatctttttttaaaataatctcagaccatgtaaactccagccatcaagggaaatgtgctgattcccacagaccgtatttcttttcttttttttatattgcctcagaaagagaatgcatggaactgctgctgcttcaaactagatatctgacactagtgctaatggctggtttctcagctaatccacctgtccttcacttctgaagaactgaatgatagtctttgtatttccaactacaattacaaattacatgaagcaagaacaaatttttagttttatgattatgtggtaagcatttcaataaagctccacaaatgatggaaagtgtgaaggagagaaagagggagagagagaaagacacacacacagacagacagacagacacacacacacacacacacggacccattacccattatctggacagaaacatcttaatttgcgggaacattaaaaattttttttctatgtggctatacataattatttataaatctacaattttatttaccaaaagtgtgtgtgtgtgtatagtgtatacttgcttttaataatagatatattttccttgacaatgaacattgagcaaatattatcatttttaaaggctggacagtagccccttctgtggatgatctgtacctgatttaaaaggtctcacattgatggaaatttcgccattgtcggcagcgctgtagtggacatccttgcatgttgattgtgcattctactcagatgtttccctttgggtaaaagcctagaattggaattattaagtcaagtatataaaaaattgagtcttattgcatatagttaaattgtctctcagaataaaactgctccaatttcaacttccaccrygaatgtatgaatgtgcctattgccatgaatgtttgccgaaataaatctttggcaatatcaaaatatatccatgtagcctctattttatttctttattttgaagttgagcctccttgcctaagttatttttcctattatttcaaccttatttggtgatttgttgcttatattttaattagtttgtatgtgagattcttaatgattttatatattaaggatcttaatgatttttcagtaactgcaaataatttttctagtttataacttatcttttaactttatttgcttaaaatattacttctgaaataattaaaaataaactacataatgaagatctttgtacgtactaatatttaatatgtgataatgcaacaagtatttgtgaatattgtaataggtaatatcttaagcatttacaaatgttaacttattttatcctcataaaattatttaaggtgtatcctgatactaagtcgattctacagtgagcatacttaggcacagagaggttgaatatactgcctaagtttacataggaccaagtggagaaactgaattcaaagccaggcaattacctttagagttcttgttcttgccactgcattttataattggttaaaaaaatatttatttattccggatattaattcattgtcactcatttgcattactaatatcttctccctcttggaagtctctcttttaattttgtttatgctatattttgatatacacaagtatgtcatagccattatatgattataataatgtgatcagccttatcaatatttttcttcctgggtattgtttttgcagcatactagaaaatccattgttactcttatgccatgaaataggccttaatattttcttccaaaaatcttgaattttcatttttaacattcagagctttaatctacctggagtcaatttctatgtttggtatgataggaactgaattatacctcttttgttatagaaaatgtgtaccatcagcaatatttatcaawgtaactaactttattaagtccttgaacttcccattttatttctatgtgctttcaaaattttattattacagagaatgaaattgttttattgcctttcaaaattggttattcttgtgtataggaatgctattggagcttagaatattgatctagtaacccagtaaccttgcttaacaatcttttgaattttaatagtttttttctgaagatcctcttggattttctatgtagaaaattcataatctatacatcaccacacacttttccaactgttttaccattttatatttttctcatctccttgaattatcttgggcctctgataaaatactgaataaaagcagtatttatctggatccgtgtattttctctgatcttacagggaaggcttcttgtgttttaatattaagcataatatcagctttagatttgtagaagatatttcttaacagattaagatctgttcccttttatgtctgattcgctgaaggatttagaaaaattatacataggctaagttttgtcaaatgacttctctgcatataataaaataagcttttctcctctgctgcaaacttcttgctaatattttattttgcatctatatttgtaaggcaggcccacctaggattattatttctcagacttttcttgttcaatatcaagataataccacttcatagaataagttagaataattgtcttatttatttgggtttctttagttagttatttaagctttgttatgttcccagttcttctcagccatttactactagtttctgtcttgtgtgttttatttattaaaaaaggrcccccctccagcaatagtataaaaataatcacctctgtttttcttatattttgaaatattgtgggtttttttaacctttaaatcttaaatagataacttagaattggcctctccatgtatgtaatcaaaatagggttatacaattcttattttaaagccagaggaaaaaaatccaaaaatttttttagcaaaaacttcaaatggattcttcatgatgacagctggggtgcccaagagaactgctattggtttcaggtttaaaataaacctgaatctctacgtaattcaacattatgatttggtacttaatgcaaaagtaagccttcaactcaacatataactggagaagaaaaatttaattccagaagctttccatctcatataggttattactctgccagagtaaggatttactttctcaagcagttggaattcccaagcatactgaagcaagttatagatagcctgaaaagcaatgtgaaaagcaatgcttcatctctgaagcaaaatttcctttcagctttacaatcaatgatgctatcagtgacatggtttttaaattctcgttgagaaaatttaaaggaaaatgttaactttttaaatgagcagacatgaagaacacagtttacctacaacatgaatgaagaagtatagagttattgcctgtgttgggttttgtagatccttcttgattcctgcttatatttaatagagatgtcagaatgaaaatgtccaacatggttaatattaatcttattcctcagccagtatattcaggaaggcagtatagttattttataatgttgttcttttgtttgtgtattttgttgttgttgttttgagacagtgtctcactctgtcgcccagactggagggcagtggtgccatctctgctcattgcaaactccgcctcctgggttcatgcaattctcatgcctcagccttgtgtggtagctggaattacaggcatgcgccaccatgcccagctaatttttgtaattttagtagtgatggggtttccccatgttggctaggctggtctccagctcctggcttcaagtgatccgcttacctccgcctcccaaagtgctggattacaggcgtcagccactgcgcacagcctataatgttttttttacagcatttatttcttggcttactttttattcctgttaatgttgatattgtaccatttggaaattcagctattttatgtgtacacacatatgtgggcactttctacttagtctgtttctacagtgatatctatctttctgtggatatttatgacagataggcagacattcaaatgcagaatacatcaaggtatttgttggactagataatatcaatatcacatggaataggtttgcttgcttgtttatttaattcaatcgcatatgttgagagtacagtgtgtgccaggcaatgcattgtgttctgggatcccacacagggataaagacctcataatggtgggaggtagatggtttgcctgcaataatcacatcagacaatatgttgactgatagtccagtgtcatcaacaatgtgtcgagggagcacagggatggaaataatttgttttgcagggacttgagggtgaatgtgggagcagagatgaggaagaacacgcagagaaagtagaatttggtctaggccttgaagagagttgtatttcatatgagggggagcgagtcaaaacactgaatcaccagggtactttgcttctttagtgaatgggaaatattatagtgcacgtggcaagtagtgagtagtgattacggagcaggaaagtttaagctggaagagctcagtcattctgggttgtatgcacacacacgcgcacacacacacacacacgtacacacacagaggcagtggcatggaggatcatttggaagctggagaaagtaaaaatcactagagttgaggatacagatgagaatctgagcaatgggagtagtctgaacaataggaacgtgggaccgacataagaaagggatggaattgatgacaaatttaatgtgggaaataaggaagaggaagaagcaaagatgatatggaagggtctagcttgtgtgaccagatggaaagtgactcattaatggaagagtattaggatggagaaattgttttatttttaaaataatttccagtgtagtgatgaaaagaaaaagwtactgaattttattttgaacatactgagtttgaggagcctgcttaactatttaggtggaaatgtcactttacctaaggaaaatgagtttgggctctgaaaagagagaagtacatgtcaccaggccgggggtggggtgggggatgattgaagccaagggaggagatgtgcttgttcagggagagatgcacagacaaatcaggttcctgaaaaacagaaacatttaatgcatgatgggagggatctattgtcttgctgaagaatgataagtgagatgcagggagaaaacttggaggacactttattgaaaattaaaggacaaatgtttctggagggaagaggcaacaaaataatagatggagattttttaatacgtgccttagtgttcttgcccttgaattggtacaaccctgaagcacattgcatacagtcttccagaatcccctgcaggattcagccccagttgcccatagtgaaggacttgtactttataacacctttcattgccttccatcccttctctgtctcacttctcaacttccctcttggtgccttctggggtcacctcaggataacctacttgcaaccaaatccttgcatcaggatctacttctgggagacaaaatacctaagacaaaatagaattttggtttctttcttcctaagaatggactggaatgggttagaaggaagatgaactgtggaaagagagagctaagaatgacagggtggggaaataattgaatacgtagtccggtgtcatgagcaatgtgtcaagggagcagagggatggaaataatttgttaaattattaacaactaaataattggagttggaggattaggggcttttcctctctggagaaacacaggaaaagattggagtgaaggcacataatgttagtggtgtgatcattcttgatcattcatcctgtcatttctcatagaaggagacagaattgtttactgaactcaggcatcttcataagcaccctaggtgatatagtttggatgtttgtcctgggctccaatctcgggttgaattgtaatccccagtgctggagatggggcctggtggaargtgtttggctcatgggggcagatccctcatggcttggtgttgtctttgtggcacctccttccacccaaccttgctcccaccatgtgagatgctggcttccccttttgctttccaccatgattgaaagctccctgaggcttccccagaagccaagcagatgctggcacatgcttcgggtacggcctgcagaaccgtgagccaattaagcctcttttctttataaaatacccagtctcaggtatttctttatagcaatgcaagaacagcctaatacactgggatagtccattcattctaagtctgttgttattcaacaaatatttataaatcatatcctatgtgtcacacctatgattttctgccttaaataatagggttccctttcatcattttttttccttgccacttatttgacaatactggttgcttctgctttctgacattgaattcagttaatcttattctgcttttgccatctgtgataataagttattatcctagaaatatgttttgaatttaaactgaatatccatcttgaagttgccttaaattctttatgataaaatccatttagcataataatccgaaaagacagagtgaaaaaaacattatttaaaatagttgatttaatgttgttatgaaatataacaggactcttgaaaaggtgattaatattcttacacatgttgaaacagaacaatatgagttttttcttatctacttttcttatctggtcttctctggcttctaactttattagcattcgtatattttattaattaaaagtcttcttgatatacattctgtgaaatacttatacaaaaacaaatatcaaacctgaaattcttcaagcttctcgatccagctactgatttattgaaaacactgagaagagaaatgtatgattaaatgatgtaggatgaaatttgtccatactatactataggaagtaggaaaatcttcaggacaatcaatctggtttagtcaacaaataaattccaagaaaaaaataagacagaaggggaaacratagtttagaacacatacagctcatcttaaacaattccaatgtatggctttcatttagattgggatttttaaaattatggcacttgtgagataatttgaatattgagtatttgatgatatttaggaattactattaatttgctttaggtattttagttatttgcaaaagagggaaactacaccgttagagatacattctgaattatttacaggtataattatatgatatctgggactggattaaagtagaataggggcaygggagaaggggttggggttggataggatgaccacgaatgaatggtttttgaggctggtttatggctttgagtgtgcattatactattaagtttacttttgtgtatattcaaaattatccatgataaaaatggaaaaaattaaattaatatataggtagatcatcctcagtgtatgaataaattatagtttattttttccaataaaaactttgttatgtaatagcatggtttcttaaattcacctgttcgatagaaataaggttaaacaagttcaagaatcaactaacatcctcctacagtaagcttcattgcaaatccagttttgacctttgctcaaagaagagaatgagaaaataacacatttgtgtgtgctcttttcctgacctatgacttgtatagatgttagcacagtggctttggttttaaggtaaacattctttcagcatttctcatccttctcccattttcctgcatttctcatccttctcccaccttcttggtattttaatcatttatgtattgtgaacattttagataagatgtaaaagtcttatatagtgcccctcagttaaatttgcttagtttcagagctgtgggattcaataaaatgagacaggaattatgggtaacctcataaaggagtatgaaggcattgttatcgttgctacctttttgaaggaaatatgccctcactctgacttggaaattaatagtctttcatataataatttgataaatttagtaaaattcatttttggacctgcatctagatttgcttctgccacaactaatgtgaaatataaaataaatacttactatattttagctaacatactttttcattatttttattcctaagaatggtaaatactaagaattatctaaattgctgtgctgaatcatataaatgtatcccaagaaaatatttcaaaaaaagaaaacatgcacaaagatagtcattataaaggataacaaagtcagcaraaaaaaaaaagattgtcattatagtattttcaggactaaaacaattagacatgaatcaaatgataaaaagtttcaaaaagtaaatacataaatcatgatatttcagcaacaggaattattgaagtaccatgagaaataaatttttaaaatgcaacaatatggaaatattgagatgtaaaattagggaaaaatacaaggagaataaaaattgtgccttcactctgatataaatatgtaaaatatgttagtttatagacaaaagactgtaagaggatgttcaaaaatgaagccagatgttgcattatagtgttggtattaaggatgagttatttttcctttaaattctcttctgctgttatatgatatttataaaattttaaaagtgcagaaaacaaaaaaaattctgccatgaaaaactctaattatattgaaaataccatcctacagggaagaaagtgcaagattacttttaagttagctctaataaatacagtgaatgatttgcaatgaactgccacatattttaaagtctagtttatattatacggaacaatgcagagaatctcctctctgtccttcttaaacagaaaggaaaagtgctgttataaatcttacacccttaaagaagcatggcatcactatgaagataagcttcacctaatgtccagtacagtgctggacccaggtgggtacttaccaaacactgtggaaagtctgaagggatgctggtgagtgcctcccagaggtggtattttcttttccattgccccattttgttcctctataatattattttgcttttttaatttttttaagacacgagatcttggtctgtcacccaggctggtgtgaagtggcatgatcacaggtcactgcagcctcaaactcttgggttcaaggaattctyccacctcagactcctgagtagctgaaactagagtcatgcaccacaacgcccaactaattttttaatatttagtagagacaaggtctcactctgttgtccaggctgatctcaaatttctgggctcaagtgatcatcccatctgggccacccaaagcactgggattacaggcatgagccacctgcctggctaagttcttgtttcaataactgcctcctttctcctcctgcagcttttaaattgtagataaatattttcaggtgctaacctagagtcttactcttccatgttcatrtggggtatctgcatgctgggggaaggaagaggttgaggagggaattggccttttgctgggggtttagtgcactggaaggcatttttagaacatctggagatttgcttccttttgtcagaatcccaaagactagacagatatttgaaccacaccgtagataactgttttgattttttctttttctctttttttcagagacatcataggtcctattctggggccccagtgaattgttccatagactttaagaaattcttgggctgttggatgggaaggcaaaaccatgtaactggatggagtgattcttaacttatttcttttcactctacagttaagctaaaattagaaactctgaaaagctggctgcttttaaaaggagataatggacacaacctttgagaagggctggtgatggaaggggaagggaggaggcggtcattttcccatacatcaataaaccatagacatgcttggttcattccaccactaggttattgctgctgggaagcaaatattatcctgtctcttgtttatggagtaggtttttttttcaaattaattaaagggtttatcatctcactaaacacacagatgtcttaataaaatgtagagctatgtttagtatcatgcatctgtttcctagatgtcatgtggagtgctcttggaatataaaaatatggtccctgccccaaggagtttgtatatgctttttggtgcacatacacaaacataagaaaatgggcaagtcaaattatagatgaggatgatagtgattttttttcacatttcatgagattattgaatataatttcataaaaatgagaatacyctttcagataaaagtgtgcaaaatattttatttatgaatgtaaatttttccatccaaagccactgatcaattagttaagtaaaatagaaagcggaagaaatttttgttctgaatgatattaaaatttttctcagtttttgtcttggctctcttaaaagtaaagattataatcagatagtcaagatggtattaatgtgtttgtttctaaaaatgctttgcaggcagttatctttgaagaggatgattaatagtggtagagataacattaaagaaaaactggttctatggattgtacagatggtcttcaaggggtggccgtcctgaccacaggaactctggctgctattttaattaaacttgagggcagaagaaaagaaactgttttttgttttttttttctaagtaagtaagtattgaggttacacaatgtgtttaacctcggggtttgtcaacaattgtagaaaaactgaacagtttacaagaacaagccagtttgcagtttttcagttcagtaaccaaatgactttcctattgtaagtgaaagtgggaaacagcttttcttagcaaatgtagactttgttcttagaggagttagttattgtcttcaaacaattggtattgtaaaatgtgacttaggaacagaaaagaagtgtgtaatcttatggtaattttattgtgatgtgttacattgttttaaaatgttattttatttccttaaacttatttgtttttctttttttaaattataaaagtagtacttgctggttgaaaatattagatgattttcaattccggcatcataatttctgttgggaaagaagaactaaataatacagaagtatgtgaaacaaaaaggagtttctctcttcattccctgatccacccagtggtcatgcttgtgatcaatttgatatgtcactatatagaacattttattctaagtagaggcaaacatactgacatagaaaatcatcatatataacatgcacaagtgttcatcccagccctgtcctatttaagtgcttttatacactttagccacttcaattttactcactctgttacccatgctagagtgcagtggagcgatcctagctctatataacattgaactgctgggcacaagtgatcctcccaccttagctttccaagyagctaaggccacaggcttgtgccactacacctggctgatttttaactattttgtagagatggggtattattatgttgtccgggcttgtcttgcactcctggcctgagccaccgagcccaactttataaatatttttaatgtgaaaagtgtaactttactggaaatatatctcttaataagataaatgagaccatcttttcaaaaaattatttcatgtgtctggggtgaaaattattattactaaaatgaaataagcattaatatcaatagtatttctctttttctttttcataaatgtacatgctgaaaataatgctcacataaataaatgggtggtaatggaagtctgttttatagtcatgcctctccaatctttgaactcctaagttatatgccaaaaaacatcatcagtgctttgtcaccaaaagccattttattaatctgttgatggaagacttaagtaggcttacctttaaattcattaaatctgagaaattggaaacaacctgacttgtaggaggatttatttaccagcattggagtcttttactttctcaatttggggcaagggatcaaaggatcattctctgtatcagttactttttcacatagcagaatcatgtaaaacttagaaaggttcagaatattggtaatttcagtacacttttgctcatgtaattttttttaaggaaagcttttatctgaagtttatgggtattcaatccttggagttgtagttttaattcattcaattcaattcatgggaaatgttatttacatataatctaattggagaactcagccctcaatgtcagacaaactctgatttcatttcttagttcaagtgaacatgttaatatgtactgcaatgatcttcatttcatttctgaaattttgaattgagatagaagaggcacaaggcttggtgatgtgacactctgctgctgtcaaggtgtcttccaactcattcccatttgtcctcctgggactatccctcaggatggatgcatgcattctcaatagcagggataaagaggcaagattatttaatgaaaactgttagctctaccactgcctcactctataacctgtctgcactctgagcgtgtgtatgatgcagggaaaaccaaagcacctttatatgcttatggtgccttggatggaagaaacttattacatccctttgtttggtgccccagaggattctacttcctgagattatgccccttagcaagattctggttggatgagagacttggctttattttttaagggatgagaaggacaccagtttagggtggataagaaaggagcaggagtagccagcagtgccacagacatctcagacttatcagacttgggaaagttgaaaacctaccggaatttcattcacttaaaactctccacgcccatgtttctcttgaaaaatctttatgtatacttctatctctatttgcataacaccattttagaccatttacatggaagtgtttgttggctactatgagaaaaatgccagtgatgagcatttacaaattttactgaatttggacttttaggttctctacatataattacattcaaatgaagttgtagggatatagattggtctatataaatcttcagagaaaggagaggatgcagaatgatggatattgatgatgaagtaagataggaacatatagactgtgttgttttgagttgccgagattccttaaattttacttagttttgtgttttagagcagaagatgtattcatttcaatttctcttaacatctattgcagttcttttgtgaattatgattggaacagattgcaaaatctcccagtgtatcagttttcctaaaataaatcattaaaagcagttcattatctataaatctttcctgggttaaaataaaaatctgctttctaggtcaatcttcattaagctattaatatccttttcatattataagccttttaatttcttttattagcaactgaaagtagctgaaatatgaatgtcattgttttgaatattaattgatgtttgaattatttttagtaattatgctccgacgtcagtgaacttcattccagcccacccagggacaaggaacttctccaatatatttatatttactgaactgtatttatatttgtatatttgtattttacttcttgtgatagatgttcctagtttctatgatttttattgcagtaaaattcaagaattgtcacaagggtgattcattagtggtacattagaaaagcctgatttttgttttgctttattttcaagcaaatcaaaacttcttcagcataaatacatgagaactcaatttcctaagtctagaacagcatttgaatttttagctcatcatagtaattgttcaattttttccagaattactatctaaccattttgtatgcattttattctaaatacaattgacatcaagaaaatacggtgggtgaaaagagccctggagtaagattctgacaggagacttcctctttctgctctgtgacctttttcaagtaaacatgtctctgagtcactttgttaccatttataaaatgaaatggtttagtcatagtgattcttcttaattgttactgagatttataattttaaaagcaatataaaattagagaaaacacaagccacgtaggcatacaaaacgcaaaagatgaaacatctctacaacttcagaccttggccaaaagcattgttcactgctgatggctgaatgatatacccttgcatgagtatgccattatttatttgcctctcgaaggacatttagagcactttgaagttccagttgcactccacatgcagagactcccaaagaacattctactacatattttagaatttacatgtgaaaatgcagaatcaaagtatgtgaacatttaaattttcaccttcgttaccatgaaagctatatcaaaagttgacattgtagattttttttttctttgcaaatctgtatgaaggaaaacaaagtttcttccttcctgagttctcttcctccactcctgtctttgtgaatggccacttcattcaagcctcttcaggtacctttgagattgcacaccatgtttccttctgagtcttcacaactctattgtctcaaagcttgatggtgacaaaaagtgtgttcactaattcatccaagaattttgggggcctggtgttaccctgaaggctaaagtggtaaacaagagcattatgtttcatagttgcttttgtgaagcttaaggtctagtggatcaagaaaaaaatgtccattagataatggcaggaatgcctgtgcttttccaaaatgcgaagggtgaatacagaaggacatgattcagtctgatggtggctggcagtgaccagggtcttcagggaaaagctcactgggaagtgatcttagctccaaaggtgagtaagaactaattatccaaagtaatgggggtaggaagtgggctgggaggaagagctttgaaatcagagacatacaaaggccctgcagcaggaggtagcagagcaagttagagttgttgaagttataaggcccagtggctgagcccagaacacaaggtgaagtttggtcaaaggtaaagccagaacaggggtcagaataaagcttgctctgttgtgcattttttgttacatctgaaatgcaataagaagccaatgaagaatttaagcaaggtggaaataagggaaatggtggtggtggtggtggtgtgtgtgtgtgtgtcttcataagagtaacatgattaagtttgcattatcacaaattgtcatgaaatataaaaagaatgcttagaatttaaaaattagatcttgcttatcttgtatgacttgtaagcagattgtaagcatgtaagcagattgttcatgattcttttggaggaagttctccccagtaatgcggttactttccagcatttagcaaggaaatacaaataacgtcattttccgacagggcagagagtcctagtctaatttagtgtcacaactagcagttctgttatactttaatccttaaatattagaccaaagcagggacaatagaaaatgtgtttacaaaccctcctgattaaggtgactaaaaagcaaaagcgaaacaaaggaggttgaggtaaagagcagtcttacacgtaagcttccagctttgggactgatttacaaaccacaactgaaatgggtattatatatatgctgatgaaagtagctatgtaacatagtttggatctgtgtcgctgcacaaatctcctgttgaactgtaatccccagtattggaggtggggcctggtggaaggtgatgggatcatggaagcggatttctcatgaatggtttagcgccatcctcttagtgctgtcctcacgacagtgattgacttctcaggagatctgcctatttaaaagtgtggcgcctggctctttctcttttgctcctgctcccaccatgcgagacccctcctccccctttgccttctgccatgattgtaaccttcctgaggcctcctcagaagcagacatctgtgttatgctttctgtaccggctgcagagccaattaaacattttctttataaattaccctgtctcaggtatttcttcatagcaatgcaagaacagcccaataccctgtgtcttcattcattaaaaggctactgaactatgcctactactgcattttgcagacttgcttttcctccatttagaactaatgtcttttatttcaagacctaatgtcacctcattcttttttcatgtgataatatcctctgatgtggcctgcgagttgcccataaggaatcgtggagtttgggatgatagttttgggggtgtgtgctattttgccttcttttttcactctcaaatataaaaaggatctaagtgctactcctgaagttatttgcggggactgtttgcactttcttgcttgaggtgtggctgtggagggcaagacagacaaaagtccaaactaaatggaaaatggtgcagttattgctgaaataggtttcccaccatctaattcctttgtgtgctactggctgaaaaagtccttttccttctcagctccacagctactttttcaggacagagtctgatttacatagacaggctgaatgcagaagctgtgtgtttaccatgtgaatttgaggccactgagaagattattttgttgttctgatctcttgaccttctgaaagctcccatcagacctttctcctcccaccttccaccacactataaataaaagccaacccataagcacccactcagatgtatctgcttcttaaatttcggaatcgatttgttaatctcaaaaggccgtaaaaacctgaaaacttaagtagctaacagagaaaaaaaaaagttcaaacagattcttggaaggctttgaagctaggatgcttggggagcatctttgtagtctgttgagggattagagacggcaacatcatgtcgcctcgcaagccagaggacagctttgaattgcagccaatcagaagccatagtatgtttttggaaggtggtgggggccagttttttcccttcaaatagctgacatttcgcagcccccgtccctcttggagcacgacagccagagagtatgcaatttgtttggaattctctcacaacagtcctagtttgaggctaaggctaggttgtgaacatttagagtttttgtacgtcttgacaaatttgtgttcatcaggtgctccgtgaccatcagtattgttttggttatacagaccaagtgttctgggctcagatccaaaacttgcacaagtaaatcagcctcagaaggcagccttagagatctttgaaaagtgctgaagtagggctaaatattagacaatctgccataatttaagttttatatgtatgtatatatatttatatatatatttaattcacagcagggagcagtacacacatcgtaagagagaaatctactttatgcagagttaattggatgataccctaatttgatgatacccacatcattcagtaattcagttttgcgctttctttctttttatgcttttcatttaaaaagcctatttatatgatgttgaggagtttgttaaaattagctgatattttaggatccttttgacattttatatgattataggacatggggacatgagttcagaaaaattggaaggctctcacagttgaagaactgccatatttgggagtccttggcaaagttttatgtaaactgtatgttttttacttagggagtctttataattgaaagcacccatcatactttgtgcatggacttctattcacagaatgaatttagcaaagctattgggcaatataaaattttaggataggaaaacatagctcaaatgctatggtcattgtggatctcagactgagtacaaggctgcaatattcactcctgaagctagaaacaaacctcaatctgaaaccatgctggaattctgtaattctcttccacaaagctaaagtagaatgtgttgtgttctgttttggtctccacagtttaaagaggacttctaaaacagaggcagagttcagagatgaatttgagtttaaaaatacgattctaagtaaagatagaaagtgggtatggttgagtagaaatagaaacctgatcgtgactcatggtgtccactcaaccaaaggtagtttcctgggaagtagaagatccttcccctcaaaaaggtcagagaaaaggccccacaaatcctcatatttaaagatatcttataagagtacacaaaaatgatatagcataagagggagaaattcagagtatttctcttgctatagatgaacataaaaatatttgacatctgcggtgcctatatagaaactcaagtacatggagctctaagtctattcattatagagcattcagaaccctgggcaaaccaaaaccaaaatagtggtgtcaacccacttctttgacatgccacaactagtggcagatacctcctattctcccccttaccagggacattctcccaaatgtgtcctcttgtgcgtggctcaccactgaggtgctttgtcactcaccttctctatatgatttcagtctgactgtgagtgggtactgtgatgaagcctttgtccacctctcctaaaccttgttttaaacccactttactgaaggtgacatttccccagttattccttattcacatctcctttgtaaaagcatctgaaaccttcacgcagaagccaaagtgtgttacagttctgagtaaagaccccattaaatatgaagattctagggctagtggatctctaaccctaggtgatctctgcaataagtgcagtgaaaccatggggtcagagcctcaggaaatggtagagttgaaggccaagatctgctgattgataacytcacagagaagaaaactcaagaagaaaccaagggactgaatgaagaagaaagaaaagagatgagatggagtaccccatctctccctgaggatggaaggagggaggacagaggaagagcagcacagaggcttccaggtggagagaaaggtgtagctgttcaataatctgatgaaagtgataggaaggaatttgtgagactgtgatatcaatgaccttggacttcttaccaaagtatgaaatgcagtgtgatttttccagtaggatgatgcatagagctgaagatcttgaggaaagttgtaaaggaatggtgctatggtttcagtatgtcctccaaagtttatgtgcattggaaatttaattcccagtgcaacaatggcttttcagaggtgattaggtcatgcatgctctgcccttatgaatgaatcaatgtcattattgcaggagtgggatagttattgcggaagtgggttcctgattaaaaggatgagtctggctcctttactctcttgttcttgctcccagtttcactcttttgcccttccaccttccatcatgggataatgcatcaagcagccccttgccagatgcaggcacttgatcttggacttcccagcctccagaactataagaaacaaaactctgtttattataaattacctagtctgtggtattttattatagcaaccacaacatggactaagacaggtgggctaactattgaactgaatttttggttcacatttattcattcatctatgcaataatattcatgctcttcattatatatccattatatgtgttaggggcatgtgcagtgaacaaggcaaatgtgttccctgttttcattggtggggaatgctcttgcaagtatggtttctaaaagggcagtgttttatcccctgggagagtgttagagatgggagtatctaaaggcgctttggctcttccctgcataatacatatgctcagagttcagataggtcatagagtgaggcagtggtagagctaacagttttcatataacaaacttgcctctttttccccaactagtaagaagcattagtacacagaaaagcgttgattctggagccagactgcctagttcaaatttcagcttccaccgcttaccagctctgtggcttcgggccagtgatttaattcctcagttacctctaatgtacactgggagtaataataatacctacttcacagagctattttgaagattaaataagttagtgtttataaaatgtcttggcacatagtaagcactctatagctattgacaaataaaaataggcccttagacaaaatctagtatgtaaaaggcaacagagagcatgaattagtcggtctcaaggaaggggcaatgctactccctagaaaatatttcagaattttgtgggcattttggttgttccatggattggggaatatggtgggaaagggccagcacattcctgcacaagtttcaaatattctagcagatatttatgcagatgcaaaaaaggcattttaaaatgatctgaactacatataattccaccttatatgtaggtgtgtcagtgttttattgagctgtgaattagaagtttcagagttttattctacactggatttccaggactgtgactgccttctaaattgagggatgatttcctttgttttgttaagaacattaccaagagttactcactatttcagaatgtcactgatacaccaatcctagcatttgaatcccaatgtaatgcacctccatcaatgtgtgacactcattgtggttctccttatttgtacaagcatctcaagacttcactgtgttttctagtgaagctgtaaccaatcactaatatattgagatgcatatgctgttagaataacttgctttccttttacatcttcatatttaaatgagagtattatattgtcttttaagaaatcrtatcagtggctagacagattgcatgatgaatacattttattttcttatacgtatttgttagtggcaatgttgggactgctgtgggtgagaacttctgctacaagcaaaggccctggggcaggtttcagttagagttatagagcctggatagttgttagaaggtgggatgctctctataagggaactactgctctccataaggaaagcatttgttaaatgggcaggaactgtaacmtgagsgatttagcattgtcttagcttgccaagctctagtttgttgatgtaagatactgacagttctctttaaatctttgtaaacaaggtagaagctcatgtctttctgatagagagtagtcactacacctaaaccaacagctcggatttatgtccaaatctatttacatactcacacaattctagagttaagttcgcttgctcacacaaatgtgttatttgacccatttctcccacaaataaaagttacattattagagggatacataagaatttgaattgttatatgttaaaaacttatttcttcacattgatgcatttgatatattattatttataagtagtacatgtggcccatttaaacaaygtgagggtttcataagtgattttttctttgggttgcaaactattgacaggtggggagtcaaatttgaatatctttgtgctcttgttaactaaaacaatgcctggcatacaataagaatgcaatacatctttgataaatgaatgagcccttatttgtggggtggtggatttgggaatgtaaatggagttaaagttatacattctagattctacttcctgatctgtcacttaactgagttttgaagtttgagaaatgacttaaaatcttggtatcatcatccaaaaactgcgattggtatcacatgcccaggttatgtataacatttttaagatcaaaagagagaagacagataaaaacatttgaaatccacaaagtgctaatcaaatacaggtgtactaaattccacaaaaacaacagaatcagattagggcttattcagagagaaatgatgcattcactaggggtttagttggttgaatagtgttccctgcaaattcacatccacccagaacctcagaatgttaccttatttagaaatatattttttgaagataaaattagttaagatgaggttatattggatcagagtggacccaaaatcctatgtggcatcctgataagaagaggagatgatacatggggagtcacagagaagaaggccatataatggcggaggccgagattggggtgatacagctgcaagccagggaatgccaaggactgccaggagccacagaagctaggaagaggcaaggaaggattcttcgctggagcctagagaaggaacatggccctgctgacaacttgagcttggacttccagcttccagaactgtgagagaataaatgtctgttgttcaaagtcacccagtttgtgacagtttgttatgggggccctaggaaactaatacaagtgttcattattttttcctcttctgaagaaagggacaggatcagaggtgaaataatgcttctggaaatttgcctcgtgtcctggcatcagtacaattggccagacctttatggaaatagaagcagttagcctaaggtttaaaagtactggctttgggacacagatgagattatggtttcatcactggcaacactctgggaagttggaaatcttccacttcccacctgtaaactccaagtgatgatagccatatccagtccattagttgacttgaaggttaaatgaaatattatatgcagcttgaatatatgcatacatatatcttctcaatgttaatgattattactatagactagataacttgaggcaaccatagttcaatttcagatagctctagtttataagactgtgagccaagaacttaaaaaaagaaaggtgacggttttcattttgattcaggactcgatcacctctttgtcagagcatctgaattagcctttgtcatcatgatgatgataaccaaaactggtcaattaacttcacttggctgatttgcattctaattgcaattttttttatatatcttttaagtaactgcaacttttgggcactgtttaataaaaccaagaaattgaaagtgaggagcttgaaaaagtccttgaaccttacaatttctttacagattctatatgtttcacaataaaggcaaggttttaaatctcagttatcatgagaaggctccaggctggctctttgccagtgtgtttaattgagagatgaacacgtcagattcatctctcacacactatcactatcactgtcctctctgagctcaggctgggctcttctgtcccccatcaataaataattcttccttaggtttaaaatctcaaatagcaacctaagtgcattaacaaaatatgtattatataagaaacattcagagaagagaagttcaaggtcaaagctaaaatttacacagagtttcaatatttaaatgggtctgaaaactccatattccatagccctgtacatttacctatactcctcaaacatctctttgcataattacttatgctgaattgaagcaaaaacatcaaaatgtctggaaatttaggtttcactttccattatttttccaagaacttttagtaaatgttttcaaaacagctttaatactatatctcatcatatagaaatcatgcaatcatagaggctcatttacatgcttcttggttccatagtggttgtatgctaattacacctacatactttctgaacctgacaagacagtgtttataatttggcttcaaatgctaatatatattttaaagaaattcagatggaaaatcatctttaaaaacaccttattcacatatttaccacgatcagtgcttgttattaatttctgaagttctgagtttcacttctcttcagcctagcttcctttagcatttgccattgtacagatctgctggagaaaagttctctttattttattctgtttaaaaatgtctctacttttccttcatttctaaatgatattgttttctagatatagaattctggggtaacgtagttgtttcaatacgtttatgatatttgtcaacttattgtgcctgttgttattaatcactcaaattcatagttcatgtctaagtaatattttgtattactctagtggctttcaaaattttctctttacttttggttttcagcacttatactatgatgaatctaaacatgaatttctttgtatttattctacttggtttttgctgagtttcttcagtctgtaaattcatgtctttcaccaaatttggcaaaattttgttcatttcttcaaatatcttgtcccactctctgtcttctcttcttttgggactccaattacatgccgttagacttttttatgttgccctattttacattatttttaataattttgttcaatatttgtcttcaatattgtaatcagatgcaaataaactggctttctcaaccttrattacatcagccttctctgtgaaataaattcaatcctttattacacagtttttttttacaacagctattcaacaaatgtgtatgtcatcctttctgtaaatgtgtcatggtaatagtatttgattagctaaattatcatttcactcatgagtgattacctatgtccataggtctactgcctgtcctaaattgaacagttttgtccacttaaaacaagcaaacttccactgataggtaaatgttccaactttactgtagcttgcagcagtgcctctgttaagtggaattctatttctgccacagcatcaataagctttcctgtgtatgtcccatataaggacctggttgcatttctattatggaagccatagttgccctgctaaggagtcttgccctttcagggaatttgtgcttcagataaactgccaaaacccaggccttctttgaacatttatattgtctcacagctctatttagaacagtctgtaagatcactctgtcctgagtaagacttgaagactcatttttaccatcacattggataataccctgcaagccagccctttggaggaatcaaaattgaacaatcaagcctgaggacttgatagagtctcaactttgactttttagttttttttytctctctcaatctttttctttcttaraaaatagaaaaatgactgcttactactgattgtaatgtgtctcaacttttgaaattcagccttaaacttgttttactgtgcacatttgcttttgttgaattaagtccaggtctcttcatttcccagggcaaaaaatcttggttaaattccatgggaaaggattgtgttttgggtatgtaaacatctatccaaatacttgtagaattcaaaaagagcatacattcttaagagtgactcagttcaaacacatgcgtgcagattaaacgtcttctttaaggaagcatatagttaatagttttaaaaatgaatttccccaacctgattcaaagaactctcattcttccagaataaaatatatcttaacttcaagtgggataattggcctcacccctacagtgcttgcttggcgtctagcaattatgcactagaaagcacaaaagggatagaattaataggtaaattttagtgagatttggcatgtgtgaggttaagggaatttttcaaagttgcttataaagttgcatacagtttcaaattgttttcattttgagttattttggttaaaaacagaaaccacattttaaacaagcagtctgcttaatgtaaaataaacatgtaacttaatttgcacatttgttgggtgcttgttttggaaatcattgtggtaaaatggaaataatcacagaggcttctgagccaggtagatgtggatttgagtcctggcttactaattctgtggcatcgggtaagtttctgagctcttcttagccaccatttctttttctataaattaaaaatgatcgtatctatctttaagggtggattagagggttaacagttcagcacccacagggtttttaataagtactttgaattttgagaatagacaagacctaaacattaaakattttgcttttgactaataacgtctagattattagtctaataacttcaggctgttcatagtgatcttgctgggttgaggcaattgagactayattttgaaatcttttgttttgtgaagtatacaccacacataaaatgcataaaccataaatgttaatgaatttaatagtaatagacacctatgtaatcatcacgcagcatatcagctttaaaaaaaatttttaaagaactttttgatggtattatagcaaagatacagaaaagtgaacaaatcataaagtttataattcaaaataattttcacaaactgaacaacctcataaccattgcctgatcaagaaataagacatttctggcaccatccccccgcccaccacgccacccctagaatctccgtgtgttctttctattcactatccatcctcaccaaggtagaatattctgacttcctctcattagatgagtttcgtctggttttgaacttcatatacacggaatcacagtgtgtactcatttatatcatggcttcttcagctcattatgcttgtggtattcattttttaaccactcattatggaaaatttcaaatgtacacaaaatatgagaaagtatagtgaaccctaatgtgtccatcacttctttaaaaccatccttaactcataaatactttgatctaaacaccgtcttaattctctgctgtccccaaggcaatggattattttccccaaacatcctatcatttcatccatgaatattttagtaagtatctcagcaagaaaaggattctttttgtcacatctacgaacttaacagtaattacatgttttcaatatcctatcttggatcagcatttctccattgtgtcataagggtttttttgttttgttttgtttcttctgttttgtttttttctgcagttggattttttacaatagggtctgaatgaagtgtgaagataccttattttaaatgcctaattgtaaattgggggagagtcccatttatataaactgagtctttgagttctttatggctcatgtgaagaaacaaacatcttgcatattttccaattaaatatgttgaggcttatagtattttagaatattagaattcgagataatcttatagtttcttgatatcttgtgtcttggcatacttggaatcccctctgtgttttgaaagtgaacttttagcttcaccgactttttcacctttggtattatagagtctactttctgctatttttgctctcttgatttacctgccaagtggcaggcacaatgggcaattttagctcagctcatctgaagaaattcatcactgagacctacaaaaattccttgaaaggaacagagaaagccaaggttgttctcactttcagttctcacttttgccagttggatgggacagtgactttaaggatataacaatacagctgacacgattaggtgtttgtttaaatgatttttcatttcaagtttatctttgtttaagctgaccacagcaaatatttgatgttaccagttaaatatcttgcagtcttttcacgtttaaaactttttcagccttaagtttctgccttcttatttgtaacctgtacaagggttttcctctctgtctcttccatcacgggatggtgtctaggcacatggtaagggccatcttgttcttgcagttgtcactggttggttgagggctcttatattgtttaatgtcaagccaggtcttctgtggttattgaaaattaagtgtcttttgcaggtcattctcacacccctgttgatgatcttcactgttgcttcgagccataagcttacctttcactgtgaactctggccccaaccccagacctacttctgtccactaatcctacagcttcccttggtacttgtgcactccctgctgctttctctccactagctgtagtgtgttggaccctgtgaggtcacctttkcctggtcacctccctcacgtttgccatttgactgtgcccaggtcatactgagcacactgccaggaggaaggttgagcttggaggacatgaatgaggagaagctgggggcctatagcaatgattttagaatcattgattcaaagttggatgctttcctcatatcttctgcatttccctgaagaagtttccaggacctctctatctcctttatattataacctcctacttccttctccatggcttgtttcagtcttccagaattgacgcaatgacttcctttaaattaacaggtaatgtgaaatagtctagttgccaaattaaagagaaatgaaaaggagcaagtaaaactaatttttttttttttttgagacgaaatctcactctgtctccctggctggagtgcagtggcgcaatctcggctcactgcaacctccaccctctgagttccagtgattctcctgcatcagcctcccgagtagctgagattacaggcacctgccactgcgtctggctaattttttgtatttttagtagagacagaggttcaccatcttggccaggctggtcttgaactcctgacctcatgatccaccctccttggcctcccaaagtgctgggattacaggcatgagccaccgcgcccggccaagtaaaaccaatttttaaaatatttttatttagcctaaaacatctgaaatgttatcatttcaacatgtaatcaatataaaaatttattgagatattttacattctccttgtcttctttttttgggaaggaatgggtacagagtctggatcccagagtgtgtatttttccctcacaatacaccttagtttggaccagccacattgcaggactagaggctaccatattggacagaatgagtctaggtcatgaatgaggaagcttctagataattttaagagaaaagcaaaaacaataaataaactcttaggatggtgcggctttgcctgtctacattagcatttcattaactccaggtgcttgtttcccactgccacttggtatgtaaaatttgtcttccactcaaccaggcagatttttgatcacagaaattaagcctctggtttcctctcaatccacccaaacacatagcatactgctgacctcacagcaggtactccagccaaccaatccctgaattaaaaactgattacaggcagctgctcgatgccttgccacttccmctctcagtgagtccattttatttgtctgacagcaaagctccaattctgtcttcacccctaccaacccacacttttacaaattgctttttagcttaatgttgaaacagccacgctttaaaaatatcatttcattatgtacaggttggcaatcaagaaagaaaaattcccataggactcaaatgaaacaaatctaaaaatttaggactgaagctcgggaatggtcaatctgattttaatgctctcaagagtccacataaaatatatgggcttagcaaactttctgggaaaacccactcaaagagatgacttattgatgcatggatgaagcaagagtgactcccagattttatccaaaaatatatctaatgatatatgaaaatgatcattctagttaaatatattctaatgatttgaacatatctaaataagttggttctatccctcataaaatctaatgacaaacttcggagacttaaaaagtgtgaaaaataaaagtcgaattctggagggtaaggcaggagaattgcttgaacctgggtgggggaggttgcagtgagctgagattgtgccattgcactccagccctggcgacagaagtgagactctgtctcaaaataaataaataaataagataagataaaataaaataataaaataaagatgaataacaatcggcccatacaatttttaccccagcaagaggatgtttggttaaatggccagcactgattattcatacaagtacccacctccccactatctcatacacccactcagtcaccaacctttatagagcacatctttttaattcccctcaaagctgcactttcctctctgttccttgccatccacctatycgtctggattgctggaatggcctcctgacaagtctccttgccttctctgtgcatccccacccccgcatttgtcctccaggtcagtgtttcaaactctggtttctgttttgtttcgtttctgagactgggtccttcacccaggctggmgtgcagtggcatgatcatgatcacagctcactgcagccttgacctccctggcttaagtgattctctcacctcagcctcccacagaatactggaattacagatgtgcaccaccacgccccactaatttttttttgtatttatttatttatytattwgtagagacaaggttcatgttgctcaggctgaactctccacttgtttttcagtttttaattttttaattggcatataataattgtacatatttatgaggtacatagtgagttttgatacatgtctagtgatcaaatcagggtaattagcatatctatcacctcagaagctcacmatttgttttgttgggaacattcaaaatcctgtcttatatatattkgaaaatatatacaatttttgactgcagtcatcctacattgctrtcgaacactagaactcattcctttcatctagctgtaattttgtgtcctttaacaaatccccccatgcaccctccccgctactcttctcaccctctagtagcyactgttctattctacttctaagagatcaatgtttgtagcttccgtatrtgaatgagcacaagcagtatttatctttctattcctggagaagagcaggctttttcctgaatacattgctgtccaatattactataaaacataatacacatgaattattagaacaattaaatgagaaaaacccaggcatgcaaaatattaaaaaatatttaaaacattattttaaaaatttaaataattattaatttaaatagactaaaattgctctctcaacttgctctgtaagttcccatatttactctcagtttctgtacttatcttcctgtgagattttaaaacagcttggttcataattcaggtagcactgatatagatccacagtccaatactatagccagtactcacatgcagatgtttaaagttaaatttcaattagtttaacttaaattcattaaaaatgcaattcctccattgcattagccacatttcaggtattcagtagccatgtatggctagtgataactatattggacatcacagatatggaacatttccatcatcgcagaaagttttattgaacagtactgctgtagacccttgctacttacagagtggtccatgagccagcagttcttacttcacatgagagcttgctagaaatgaagaatctgagctgggtgcagtggttcatacctgtaatcccagtactttgggaggccaaggcgggggtgggtcgcttgagcccaggagtttgagaccagcctgggcaacatggtgagagcccatctcataaaataaaataaaataaataaaataaaataaaataaattaaaaataaaataaaaaaaataatttagccagatatggggacacacacttgtagtcccagctacctgggaggctgaggtgggagtatcacttgagcccaggaattcaagcctgcagtgagccatgatcacatcaccacacttcagcctcggcaacagagttgcgacttggcagcaaaaaaaaaaaaaaaaaaaaaaaaaaaaagaaatctgaaaaacagaaaacaaagtaggcctaaacctcttgaaacagaatgtgcaattcaataagtttcttaggtgactcctatgtactttaaaagtagaagccctactctgggatgtttctaggacaatctaaagtccaaatctgatcagactatcctactaatccttttaaattgatacataatatgtgtacatatttgggatacatgtggttatgggatacacctgatcttttggtacatgcttagaatgtgtaataatcaaatcagggtatttaggatagccataaccttcaacatttatcattttttgtgtgtgtgttggaaacatttcaaatctctcctagctattttgaaataaacaatatatacaatgtatcattgttaggtatagtcatcctactgtgctgtccaacattagaatttattccttttatctaactgtatatttgtacccaccactaatctttccatagcttgcaagaccagctctatctaaagtggtaggtattagccacatgtgtttatttcaatttcagctaattaaacttaatttacattaagtttaatgtcaattaaacttaaagtttaaaaatcatttaaagttcaaaaattattttcccagcccgccagtcacatttcaagtactcatttgtcgcatgtggctggtagctactgagttggacagtgtagatacagaacattttcttaactgcaagaagtttgattgcacattgctgatttagactctagtttaacatccagagatctcatcatctagcagaactaccccctgcctacctctcaagcccccaaaccatggtgcaccaggttggcccttgtctctaacacaatgagttacgtaatttagttcctatgcaccatcaccctcattgttcctttaccttgaccactatttttccattcccttctttccattcaccyctccataatcttcaactaatctctgtgtcaaaatttacctcatggtcagctgctccagaaagcttttctagaaaccatcccatgctgcaaccctgccacaatttagattgtcccctttcatttcttaggtagaagcctatgtatgcatgtatcacatgcttttgctgttgayttattctctccatttagatcagcatttctcagcctcagcactattgacatttggggccagataagataactctttcttgggaaagtagacagctgtcttgtgagctgtaaaatgtttagtctcattcctaacctctactcactggatgtcagtaacctccccagttgtgaccatcagaaatatatctgcacattgtcaaatgttccctggggagcaaaatcaccaatgcataagaaccactaccttagacctatctgttttctaaggagagcctcttgaggtctgtgagacacttcaaaccacagcatggtacataggtcctgcacacaattggcactatgttggtatacatgctgaatgaatgattgattaggaaatctgttgtcagcaggtgtttcttctttccttgcatcctttgtttcttctttcttttattctgcttctttgcacgcattcccaagtctaagcaacacattcccaagtctaattctatttcatgagtgaacccattgaccaaacaggagagccctgcagggcagtcattgatcataggtgtctcccgtggccagttggtttggttggctgatccacagtagagggatagacaaaattatcaacctcttaaaatgaagactgggactgggaatgaatcagatgtaacagcctccctgtgatgctcagttttattagctattttatatatactgtatatatgtatgtaaaatagctctatcttatgtaactattttatatagcttttagctatgggtcagagtcgccaatctatcatcttttcagccagctgtcaacacatggtttcagaatttggaagaaacctaaaagattatgcattccagcagggcttggtggtgtgcgtctgtagtccctgctattcaggaggccagggtaggaaaattgcttgagcccaggagttcaaggctgtagtgcaccatcatggtgcccgtgaaaagctacagcactccagcctgtccaacatagcaagagcgcatctctttaaaaaagagagagagagagagagagagaraaaagatcatgctttcagattcctcatttttttctacatctggacactttccttaggtcctactccagccatcattagcatcttaagataaagatagaattttgaagttccatcatttataaccaatcaaatgcaaaattataagacagtgatattcttgatttgaaagctstaaactctgatgtctgctgctctgctcttcactagtaagttccctggcactagagcaatgttataggatggtgacctagtttagctctaccgtatttctcgagccaagtagagaagaactggaagttctctgccatccaggcctgcaacagctttggagtctctcatttgctttgctcttcttctatctggaatcctttcagaagcctgatcccccacttcgtgcattctgaaagtctgggccttatagtatttgtgcttcttgctgggcaccatttctgcccagtgttacctgatatgtctttacacacctagctctaattgtcctaatattggcattctcttgttttggactggaggaaagatggttaagtcctctctcctttcttggtttagcacttcttgcaatgtttttctagatttgacctacctttaatctctgcaggcatggtccaatacccttctagcagctggcgctggcattgcaatgtgaatctgccactatgctatgggctgggctctaagtggaaatatgtatacattttttcactgcaaagaatcagctccctctctcactccaggagatggttgcctcagccctgtcacactcttggtcctaggcagctttcagcttcctctgtaactcaaccatatggccagttagatggattgagagcatgaccaccaaatcacctgggatcctacttatcacaaaaccgtgaagctttgttacagtcatttattcaatcccatcaaatatttatcaaatacctgctctgggatagctccagtggatacagtaagatgtcatattcatcaagctgctggtcatctaatgggaataataatgaagcaaaaacatgattattgtacagtgagaaatggatatacaaagggatatggaacacagataagggggaaatcagagaaagacaataagaatgaatcctttttagtaacagtgtactgtgtgccaggcaaggtgcttgtaatttctatatagtttacatttctatttaaagtctcataaccacttggtgaggcagacaggcattcgaaaatagcggaaaccctctttagaaattgataacttggttaagttgattatttttttctttcctttaccttttcttgaaatataaaatgcagttaaaaaggtacactcttctaaatagtatagctcagtgagtttttacaagatgagcacatccctgtaaccagcagtctgataaccacattaagaaacaggacatttcctgcatcccagaggtcctcacatccccctaactgcaccctcctcccaccaccctgctcccttcctgaattctgctgcctctctacccaaggctaatcttctggctttaacagcatagataagctgtgcctgttttattcttacgtcaatgaaacaaactcatctactctttttgtgtgtccacattttttcactcaacgtggtgtttgtaaaattcatcccacattgttgcatgcgattgtaatcctcattgctgtataatattccattgtgtggatgttccatttattcattctactgttatgggcagttggatagtttcatttttggatcatagttcatagcattgctatgggtattctagtgttcatattttcttgcacacatgtaaaaatttctgcttggtgtgtgtcttagagtgaaactgctgagttataggcatttgtgggattgaaggtggaatgggaaagagacgtatgcaatcagctcacgagctggtgacactgctggtaaaagggagtgcctatacctagctttaatagatattgccaaatggttttccaaaatggtttaaaagtgttgagttttgaggagcatgcaggagttaaccagaaggttaaagtaataataataataacaacaacaataataaaagggagcagggtggagttacagaaatagtgttacagaaatatgcagtgtatgattgtcaaatttggttgttactggttagctgggtgcatgaatttgcaatcctgtcatgtgttcattttgcttattcttccctgaaatttccagccactaatggaatgtaacactttaccctttttgaacttcttccttctcaatgcagtaccacattaaaggtcaactgtgaaatttccacgtcctattaaatactattcctagagctggatataatatttcagaatgctacccctgttccaagacatacgcatactttagtgaacatgaaattctgtgtttgaatatccagatttctttttttgcctctattgtctttgctttgactttgtggatttggcaatggttgataaattgttttagagtagaagatcactagattagaaacagtatttaactaaaaatagacctcttggctgattatcagtgtctcaagagacagtgtgagtgaatttctgtttctttttgccatgatgctaactgtcacccggaatataatgcttactggcttaaccccttttgttttttatattatgtttagaatgtgtatgtctccttgtaagaatccaatttgaggggttcagaaacacatagtgaatatgcctgatgagtagtgatttttcaataatgatttttacatgttatgtctcctcaaagataacaacagagcaccatgttgcctaaattcatgtaacttccttctgggttaaactgtttattggacatttctgaatatatgcaccatatgtggctatctttcaaagtatgtgtctgagatattattcagagccttttccagccatttagagatatatgtggagcttagagagaataaaaatataatgtgcattatttactagtaattcacataaaatattccatttctaaagcatgttgcagaattattctactggtaaattaagattgaagttgtccttagataatagctagcagtataataaaaataccacataatagaaattgattctgaaatgtaagaatgttttattattggaaaatatatccatataattattacttctacagataaaaagaggaaagccacatgatcatactgataaggcaacaaaaagatgtgacaaaattctaataattttaaaaatctcttacaaattagaaatagtaagatgctatcacaaaccaacaacatcatacatgatagtaacattcttgagcatgtctctaaattgggagagagccaaagttattcgtgcacgtccctattattgaacactgcttaataaaatgaattaagcactataaatattagaattgtcattttataacttgcgtatgagatgactgtctaccctgaaaaaacaagatcaactaaaatgttaatcccaaggaagagttcaacacggaaattatttctaaaatacttttataaaatgagaaagttttttatgtccagtaatcaaaagttagtgaagctgacattcaaaacctcaagctcaaatataaaggacctatatttaaaaaaaatcttaaggcgtgtataggattcttgtattaaattgaaactctcaaggcaatccaaagtagttttaaataagtagaagcactatatttctggaaggaataatattttaaagatacatgttctttccaaattaaattactacaaattcagttaaagttaggaaggtgtttttcaaacttggaaaatgactcaagttaatttgaaattttttgaagaaactactaaaaaatgctgagggaattatgccaaccaaaatttcaaatatagtgtaagacaactaatatagcactctattgatatggaaatcaattcatcagtaaaacagaatagaaagttcataaatacactaattactataaaaaataacacaggcacagtgactcacacttgtaatcccagtaatttaggaggctgaggcaagaggatggcttgaggccgggagtttgaaatcagcccagataacatagtgagacccctgtctttacaaaaaattcaaaaaattagctatgggtagtggtgcctgcctgcagttctagctgctcgagaggctaaggcgggaggatcgcttgagcccaggagtttgaggttgcagtaaactataatctcacaactgcactccagcttgggtaacagaacaagaccccatctcaaaatattaattaattaattaatataaaataaaggtactaaatcaattgggtaacacaggattattcaatgagaggcagaaactacaaaaggagagtaaagacaaacttgatagcaccattatttaaaaatacttctacacaaaacaattcacaaatgccaagtccgaaccaaacaaactggaatatttttgcaaaatagatgacattttagaaactttaaatccttattctgtactagcctttataaattaaagaataatagaaatatgggtaaacgatatgaatgggaaagtaaagycccccaaagaaagaaagaaatgcaaacayaaatagatatgagaaagttattaatttcagcaataatcaamgaaatacatactataacaataattattttcacccataaaatttcccttattttcaaaactaaaagttccagtggttgacartggggaggttaaataccactccaaggtattttgcagataatttacattggttcagcttttctggtagcctttggcatatttatcacaagcatgaaagtcctcaagccctttaattcaaaaattttatttttaatgtattattctaaggaaattataatgaaagtaggcagacattrcaaggaaattgcttgtagtactgatcaatagtataacaaattgaaacataaactgtaagtattcagccaaaggaataaattaaataatcataatatatgtcaatagtggaatcgtaggcagacattaagaaagctgttaccaaattaaataatatataaatatgttcatgctctagtgtcaagggaaatatgcagattacaaaggaaaatgaacaataagatcttattttttaaaaagaaaaaatgcccagaagtcatatggacatgcacgaaagtaacagtggttttctctgtcttgtgtgattataaatgattttaatttacttacttgtacttgcctcacatttgcaagtgtttttctacagcaagcatatattacttttataacatcatgataaaaatcatatttcattgtattttacaatggacattttgttttctaaaatcagaaagcagaaatgaaataattataactatatcttaattcagagtttaaaggagaaatctccatttactggtttccccattacyacttaattggctaatctagtttttcatttaccctgatgtagacacaaatagaatctgcaatataatcaggcaccaaccatgggattaattagctaactaattacgtaaatgggatcccagttttaacagtcatacctctgcaaaaattgtctttttctttgcaaaaacaatgaagtgtcaacttttaaaaaattaatcctgccaacttcttataaaaagattgtgtaatgtcttggggaaagatttaagatatacaagttaaagatggcctttgaaagacagacagatttgaatttaatatttgactcttttctaagaatttaaaattattctcaaagacgaaaatgaatggtctgaaactcaacgaaatcttttccatgtgagttatgcactcatggtgtccctgtaggagttagagaggtgaataaattgaacgagtaatgatttgtactcttaaacttcctggaaggagaagtggcttggagggtgttggtgggaatagccaaggtatgactgtgatttcaggtaagataatttgaggagctgacaatttacctgcgtggaagtatccagcaggcatttgggaatatgtaattggctcctgaatcagacatgtcagtgaggtgatactcatataggagtcagttacctaaaagtgacagctaaaccttatgaaggcaatgaattccaggttagtgcagagcctctgcacagttccaaacccaggggatgctcttctcattctcttatctgaagttaagctccagggcttatcattcacataaactacattatgaacaatgctgtttccatctctctatcatgccagatgtcatatactagatgaggtctctcagaagagctagacagaagtataaggactcacctttatatatacaaagtgaggaacaagacaatatgtacaaggactcatattaacatatgcaggatgaaaggggaaaaagaggtcagttaattggttttaaaaaaaagatgaaataagacaggctcaaggaaaacggaaagggggcaaaattgcgggaagtgtttggcctgtggtttcaaatgttatagacagacctgaggcaatgataactgagacaagccactgggcctaaaagtatatagaaatgggtaatcttagrgatggtggagtccattgagtaaatgggtggckggggggaagacatcagaccccgagaagcagaagctaaggcctggggaggaatggaagactatggacttaasagtgtagcatcattggtcgaaagacttttatttatatttagggagactagagcatgtctttaggtagagcaaaaggaagcaggagagaggggaacactgaaatacaggaaaaagaggggatagttgagtaaacagaaagaaccctaagtgaaagcaggaggagattggagcagtataccaggaccgggatgagccctggaaaagagaaggagcacctatttctcagagctaggatgagactgaggtggacagggaactaacgccttccagaacagaaatatgtggtccgatgagtattgaatgcaacttaaaatctagttggaatgtgatggataagaagagacccaaagtcatcaacaagccttctcatgaactttcagtcattaaccttcctatatagtaaggacagaaatgatgatttaagccatcttaggcaaggcagtgctaacaatatgcttttgtaaagtcaccatccggtgtaaggmataggcaccagcttagtgatgtttgcaaataagccagtggtgggtgtggataaattagagagagtaccaaatgcagtttgaaaagtgttaagttttgtctctagtaaattgcatgtagttttaccaaatagtgcttcagtgttctctttgtgtttcctctttctggtacttaaaaaaaaaaaaaagtaaagtcagttcatgtagctgtgagataaatcttgagaaaaagagtattgaatagggtactgagtttattggttaacacttaggaaagataygatgcttgataggagatcctttttattaaacacaaagaatagcattttattctatgccttagaattttgtgatagaattggcaacaattcagttcacaaagagccttagcactgtggccactaatgcactgtaaaatgggtttttgttgatgttgatttggaggctgtgttaaatatcttgcccacagctctaaggttttgggtacaaatctataaaactatttcacatttatgctacttccttttaagacgataggtaattcccaatgatttgcttataaatcagttatggtttacaaagcagaccaagagacattcagatttctgaaaacaaattatccatagttttctattaaacatagaactgggaaaagacttagtgattacttagactatgcctctgatttttaaaacgaattgtaattacaaccataatctatgattttttttcatgaaaaaaaacaaaagctgtgtgaatgaggtcagtaacttcctcaacacctctcagtctcccaaacaacaacacaggttaaccgttatcagtttgctgtgaaaccttccaaaattttcatgatattgacacacacacacacacacacgcacacacacacacatttgcttaatatgcagtatttaatgtatgttcaatacatagcatttttttgcattttgctttttatacttagtgatgtatcttagagatttttgcatatcagtatgcctagagctacttcactatttttatttgatgcamaatatttcatcacatggatgcgccatcatttttttcactttctccttaaatggatatttggcttgttttaattttttttctgttaccaatgatgctggaatgcacacacctccttgtgcataagtattggccttctttgggatacatagggaagcgtaaatgcattttacattttaagtggcattgccaacttatccttcaagatgatagtatagcagccttttaattttagaaattaagaaggttaagaaggtaaggcacagagattttatagcttgccaratagcataacaatttaggaactagaaatcaaatatcctatttcctttatagatttctagtgtctacatcaaattttttccaaatttataaaagaagaaaataatgtatattaaactagccccatgaaattttgcttcatacttttcctattctttaccagcaaagcaaaaccagttctgattggtcatttaaatcaatgagttgaatacaaacagaagtataattgccaaattatgggttttgggaaactatgrtgaacacgagattctttacttgtctgttktaggttatttttccaggttatgtgatcctgtgatcacatatctgccaacattttcatgttttgggtatttcctaatgtaattgaatttctcctggtttagaaatttatcaacagaatcatctttatttcttcccttgatgtattcccaaatgtaagaaaaatatgcatagtgagttgataaaaagaatgcaagtaatctacttgaaaaattaagcctctactttccaggaaagataattttaatggggtttgggttcattctctatgagtccttctctatcctaatgtcatgttgggtcacaattgtctgatgatcctggctaagcatttggttaacctcattttgggtcctctttctctcttcacatggaggagcacagcacttgaackctctcgtgtttgaggacaactgggctgacatcgagtgaatttttggaaaactattatgtctttgtagtcacttaatgtcagcttgatgttgaagcaaagttctgtaggagtaaaaaaaatacaagaagtgcaatgaaatattaattaggcaccgagtagaggcaaggagctgggctaggcatttttatgtatgttatctaatctatgctcacaagacttacaacccatgttgtaagtcttgttttgtttgatttccgtatcaggaaatggaggctgagaaagagaataacacatcaactagtatacacagaggttctctagctttccctacttctttctaccacccttcctcccacctcagtagaaatcagtgaacactggagcaaagaagtcctcttggaagaagcagagttggagctaagtcccaaaaggtggctgagatttagatgattgaaggaggagggttccacatttaaagagggagagtagtctgtgtaaaggcacagatgaagacaggcatggtacacacatgctttcactgggttaatgtacaagaacagagctctgttcaactggctttgggaagtataattttggaggataaagggcattggcaagaaactcattggggtctcatgataaacagccagatattaggagtcaggagctagaaggactccctgtgtctctccagagaacttagtgtctcttctttctcccttgaccttcctgctacatgtttctgttgttgttgtttttattttttttctctctgcagaatggcttatttgctctacccagcgtgtggtcacatcagctgcagcaaagattccagctactagcatcactaggcctcagtgccagattccacgggccagatgtctatccctggtccactcagctatgatgaggataatgctttcagattcttgtttacctcagcctgggagcaggttcttttatatcatggcacaagcagctcctctaagaaggcaatgattagtatttgaaccacaaggaacaggagaagtgaggggtcaatgtggtcagacttactaaggagtacttaaaggccactgcaaaacyaggcacytgatcctctaattgagaggggaagtttgcaagggaaaggtgtttgatatatggcaagttgaaagggtggagaggctgagcgccagaggtgagctgaaaggtaatggtaacaatagaggcctagggatacattagtcgacttagagagaaaagagaggaatggcaattgctgaggatgcaagaagttaccttgaaagaaggaaaagcaggatttattgactggttataaaggcagcttttagctccagggatagggacaaggttgtgtggctttgggacataaagaaaggagaaggaggaggaacctgaatgtcaggagagacataatgcttctggtttggaaatgtcatctctggttcaattgtgctatgggaataatggccataaggctacaaatggggtgtgcagagtgaattggataagatatgaagctatgttaattggaagttaatgagatgagaagtggggaattttggagaaaaacaggaagtcagtggccagtagcctcaaatctaaatttgcatcgttacgggcatgctatctgtgggtttgtgataggatttcactcagcttccaggtggctaggtcatattatcaggtggtgaaacagttaaaaaatatcacgacctaagataaagttttggtgtttgctggagcacagtaataacagatgagttctgttcggtagggaaaactctagaagcaagcccagcacttctgtggataagactgattctggaacctactttaaagcttgtgctaggcaaatggccgatgattcccaatgcttgccttagactacaaatgcaaagaggaaaaggttaattttctaacacaaatctaaatatttccttcttgtactaataggacctagccattctgtaatgcaggcaacataggtctgaaagaatggttgtattttggccaaaccatgaacttctttttgagaccctgccagttcctggtggaagccaggaaatatatttttaggcgtctataactccggctaagggagctatgtacctcctaatggttgtcatccaatggatataaatagaacctttaaagagacaagccatatgctttgtggtgcttactttatttaactccagatctgatttacaagcactttaattcctaaaaaccactctattttgttcattaagaatatgcaatgcacataggaatgctttgtaacttggctatggaatcagagatcaagaatattttcctccccaaaacttgtgataaggtcaaatgctaaaggcctatagtaattgtttttagctgttctcttagaattgaaaacaaatgttttctaataccaccaaagtggtgtgctgttagtaatgaatctgtatggcataatttcagtttcctcataatttttatgcatgacctcaaaattaaatgtggttctctaattttttaataattgaaagaataggtttttactaattaagatcagatttatactcttttgtatcagagaatgtcatggtgaaaattaatataacaaagtcatactgacatttactttagatcagtgtaaagatatactacatgtccactggaatggcaaaaattgaatgactggcagtaccacatttggcaaagatatagataacgagaactctagtgcattgctggtagcagtgtaaattggctactaccactttggaaaactatttattaatgtttgtctgtgccctacatatatctactgtatcagtctaagataaatgatcatatgtgtccactagaagatggttacaagaataatcatacagtcgtatttgtaatagccccaaactgtgaacaataaattatttatcaacaattggatagataaacaaattgtagtatattcacaaaatagaatactgttcagcaataaaaagaatgaactattaatccatgctacaatatggataaaatttcagaaatgtcatgttaagtggaagaaataggacacaaaagagaaatatgattccttgtatatgaaattcaagaaaggcaaaactaattgaagctggtagacatcagaagagtaacccactctcttcctggggagggtttttccaggaaaggggtgcctgataattttggagatggagatgtctaagtggtgctttcatgagtgtgtacatatgcaaacactcatcccactgtgcacgaaggttagatacttccccatgtatatgctataccgcagtaaaagtatgaaatatatgttttatacctcaaaatgtttcacaacacattattttctcctttccaattccacagagaagagagaggctaagtctagtacaaaaggttggttctgggccaaactggagaggagatgatgcaatggaagtatccaggcaaatacaaagggattttaacttgtctgtgtttattgcaaaaaaggaaatttgttatattgtgaaaatagtaaaatagtgtggcttaggagaggttctattttggagggggggatgtatgacaagtaatatttttatattttatatcatatccaattagatacattgaagaagaaaaaatgtgttttaattttaagcagagtttttacttttaaaatgtttatatgtatataaatatatacccactcttgtaaatagagccttatgcatgcttgtggagcattttggtgcagtcttttttgaaaatgttttccctgtttcttctacctcttttactttacctctctattgtcacaacctatgtgtgtcctacttaatatgtaagctcatataataaggcatacttatcacataaatatgtgtgtatgggtgtatatgtgtacacccacacatactaacattcatagataagtacagctttatttgtctttgtgctataaaaatgatattatagtatgcaaacttccctgcattttgcttttattcacccagtaaaacttcatggaaattcctgtaagtcaacttgtatattatggtggcccagtagtccctgctgtagatatagcataatttacttaagcagttctttgtttataggttttggttgggcaaggtcttttgtgtactacagtgagaaagctttggcctcagaaacagcaatcagagtttgtcacttagatggtctgagcccatgtctcctcatccatcaaagggagataaatttatacttggccactcacaatacagagcaattataagaatcaaaaagactatatgtaagagtgtatgcgtttggtatgatggaaagagcattgccattgttaacaatcaaatttgtttgtgtttagtacttgctgtaggtgaggcactgttctaaggtcttttcatgtatttatttaatatttacaataacgaaatgtggtactgtgtagtattattcttttaactctttccaaatgagggaattaagaaaaaattgaaataattttcacaaaatcagcaggagacctcagattcaaatcctggattttccatttgagtgtctgtgatttttatctaccatgcaatattacttctcaaatatgatgttcaccgtaccttttattttgtacatgagcattcattggtaacatgaaatagggtggtttataggagaatgatctcattacattgccaatcataaaaaatactaaaatttaaaacacaaaagacatgcatcagatagctatttttgtgcaaaagccatcccaaaatgtagtgatttgaaattacaactacatatttaggctctgattatgtgatcatctggtmagggcttagcagcagggttcttctgttgcatctgggctcattcaagcatctatgataagctgctgagtcagctaggttgctttgctctgaagattgacttcagctatgaaaataggggcaattgagccataaagcgcttatcctccagcaggccttttcaggcttatgcacatgtaggggtatggtttcaagagagaatgtagaaacatgcaagaattcttgaggcctgttgttagaactgacacagcatggtttccaccacattttctgttaaagcaagtcacaaagtgatctcaggttcaaccacctgatgggaattactaccaggacacatagcagaaggcaaagaaagaggttgaggaataattgcagctatttcattcagtgtaggaagcaaagcaaaataaattttcttactaccttatttaattcatcccatagagcctggacactgattttttattattactatgtaagtatgtgtgtgcatatgtgtttctgctgagaataccttgtacatagtttttatcttttaatttgcaaatggctggttttcttttctcggggaatttttttctgagatgaggatttgcttcctctgaatgactaagctgaactgaatctttccactctttagagctaccctcatgctcttgaagtccttatgtctgcaatgattttaatctctatttctcaggtagccagaagacaggatattatactgtggttttccacagcagcaggtctgtttggctagataatcaaggtatcaaaactaattctttaatacagatggcttacaatacttgtgaattgcattttccaaggagcactgtcatattctcaatattaccacacttcctacacctttagcatcctctctcaatactatcagttcccaaaacctttgccctattgtgccaagaaaagacatttatcagatgagtaaactgaggcataggaaatatctatcagtttcataaagggttcatcacctgagatgcatgggtttcttatttcttggccctcagccatatgaattatccaatttgattttcagatttctctttttttctttatacagcttaaaatgacatattctctaactcattcattcaacatatcatttcttcttgaaggcctagtgacatagaaatgagggtatctttagaaatcattagaaattttaaatggttaaatgaaggagctttagaaaaccatcttaaattaggagcttagtgaatgttgctttattttttaattcacatatagtaaatgaaaacatgaatttaagaattggccaggctaagattcaaattccagtgccaccatttataaataacatgagtgaacttagacaatttaatacagcacacacacacacatacacgcaaacacacacacacacacacacacacacttttgcctaatacctggaacatagtagtaaatgctcaatatttttttactctcaaaagcaagggcagcataggaaatgaccctctcaagtcagatcaggagtggtgactaaatgacaaaggaccacttgtgcagacgtccttgtgtttcttcatcttagctttagggttttctttcaagtgtccagattgcacctatattacccttgggtaagagccaatgagataatccatacagaatgcctagggcagggtctggaaggagtaagtgctgtataaaattatccttcttcttctttcacttcctctctttcttggggctgaccagctgataaactagtcctctgtcctagattgtgttccccagaaacagaccttgaaatgaggattatgtgyaggggatttattagggaagcatctcaggagagactggcagaggagcaggccaaggaagggaaagaagacacatctgggttccatttcaggtgaagttccagcctcttcatgacctcatagagtactctggaacataaatagcacctcagagtatgtcctgcctggaggcaaggtagcttggcttttacattccttcatccatctgtcactggctatgggccctcctgggtgggctatcacctcccaagcacttccagctctccatagtgttagggcagttgcagtagcaaaagagaaatttctgaagaaggctgctacagatactgctgcagcagtatcttctgttgccatccagattaccatttccattctcagccttctgaagaaggctgcagttggaaataaagcatgtaaaagctgggaatgggagcacagaccctgcaaaagggacagaggtggcaactctggtggcagcagcagtatctgctacgtcctcttgggttttataggcaccagcaaaacacatcttttgttaaaatggtggccttctgacgggaagggcaggtctactactgaggtcaaaattcatgtgttatttttgtaagcagctactaaagcagtatcagtccagagaaacgagtctatctttgaagaccaaatacccaaaagatctgcttcaaccttccccagttaatcttttgccagaagattcacaatctgaatgtggctgtgagtatttgattagagtattagtaggtgaaggaaggtggtatgcaagaatcagctttaatattatccccgtagaagggaataattggtgattagttttcaggctatataggactattcctcctaaatgaatggataagctgagagatttacttctaaagaggtatggtcttttcattttaactcgagattttaggaaagaccaacttaaaaagaaagcaaaggaagtttcaggagatttcagaatttagaaggaattctgaaattctcttctggggaaatgaaatcctaagacttgcatggatatttctgaaaatcaaaatgaaatattttggttgcataaatcgtcaactgtagtttttaactaaggaaatgtaatttaaaaaatccaagtgttcgatttacataagaaatagagttatttaaatagaagatttccaaaacgctgttagtggtctttgacgtctttaaaaaggcatttatatttgtgaaaagatgatctattttaaggtgtaattatttctaatgtgcctcattttggggtctcttgagagattagaaattgctaataagcaattttaaatattttcgaggtaagttaataaaacacttcatcggtaattcatgacttgttatcattctcacattatccttgtgtgggtaaaggcctgtccatcattggaagtaattggaaagaaaactttgcctgaagctacatgagaactggaacccttaaatcatgaatggtggcaagattccaaaattaattatgaagactattggaatgatgtagcatcctttaactcttattgtgatcgacagaaagtatcatagatggacaactcactttccctttgctctgtgcttcctggtgattttaggtcacgtccactctgaaatctgagctgtcattaaagccatgtcttcgtgtctgtctgtctgaagcagcaaagatgagacagtctgtcgctgtgtgtgaccccagtgagccccataagcagaaggccctgagtctcaatttgtttcttttgattactggcagatcactcactgtgccatttctctgatgtgactgagcatattagctgtgccctcccctaattattcatgcttccaatgttacccattcaaaatttatgaccatgaggatggtgggttagaagcctgaggaactgaggctcaagcctgttgccagagatttactgtcattgttttaggtgcaaagtattaacaggcaggccaactcacttcaattcctgacttagtacatttagtggagaattagttgagaatgagtacattttccctgacacagctgcaaaatcaaacacacgaggagttattgaaaaactgggatttaagcttaaacctatcatttctatatctgatgggcgccatcccatatctgtgaaaatctgacattggggaagtgaaatgcaggcttaaaagaatgctttcaaggtgcatagcaaaagcaatcttactcctttagtgtttcccatttaatacttttcaatttttagttagttaattaaggagaaaatcacttaataatcacataacatagattgctactataaatacctgtattgtctatgttacaattttcgcatctattttactttattatttgtaatctgttgggttttgtgaccttgtgctccaaatgattttgcatctgtaaggtggttgggagttagatacccttcatcatatcttttgccatctttgagtggcttttttaacctttccttttaaaaaaaaatcccttaatccacagtctaataaagtaggaaaaacaatcaataaagcatacctacaaaagttccattttaaacttttagtgaacttaagtttactcatagtgcatttaatcttcctttctgtctgtcagttagcaaatatttattaagccccaacaatataacagagacattgctggctgccaggtcagggggcaagagccatgatgcatttcatcttactttgaggctgtcggtctacaaatatttattgagctcccaacaatatgccagggactttgctagctgctgtggattcagagatgaaaagacatagttccttttattcacagaatttacaggagtgatacaaacaaaacaacataggagacataagatatgtactctgattgtcttggtctgttcagactgctattacaacaataccttagactggttaatttataaacattaggaatttattgcttacagttctagaagctgggaagtccaagatcaagggcaccagcagagtcagtgtctggtagtggtctgttctcatagatgagtgcttttaaactgtgtctgcacttgtcagaagtgcaaagggacaaacaggctccctcaagtctgttttgtaaggacactaacctcatttgtgaggggatgtcctcatgacttaatcgcctcccaaaggccctacctcttaatacgatcacagtgggagttaagtttcaacataggaatttggggggaacacaaacattcaagcaacaacagtgatgatggttaggccaagaacggtgcagtcctcaaggagaaaagctttatatctgctagggagagtaaggaaagtagccttggagctgaggcttggtgcacagagaggagtttgccaggcggataagagcaggagaggtctttcaaagcaggggaaacaacatggtcaaaagcatgaagacctgccagagcttccagaatctatcagagactttgagttgttggagaatgaagtataaggcaaggagtgactgcagctgaggcatggttggatgagggtcagattacaaagaaactgtatatgctgttcaaagtggttcctatattttcttcctgctggttattagaagggcatgtgccccttttaggaggcatctgctatggttaagataatagaaaagggaattttcctacaactcagattacatagttgcgagtgagacacattcctaggtccctctccccaaaaagccttcagaattggaacagattttttgatggtgaagtttgtggtgacatcactggtttgctgctctaaaggccactggaattaggaatgcccgtggatgaaagatattttttgccatggacttaggaatctgggtgtgagtattttctcattggtgggtcaagactgacagctgccctctgcaagctctttgaaaaggtaggaagccctgaaggacctaggtgatgctattacttgatggctcaagcagatcttcacaaattcaatacatgaaagataggaagtaagacgtatgagtgatgggggagtgaggttagagtggtacatctatcatagactggatagaaaggaaagaaaagcagaggaggggaggatacacaacttggcaatgtcgagatccagccatccaaacaagcatggaagtccttggtgaagcttgactcccaaggggcattgctttgcatcaggcacctgctagtctctgtatgcaaagacagcatggctcttctagactgtaatgaatagccaccaaaatctcttggatgtgaacctgctgacttcccttgtgaaaactatgcctaaaggtcagtgaatcctgttttggagctgcttagggtcactaacaccaagaaaacttcatacttcacttttctcttatccctgcagaatgctggaatggaagaaaaaaaaagatgaaaagtaggtcatataaattggtaatgcctaattctaatccagtgatctcatatagcattagaataaattagaatacattttgatgaaaatttccattttattaaatagttgcttcgtgcataagcagtgcagctggaccacactgtttctaagattgttttcaataaaatctcattagctcacaaggcaaattgaattctcacttgctttccccatccactgtcccttactcacccctgctgtatatagagcactgagtgtagaatttcgctagccagaccacttactatttgacagagatgtgtatgtagggaacagcmttaagctatgccatgacttcctgtcatggctataattagcatcagttcaataggcttgagttaaaatggtttctrtggtgccattatagctttgttttgccttacttatatctaggtgaccacatgttcaggtttttytgggacagtccctttttatgcctgttttctcagtagaaattcttaataatgcccattctcactctctgaagtattccagtttggattaacaataatatggtctcctgtagcaaatactatgagtgttctcatagccctcagacctgagcattccagaatattcttactggcatcagcctgttgatatcatgtgcagagtgctctattgaaacgacagaaactcttggcccactcaccaagctggaattcagaggtattgacttccctaagggcatccttcagccaataactgataggaattggtggtcaaattttatttgttgttgttgtttttccttgttgatgtacagttactctagcactattcacttagaaaatttccttttcctagtccatttcattggcacccttgtcaaaaattaattgattttatatatgtcagtctatctctggactctcttctgatccattgacctacccatataccaatacgagactgacatatttatcctcaggtgactttaatttgccactaggtctgagaatcaccattttcgacaaaccatgatttattgcctggggctaaatgcatttctggtctacatgaatttgtggttttattcacagaggacaggaagaatattgagttgatatctagcagtgtctctcttcacatatatttatttattttcaacttttattttagatacagggagtacatgtgcaggtttgttacctgggaatattgcctaatgatgaggttttgggtacgaatgttcccatcacccaagaactaagcatggtacctgagtttttcaactcctggtccctttcctccctccccactctagtattccccagtttctattgttgctatctttgtgttcaccagtatccaatatttagttcccacttataagcgagaacatgcagtatttggttttctgttcctgcattaatttgctcaagataatggcctccagctgcatctatgttgctgcaaaggacatgatttcgtttcttgttatggctgtgtagtatcccacggtgtacatataccacattttctttatcaaatccacccttgacaggcacctaaattaactccgggactttgctattcacacatatattgaaarcatttatactaaacaatatgtttgttatgaatagtgctatattgtacacatttcagagaaccttttccctgctaaatcttcacgtgactcttggacacattgtctttgtgaccactggagcacattttgaagtcatctagtagacttttccagaacacatatttttcacttatatttatattgtttgaggtgctgcaaacctctttaaattgtgtacaacatttgcaattgttaggttatacccacctgggaataattactaagtctgtgctcatttttgtttaactttctgatatatttgtttcatttaagtaaacctctagaagtatccaaactaggattagtagaggtaattttgggctaatgtatcttccccaaacattgttctgttgttcaaaataaggtaattacgaagacactggtaacatgagtgactttgttaggacttgagtataaatcaggctcctctttcctgaggagtgcttaatcaagaaaaaaaaaggcttttcttcatataaaggcttatgtaatatacaggctaccaatctttggctttgtaacttcgtttgactatagtgcaacctgatatggttgacttattaggttgaattattttataccgctacgaggcactttttgtttaaaataatgtatgcctcttccagaagatccctgcacatcacacattcaaaactaactagattaccaggacatgggaaaatggtgtcatatgtcttagttgctgaaggttcactttatcttgaataataaaattacagatctacctagaattgaacttaattgcacaatattgtatttcctttgccaattaacccaatggaggtttgaagtaatatatttgaaaaatgctttgtmatctgaaaagcaccaggcacttgttaatcgttgtcattactatattggaaaaactacctgtggccacttgcaatggagaaaaaagtcttaacactgagcaaagaacagctcaacccttaggcaagtactttatcatcaaaacattttccgatgaccatgattcacagcagatgtaaactaactccagtgtttttcaaactagtggtcttgacccacgrgtaggttatgacatcagtttattggttggacatcagcattttacaaaaatgaacagtgcaatagaacataacagaatatactagaaaatagtaatatcagaggtagtaaggataaatattcttttgagaagatctccatatatatacatatacacaaacacacagatacaaacactggatggaagtagaaaatgttctaattgtgactcattgctcagaaacaaaacagaacaagacaaattcaataacaatgtcattgccctaatccttatttaagatttttaaagaatgttatagttgtccttcagcttagcagttattgtattacttaaggtatgatacaaaatgttaagacttttatatatcatacgcttataattcctgagttcatagagggtctaagattttaccattaatatccttctaataaagcattgcattattgaagacaaccagttagccagttcaagtcaacacatttattaagaattaggaatgtataaaaaatataccaaggaaaataaattaagcttatataattatactttatgttaaatgacagtttaatttcttctatggggtgtaaatatttaataaattgtcgatattcaaaagaccaatacatattttaaaatattctgggggttatttttacatayatcatcatgatccccataatgacgtttcaatcagcgacgaaccacatatatgatggtggtcttataagattataatatcaaatttttcctgtaccttttatatgtttacatatacaaatactttccattgttttgcagttgcctacagagttcgatacagtaacatgctgtatagtttgtagccaaggagcaatgggctataccatatagcctgggtgtgtagtaggctacaccatctaggtttgtgtaaatacactctgygatgtttgcacaatgaagtcaactaaggacacatttctcagaaattatccccctcattaagtgatgcatgactgtatttcctgtaatagagactgtatctgttaactattgctatataacaaccatcccaaacatagtaacttcaacaacaaccatttacttagtgccaattctatgagttagcagtttaagctggyctatcctgrgtggttcttcctggcttccttgtgtgtatggtcagccattctgctaagccactctggttctgagagtcttttggctgtttgcctggggcacttcagttctcctctaccctggtcstctctaatcctcaacagactaactagcccaggcctgttcaaagggcaaagacagggctccaagacaatggaagaattgaaggcatgttgaggcctaaactggatcaagtacagtgtcactttgaccacatcctgctcgctataggaggtcacaggccagcccagatttaacaggaggggaaaataatctccaattttttgatgggagaaatggcagagtaacaaggcaaaaggtagagaaaaaaataaggaggccattaatggaggccatgaatgcagtcaacttatcagatgctcttctcctccctacccttttcattggagcaatataaagaaatccttcagtcaagtttccataaagaccctctttcctgcttctggctgagctcctactaaaaagaagattaatgtggaaattaatctaatccaggattaagagtagaagacttacttaaactgggcaattttctgtcaatttgattgtaataaatattttgcatttaagagtttactattgctaaaggaaggattgtgttttctctgggagcattgtgaatcttgtgttactgaacaaatgatttcctaaaagggtatgggtaaatggaactgtaaatcaaaccaaattttttattttgagcccgcaatttaaagggatcgttttacatgtgttctgtctccagagatacctctaaaagttctaggttttagatgaacgattccccaaagcaaccttcacctggagaacataattcctatatttagcttaatacttgggccagaaaggctaacatgtcatttacagtttacaggtaagatgaatgtaatctccttagagtagtttcatcaaccaagtctagaaaaatcaggtactagagtgatttttacacaactgtttcttattgaacaaattacaaaattagagaaaatgaaaaagaaaattagaaaggatagacttaaatatctactcatatggtaataattttataagaaaaaaatcaaaatataacatctgtttctacctgcctggcctgtgaattttgtagtctaatataatgagagagataatattacaaaatagttaggatggctgacttcaaagacagactgcttgcgtttgaatttaagcttagttatgtgttacctgtgtgttctacattatttaatctttttacgcctcccagtagaacagggataataatggttcctacgtcacagggtgattgtgagaattcmgaaagtcagtatgtgtggaatacacaggccagtgatcaatgcctggtaggcaataaatgttaactctcactgtcaacactacagttggtttctattccaaccttcatgaattttcactgatttttttcacacttgtttaaagttacatgctgtatgcctctgccaggggcctgagagacagagataaaggacaaagacactgttcccaagtagcttgaggtattggatgaataccccccgaccacacacagatgcacagatagtgatgccacttgtaaaagggatataagacttaaaggtcattcagaatgtccatgagactcgtttatttttaaggtgatttctaatatataattttgtgaagcaatatgcattttttaggctgttggctaaaatgcaatgaattacctagatttactcaagtttacactcattccacatgtttttctaaatacagaaatttctcattatgtatggcatgatttttttaaaaagaaacattatatataaagagtacgtgaagcctaagaaaagtggcacattctttactcttgtaatatgccagcatcttattctttatttggtggtttctaattgttccctaaaaatgtaccaaccataatattgactgaattatgccacaaagaaaagaaagtgattatagttctcttcatagatccttggacctcatataaagcattgattgattgtggagcctgcctggagaacaggctgtatcagtgctatagaatctttactactaacttcttagatactcttgatttggtctcattcgtgggtttacatttgctctggaastggtgagcttagatgatagaaaaacgtttggtatgtgaatttcatacacttgaagaaatagatcttgagttcagtttttccctgcaaagtgctagaccttaaaaatctgatttgcatagactggaattcattgatttaagaagaggaatttattacagattaataataattacttctgaagagaaaatactttgaatttgggattctaatacttatttaaaattggcgataatttcactcttaccaacaaatacactaattctgtttttaaaatttcgattagtgttatttttggcttaatatgcacattgttaagccatgtgggtttttttttctgtttttaaaatttaagtatactttgcacagagtaaaaggtacctgtatgtgtctacagttgtgcgagtcttaacaattctatacattcatgtatccatcaccaaagtcaagatatacgacagttctgtcactggcaacatttccatgcattcttttgtcattaacccctttctccggtctctggcaaccacagatttgtttcctttcccaaaatataaatggaatcatacaatatgtagccttttgagtctggctcttttcatgtagcataacgccttttagatttatccatgtatcagtgattcattctttttcactgatgagtaatattttattggatggatactcacagttcccattccccacttgaaggacatttgtttctagtttttggtaattacaacaaaagccatttaattatgttcttacttgttttggaaaaaatccaataaaatggtaaaataatcactttgtgtgtayaggagtagggtgtggcagggaagtctgaatccaaaggtgttactstaagtctctgctggctgggcatggtgggtagtgcctctaattagagcactttgggaggctgaggtaggcggatcacttgatgtcaagacttagagaccagcctgggcaacatgrcaaaccctatctctactaaaaatataagaagtagccaggcatggtgacacactcctgtggtcccagctactggggaggctgaggtgggaggatcgcttgagccccaaaggcagaggatggtgtgatccaagatcacaccactgcactccagtctgggtaacaggatgagaccctgtctcaataaataaataatataaagtctccactaaaagcgattatctgttgtctactggtataatcaggcataccagtagatctcagactgtgttcccatttgattaccattgttttgctgcttaaatccaaaatatgccaattttaaaaataattttcasaattagtacattgcatttcatcaatcttaagttttcctctaataaatcatttgaaatacttgggtatctcacagaggatcccgtgttacctggtttggcacacaatcattacattgattttcctgaagttgaatctagtaatttttgggtgtctcacataagcatgtaactttcagactytctctccctaaaaaaggagtgtcacaagaacatattctaaatcagtctatctggatgtgaaaataggactcttcttgtgttcacagtggccaaggaataaagactactacattctttttcttttcatttcttgtttctttttttttcttttttttttcagacagtgttgcccagactggagtgtagttttgagatcatagctcactgcaccctcaaactcctagactcaagcaatcttatagcctcagcctccttatcagctgggactacaggcacacaccgtagcacccagcattttttttttttttttctgttagagacaaggtctttccatagtgcccagactggtctcaaactcctgggctcaagcaattctcccctcctgagcctcccgaaatgctgggattacaggcatgaaccactgcacatggcctaccactacatttcttaatgaaaatcacaaagtaagactgggaagcttggagaggctgagaaagctgagagtgggtcctgtggaggactttagggagagtcaggaatgttgtctgagtcctctcttacacctctagtgcagtgagatggggcctaacaggaccacttgcaggatggcctgtgaccagtgtgggagtattcttagattctgtccaaggtgctgttataagagggacaagcaaatcctagcttagataagctagaatcatctatgcctggtgctaaagagggaataaacaatgagctagagggaagcatagcatgcccatccaaagagctcctaaagaaagagctcttgtgggagcgtggttagcagtgttgttcatgtcatctataacttctatacccaaggcatgtgcattcattctcaagctgctgcgggtaccagttactagaaactcatagctgcccccattctctggccaactgccctgggctgacaggagtcccctttcccagagatgccttgtagtttatgccttccaccaatctggagactgcccatggtcagcgaccgaaaaatgcagaggtataaaagaaagcacggctgccttgcctcaagacctcacagcccttgtgttgcaatccatgctccagaggtctccaagggatcgggtggggactaaatttcatctgaaacaacatgtttgtcaagctccttctactgcccccttctgcttctcttgatcttttagagggttcttctgagagcacttcctcaaaaatcatttgcacaagaatccctgtctcaggctctacatttagggaaccaaacctgatatagggaactctgagaaacgcccccaataaaacattaagaggagagagagagagaaagagaacttcatacacttgccgcgcttagagagcatattgacatgttactactttaacaatcaggtaagaacccctctgcctccccttatctcttcactaagctcctctaagtgccaaaattcatgttagcaaggtagaaaaggagatgtctaactaagctatttagggaaacataccttaaggctattaaactctttccttcctataagattccagctttgmggttgatstygagccttatgaagagaagctttaacgtgaaatgaacgtgatctttccatgagccattaatggttgaccaggggatctgggagagtataactagaaaatttatggagacttttatctaggagcccaagaataaccaacccacctaatttattgaaggtgacagtggggtagagtgcaygatatctcctgagtcttgcctatttggttacctgttatcctaaaacaatygaaaggacaaaaacataataaatgctgaatcctgacaaatgaagacagaaaacttacttttcttcttaaaccaagaggataagcattgtatttagtattgagattaattctcattgaaataaagtccatcagacacacaagtctccatgtattattggtcatccagacattgagatctaatccatcacaaaagtctctatgagttagacatccaggtagccccacatacatctcagacagggcactcttagctgctttcttcttgatggcagctggggattattccttcccttcattttttgtttttatgtgcgtttttgtttgtttgtttgtttgtttttgagacagagtcttgctctgtcagagtcttgccaggctggagtgcagtggcatgatctcagctaactcactgcaacctccacctcctgagtttaaggatttgcctgtttctcctgcctcagactcacaaatatctgggacaacaggcacatgccaccacgccaggctactttttttttttattgtattttcagtagagacggggtttcaccatgttggtcaggctggtctcgaactcctgacctcaggtgatccacctgccttggcctcccaaagtgctaggattacaggtgtragccattgcacccggcctttcttcccttcttaacacaaggaaatacccaaatattagagggatgcagcagtggggaatgtataatccatggtgtctttgtttcgtgagaaccccaatgaagaaagagaaacagggagacatagtttagagcatgccgctcagcagaatttagaattgccttcagtcactggaagagtctaggtgtacctggctatttgaaatatatraatacccagcttcattatctgaatgttttatgctccccaaaatttgagctctcttttcgtacaggctgctataacaaaatatcatagacggagtggcttaaacaacagacagttatttctcaccattccagaggctgggaagtctaagatgaaagtgccaacagatttggttcctggtgaggacctgctttctgacttgcagctgccttcttgctgtgtgttcaactgaccttccttttgtttgtgtatgagggagaaagagaatgagagagagagagaaagattcgtcttcctctttttacaagggctctaactccatcatgagggtccccctctgatgacctaatctaaacctaattacctcacaaaggccccacctctaamtataatcacattggggattaagggcttcaacaaatgaatttgggggaacacataarcattcctaatgcaggacaggcaacatttcagctctgccactgactgcccaaataatcctggacaacttacttaacctctctaagcctcagttttgtcatctgttagatgggaatgaatgagttaatatctatagtaccaaaaaaaaattgtgtctggcacagagtaagtgttcagtaactggtaactgttgattattagcctgggttaaactctggagtagttaagaaatgaggcaatttctcattactagaagaaaaatcaaaatgactgtattaaaaaggagatgctgagcatatcatcaayaaaagttttaattggttcaatattatttcarattgtgacattaaacatcactttcaaatgctgaggttatttcctcaaatatgacatcagttgactcaatcccattaggagaaatttgaacgccttcactatgtaacataaaaattgctaattctttccttattatatattataatcatgtgtcacttaatgctggggattcattctgatattgtgtgaacatcagggactgaacttatgcaaacctagatggtagagactactacatacctaaaatatatggcatagcttattgctcctaggtacaaacttgtacagcatattactgtgctgaatactgtaagcaattgtaacataatggtaagtattcatgtatctaaaygtatgtaaacatagaaaaggtacattgaaaatacgatataaaagataaaagaacaatggacctgtataaaacacttaccatgaatggagctcctaggcctggaagttgctctgggtgagttgttgagtgactggtgagtgaatgtgaaggcctaggacattaatgtacactactagagaatttataaacactgtatacttaggctaaaataaatttattttaataaacttttcccctcaataataaattatccaccttagctactttaacttttttacttyataaacttttaaattatttaaacttttgactcttgtaagaacactcagcttgaaacacaaacacattgtacaactgtacaaaaatattttatttctttacagacttattctataagtttcttcaatttttaaatatttagtttttactttttaaacttgtttgttaaaaactaagatgcaaacacacacattaacctactcagacagagtcagcatcatcaatatcactrtcttccacttccacatcttgtcccactggaaggtctgcaggggcgataatatgcatggaactgtcacctcatatratagcaatgccttcttctgaaattgccactgaaggacccacctgagactgttttacagttaatttttttctttaattattaggaagagtatactctaaaataataatgaaatgtatagtatagtatagtaaacacataaaccagtaacatagttgtttattatcattatcaagtattatgtactatacataattttatgtactagagttttatacaastagcagcaatatagttttgcttgtaccagcaataccataaacgcatgagtgatgtgttgctctgcaacgttatggcrgccatgacatcactaggttataggaattttttcagctcygttataatcttatgggaccactatcatataggcagtctctcatggactgaaatgtcattatggggcacatgactgtgtgtgtgtatgtaggtacacacacatatgttcatctcttatgcctgattttgattctttattaatgtggtgtaagtcaatatttattggcagcaaaggatattttcaccttagcaaatgacagatatgaagtttcattctaaagaattttggtgctttcctcctactgccctggggaaatgtagcaatccatgtaatctgccaacatgtatggttggagatgcattttagggggtcagggagataattaatgaggaaaccttgagagtcctatccctatttctagctcttacctcaaaaggaaattactcgtaagtccaggaaatggctacgctgaaaatacttgtcatttgtctgacactgtacagaattctatgtttaagatcatcagttttagtggcaggtattcttggacttaatcctacctctaccaattacaccagtcattagctgcataattttgaacaatctcaatcttctcctccataaaatgggaacagcagtgtctattccttagagcagttgtgaggattaaatgagtgaatgcatataaaaaaacacttggtcctgaatctgacacatgaaagcactgggatagttgttaccatttgaattgtctaattcagggccttttcattccacaagcgaatggcgaagtaccatttaagacttgccaatgggtgggggaggcatttactatccaaataattatatcactgatcatgtctaactgaacacrtttttggctagaagggaacttggataaaatataaaaacagagctttcacaggcatttttgttatttcatttatgctttgaaaaaaatattttggggcayctactattatgggtagctaactgcatctcaaatttatatcttaatgtgttcttgtcctttaatttttattctgcaacatatgaacttcagtaatttctaatttccagaatggtggaacataaatacatgtctccagttcctatcaactttgctaagtcataataatattattaacaaaatcatagtctttttctttaacctagcaacagttacttaacaataaaagcaggtgccaacacagcaggaacagtatttagtgttttgtgagtcattgtttttattatttttaactttttttaccatcaccttaggaaatcatacaaatgtcattgtggaaatcaatcattagagtaaggtggaggactaatttttattgtaaaaataaccatatttacctggatacttatttagaatctaagtaagaatgcctgtcttcttgaatcccttactttatttagtcaaatgctaagttaacttgctgttaaggctttgggttcttctttttcagtcgatgtcagtgttgaggctttgtgtgttggcaatttttagttgtgtatcgattaaccattgctacaataatgctatgtaacaagccatcccagaacttcaggcttacaacacttacttgtagtttctagtaatatggttgcattggttctactgatctgagcatatcccatcagggctcattcacatgcctacactcagctctgtattagcttgttggtttcatttgacttggaggggcartgatgtggctgggctctcagcagagaagaatgggctctgctccacatggtacctcatcctccaagaggctagcactgggtttttctcaggctagtccagtcataatatcatggcaatcacatagcagcaaaaagaaagcataaatgctcaggcatcatttcttcttgaatcgagtcagctaatatcctgttgcttaaagaaagtctatggccaagccaagagcaagcgtaggagggagctacaaagttatagggcaaacgatgtggctacatggaggctattaattggggtgctaatgaaaccaatctaccacagatggcatggatccactgcatatggaagccaccacctttcaggaagacctccccamctggacttttaaaatagcctttctctccagatgccctacctatcatctcatctgcctgttaagaatgggtacatctgggccgggtgcagtggctcacgcctgtaatcccagcattttgggaggccaaggcgggtggaccacctgaggtcaggagttcgagtccagcctggccaacatggtgaaaccttgtctctactaaaaatacaaaaattagctgggcatggtggcaggcacccataattccagctacttgggatgctgaggcaagaatcgcttgaacctgggaggcggagggtgcaatgagcctagatcgtgccattgtactccagtctgggcaacgagagcgagacttcgtctaaaaaaaaaaaaagggaaaaaaaaagaatgggtacatctgggatgaccgtaccttaaatacaagacatgacctgttaacactgccaaaaagaaatgcttcagtgataccttctaatggtggaggaacatagcttgtcaatactcagcaagcaataatcatgccttaagggttgatgttggctttgtgcccagatccccttgggctggtgattctccagctgctgctagtgttggcttttattagcccccaactgagtcctatggagaactgctcctagcccacggttcacatcccacccactgccttctgsggggtagcctgtctgacacagtgcaaacatcccaaccagttttcctcaagatgggacatctctgtggtataatccatgctccagaactcccttgggtccacgctcagggtggactccagctgaggccacagccttrctcagctctgccycattcactttctgcttccctccttctcctgttcctgagagtcactctcaagaaatcacgggcatcccaatccctgtctcagactctggttttagaaaactcaacctgaaatacatgttacaatgttattttctgtcattttcttttgtttttttaaagcaaaaaaagcatagatttattgaaacaaaagtatactccacagaacgggagcgggcttgagcaagtggctcaggagcccagattacagaattttctggggttcaaatactctctagaggttgcctattggttacttggttacaccctatgtaaataaaggagtggcccrtgaccagtttgattggctctaggagaggaccaatcactggctgaagcagagttacaaagttacatatgaagacttggcccacaaccagtctgattggttgtgggacaggaccaatcagaggtactttccatctgtctttattattattattattattattatactttaagttctagggtacatgtgcacaacgtgcaggtttgttacatatgtatacatgtgtcatgttggtgtgctgcacccattaactcatcatttacattaggtatatctcctaatgctatccctcccctctccccccacctcatgaccggccccggtgtgtgatgttccccaccctgtgtccaagtgttctcattgttcaattcccacctataagtgagaacatgcggtgtttggttttttgtccttgtgatagtttgctgagaatgatggtttccagcttcatccatgtccctacaaaggacatgaactcatccttttttatggctgcatagtattccatggtatatatgtgccacattttcttaatccagtctatcattgatggacatttgggctggttccaagtctttgctattgtgaatagtgctgcagtaaacatacgtgtgcatgtgtctttatagcagcatgatttgtaatcttttgggtatatacccagtaatgggatggctggatcaaatggtatttctagttctagatccttgaggaatcaccacactgtcttccacaatggttgaactaatttacagtcccaccaacagtgtaaaagtgttcctatttctccacatcctctccagcacctgttgtttcctgaccttttaatgatcgccattctaactagtgtgacatggtatctcaytgtggttttgatttgcatttttctgatggccagtgatgatgagcattttttcatgtgtctgttggctgcataaatgtcttcttttgagaagtgtctgttcatttcctttgcccactttttgatggggttgttttttgtcattttctctatgtattttttttttaattctcaatgccttgaaaaaatagagaaaacttcacagataccaaaatgagattaaattcagacatttatgagatatatttttaaaggccctatttcaaaatattcagtgcacatgtatgtattgaggcagtcttggaggaagggacatcaactttgcttcagagaaaatgaatttatctcctcagtctacctggctctgccacttattgatcctgagaatttatgaagatctttttttaaataatttttttattatgctttaatttctggggtacatgtgcagaatgtgcaggtttgttacataggtatacacgtgccatggtggtttgctgcacccatcaacccgtcatctatattaggtatttctcctaatgctatccctaccccatccccccaacccctgacaggccccggtctgtgatgttcccctccctgtgtccatgtgttctcattgttcaactcccgcttatgagtgagaacatgcagtgtttggtttttcgttcttgtgttagtttgctcaacttgattctctgtattctcatatgcaaaatggtaataataattactattgcaagggattttgttgagaattaagttaaatgagatratgcatgycaaaggagtttcaagggctacagatatgctatttttacttgtagactgtattttcttataactcagagctttaraaacccgatgcaactacctaatgccagtaaaatggagtcgtaaagtaataaagaaaactgattgtcttgtttcctattttttttgaaaactgattttgttgcttactgtttttatcatttggtcaaaaytgaaacgtaagttttgtatctctatccagatacaaagacagatttttggctttcgttacaacagcacagtaagatacaaaaatgttcacttcattttaatgttatattttgacttcctctcctgaatgctacttcaggcatatggcaaaataaactttcaaaattaggaagctctgagaaataaataataatgtaaacattctttatttgtgaaatgtagatcttttcctttaaaaaaaaaaagcctggctaaccttatttaattctactgagctttacaatttgggggtattataatcaggagattgtagattcgagctgaaaaggacacttttcttggtactgcatcagtggtaaaattcacctgtgttttgggttagtccagggttaaattgaaaataatactttttagtatttgtggccagaatgattaccaaacaatctctatcaaaacagccatttcttcttaataaaaataatgttccggagatgttgcatagcactgtgacccagattcacacacttgtgctaagagtacctgtgtgtgcaaagacttctcttgtcatcactttcctaatcacattacattgactttcttcatttctttctcccccacaccctgcccttcaacttgctaagtacacagtgtattttcttcctaaaagactttctttttggttcaaaaatatttttttcaggaatttgaaagattcaagggaaaggaaaagagttagctgacttagattcaagtcaaggttgatgctgattgttatgtaacatgggcatgtaataaatgggaatgcaaatctccaagactgttgatactggacaaggtttggggaattttggacagagattttcatatatgttacagcatcttcagttaatgmggagaaactatatgtgcttagattgatagataagtagattgattaatcagtcaatatactgattaatctgaaaaaaataggaatcacattcttcaaagaaaactcagtgatgagaattcttaagatgaagatcttaagttttcattctttggtatttattctttagtgtgtgtttatcctgctgtctgtgacttaaatccaatgtttcctcttctactttttgaaagtgaatactggtagaagattcttgcttatttctgtcaatagggtttgaaataattaatctgacttgattaaatgcctcagttatatagtagcatttaaaaaattatggagccactgttacataattggcctcaatcccatcttgtaccccttttgctgatagagcaaaacaaacctacgcaaatatggaagaaattacccacagcagttaccaacccccgtgctgcttagaagaatgcattgttgtgcataaactcaggataaaaatactgaacatttttcaaccatggctgtgtgttgatttctgtgccattgtgttttgtttgctattttaaatttttgtctacaatgtttcactgacagtggtagacatcattcccttagatgcttttggtttgcctagaagaaatgtgggaataaaagagatgaggacgattacactttggcttccttcaatttttcttttggcagtttagtctaacctcatcttcttttgttgattttgtaatatgagaatttaaggcattcaatagtaggttatatgattgaaattgttggccatctctacttccatgaagggtgtgtacatacctacctccagtagaatctcaatatcccattgtaattcctgatagaattaagaatccatgctttagaatgaatgaaaaccttaaaaccaggttaaatttattttatggaaaaccatttatattactttaagttcatggttcttatttgttcctctcattgttattactttttgagtctttgatcttaagtggagaaatttctgcagaggctcctcaaagaagtagcacatatataatagctgggtcataagagagcttgatttataaaatgtttgattaatagagaaaagaggcaaggtagagagtcttgtctccagaaacaaagttgtctttaaaagtatgtaaaattaaagcttgaatctcttggaaccaaccaagacagaaataaaattaatattcatgtaggtgtatgggctgaagcatcctacaatccaattacataacagggacaaactaaggtaaccctggtgtaatgtcttgtaaaagaagaagtgaggttatataattagactgcatttatcaagtagcacattccacctacacaggctctgaagaaagaaagaggaagtggggagggaaagatttctaaggaataatgactaagaacagtttgatatgtacgtttgtgtcatcctttcaagattttttttgcttttagtattatgcatagcatcacttaggcgtctaatggcttacagttttgtccttcaaagaccttgatcaagccagtctttggggcaaaaagaagagcttagatatgggtggagggaaagaaaaactggaccctttaagaattgtgtctaaggaaaacggtcaagaacagttaactaagaatatgtttacttggaaagatcattttcatattggtaagtagagttattaggtgaatagagagcatatgttttgtgccttgagaggattagactagggtaatattatcactgttgataatgcagatattgcagtatgttttgttaatccaacaaaggtatcataggaaggtacaaaagatagaaaaaaaatccaagatggtaataaggagctttattatggtgaccagtatacaggaggggcaatggatagggcagaatcattcgaaccaccacctttatggttgtctctgtttcactcgttcagcatcagtccttgtaagatgtttctcagtgctgtgctattaaagttgaaacaacagtaattcctgctgaagaagtatatttagccaattgacctcgagtatacccacattagaaaactacactccaaaccagtttcccaggttgttttctcctattctttccagtgttggagtttgttggaaatgctaaggaaatgtcctcgcaccaaatttatcagatatcagaagtgtagtaccttttgcttgtctcaaacttggggtgatagctgttgattgaagaaataaaaaatattgaagtccctgctaagttaaatgtaattgctgaaatggccaacatttcatgcaatcagtacaatcatgcaatcatacaatcagtacatgaatactctgccatcgttagtgtttttgctccctctgagtgcaaaacatctggtgaggagcatgcagcacatgtatgtatgacttccccattttcagtggatgtactcattcctgacacaaaggagagcaaataaaagtaaagcaatgacaattaaaatgtaccaattccccaaatacagactgatgcaataataagtttaagagacagcaataatgaacaacaaagattgttgaatacatgagaaaatttgtttcaaattctaycctttggarataatcatcattaaagctggatgaactaaattttaacaaggaagttggcgagtaaccaaatctatatttaaaggctttcagcctaccaaatcttgcatgtatgtaaccgtcattttatgacttggcttttcatttcattaatattaaccaacaataacttccttttggctctgatggacttaagtctaaaggtctcgaagttgaaattggaaaaattgagttgctttttatactaatttctgattgctatttttacttcttttatggtagaggctatattttatatatacatcatttggcaacagtaattcacttctaagcttttatggtgcaaaatcaattgccaatttggtgataatataggcaggcactaatagtgctgctttgccacttcaaagcatccagcccgagaaatttcataagcaggaaacctaaccccgctggctgaactgatataaagaactgcctcttatgtgttcccttagatttgaatttttcaaagctcctctggaatattgtatttttggagcaatcacaattttcatttatttcaagaagttgatttcctgtaggcttcaaagatattacagttctgcatggattagttttaaaaaccggagtgagcatatgaattgtttctaaaatgtatggtgtaagtgccatgggcactggtatggaatggatatggattctgatgttccctcttccatataaagtgtacttgggaaaatctgtttcctgatctgtaacattcagacaacaatagttcatagaactaatgactcagaagatgcaaatgtatctccatatgttaatactattgaaagtaatargaagatataggagaaaaaatcatcataytgaaattagtagaagtgatgaatggaggcagaagaaactagctggatattttcagtggaaaaactcattttaaatcatgaataaccactgttagcaactttccatatttgctctcagtattttttaaagcgtgtcattgtttttgcaccacacacacacatttgtgtttgtatgtgtgtcaaatagtgaaaaaaatcacaaaatcagagccccaagtctaccacccagaaacaaccattatttcattggcttaacatcattttaaatatacatgcaattatcaatatagataaaagcatataaaatagttttataaaaactaattatacagatactattttaacatgaagccttaaaatttttgttttaatattgattgcctctctgtgaagcatgagaacgtttgtccccttgtgtgtccctccctctctgcctctgtttggatttttgttacttgtgtcrttttttttttacactgtgtatctctaaaacattcatggtgacttgaaccatgatttccatatttcattagtactagcactatatttaaataagatcaatgttctcctgcctcatttgccagggctttgcattcttaaattattcatcttgcttcttctctaaattgtctctatttcatcatcaaggtctatttttttaatatttttaggaagggttcagaagtgtatgtgttttatgagatcttccatgttggccaatgtcagccatttgccttaaaaattaatactttagcataatataatatttttggagtcacatttgtagccattgctccatgggcttctagcactaaatattgctgtgcagaagtctgaggagaacctgttctttccctgcgatgagttatttgcttttcgtgcctggatgcttgaaaaagtcttctctttattttcctctggacaaggatatttttcatagttgttttgcccttttttaaaaatcttgcttcgatgccccttttcaaacattctctcttgtcttttaaagtattggtgacttcttgtctttctttatctgagaacagaatgcttctttttcacaggctttttggtttgagagctgaatatttcacgttctttctgattttcttgagaagggaggctgaagggaatactgatgtcatatatgttctttctagaatttcaggtctattttctctcccgatactttgttaaatgtccrgtaccaggtttgctttgcatcagcgtgagtgtgtgtgtgtgtgtgtgtgtgtgtgtgtgtgtgtgtgtgtgaagcggcacatggtcaggcttcattagctttctcaaatcattctgaagcagtggatgaattcttcccttaattcaaagaaattattgtttcctattgtcctcagtgagaagcatctttgctattactcagactagggaaactaccaggacacccattcaacttgtttctttctcaatttgtggttatgaacaagaattctcagtaagtttggactcaaccattgacttggaggaggcatcagtgttaggagtcagtgacttgctctgccctagaaatttctgttattttcttagctgtcagagttactgcattaggtctagctttgtttcttgtatgttcttgttttattttgtttataactgttttgcccatgtttaaatgtattctgtgaagtagtttttatcttctgtcttaacctgaaaatcagtaaagggttttaacctaagcccggaaagttactgctatttcctttgcagatggtgcattgtccctgtgggggagctgtctagagggtataaccaactgtgtgaactaggcctatcagaaggacatttcactgaacacctgctggcttttatttttttactttatcttttgtcagtgtcaagggtattatattttttcctttttttttttcatcaccacttacaagccagataagacagaacattcacacctcactgactttctttttattgggaaatttttatttttcctcttgatttattttttcttgctctgagtaggtttataaaactaaagtgaggaacattcagataagatgcactgtcaagattattctaaaccccagcatctttactattttgaaagcaaaacttaaaacaaaaaagattaattaaaaatgttcttaaaatttgaaggtgttttcctttccaaaatgtatttctgcaggaattcccactgatttgaaagataaaattgtatcagatcaacatctccagttaaaaagctagttttccatgttttatttccaaatgctatcaaggggataaaatttaaactttttttgtgcacacatgttattcacatgtgagaataatgaaacataatattccatttttctgctgtatcctttgctacatgtagagtgctgcttgggaaacctgcctcacagtatggttgtgaggattaaatgtgcaattatatagaaagcacttgataagcacttaatacatattatctgtggctgctgctcctttcattgttatgtcatacaatggaaatttcctcatggatttcttcttttgagtgttctttttttacactgttaactccttaaatgagatttttgcataatatttaaagtacaaattctattggttgtccaaagctctatttgagcttttttccaaaatatgttgttttgtttgataaaatgggatgtaagggaagccaatgggctatgttggagataggcctcgagtgcatcctttgtgcccatcttcagaaattggccctcagcctgaatcaccaagcccagtactgtaaaggattcatatatacaacagcacaaccatagccccgccatgaaatactgctggaattcaggagttggacttctatatccttgattttaatcttaaccccactcttgggtagcttcttcgtcttcttcttttcttcttcttcttcttcttcttcttcttcttcttcttcttcttattattmttattattattattattattattrttagagatggagtctcactctgttgccaggctggagtgcagtggcacgatctcggctcactgcagcctccacctcctgggttcaagtgactctcctgcctcaacctcctgagtagctgggactacaggtgcacaccaccaagcccagctaagttttgtatttttagtagagacggggtttacattgcatttctccaatagttcaattccctttgcacacatgaaaattatatgtgaaatcatcgtatatgaggatcccatcataccaagccatgtataaaagagaaggtattttgagcatagcatcctaagtctggattattttaaatgaatagttattgtacttgatgatttatttcaaatttcctctttaaattactgtaaatgtttcacaacataaatgctactctaatatatttcttagatatataaatgctactctaagatatttctatatatataaatgctactctaatatatttcttagatatataaatgctactttaatatatttcttagactcacagttttgacactaagtttgttataagtgcagaatctcagactccaaccccaacccagacatactgaatcagaatttgcattttactgagattccccagaaattcctaagcatgttaatgtttaatattacagaactaatatagttgatactgttaatagggaaagccataacactcaagagaaatatggatttaaaaggcctttaaacatatgagactgaagctctccattcataattttaaaaatcacaatctaaaactacaacccaataccaatgttctcttcatagactggtaaaagtgcaaaggggtgacaatatactgtgggttgtccagaaagagcactagcattgctggaagttgaggaatgcagggggtataatccctagaggtttttggcatatctatcaaaagtgtatgctttaacccaccaatcctacctctgaaaatttatcctccagatatgcttgcaaaatgaaatatgtacagaaatgttcattgcagaattatttgtaaatgggagttgcataagggtcaatgagggactagtgcaataaatgctgcaataaaatattatacagctatacaaaagaattagagcatatccccttatactgattggttaaactcttcaagtacattggtaagggaaaacaaaagcaaggtgcagaaaaatgtgtatgatactgtttttttgtgtgaacaaagaaacaatcatatatataaatatattatataaatatatatttatataatatataaaaatatatawttatawaatatataaaaatatatattatatttatataatgcatttatatattatatatttatattatgtatatatatatatttgaattagcctgtatggacatttttaaaacaactttgcagacacacataagaaacaaattaagtatctgtgatacatgtaactgatgaagagcttgccaagacataaatgtaacttctaaaactatataggaaaatgacagataatgcactgggaaaaaaktagacaaagatttttgaccagtctattcataaaagaggatatcaaacagccaataaatgtataaaagtgttcaacatcatgaataataatgcaaattaataccaggagaagctatcactatatgtccatcagctggccaaaattaaattttcttacaatagcaagggcactagggacttggatgcatgctggtagggtgaagattggtgtaaacacttggacaaaaccatgttatgaatatattttctattaaaggtgaacatacacgtgtgttatggctaagcaaccccaattccaggtatgcactgttggaaatatattctcctccaccctaggaarcaggcataagaatgctcttcttaacattattctcagtagcctcagaccagaaataacctaaattaaatatccaccagcagcaaaataaacacgactatacagtgttttttaaaaaaaaaaacaaaacagaaaatagcaagtgttggcaaggatgtagaaaaattagaacttttgtgcattgctggtgggaatgtaaaatggtccagctgctgtggaaaaaagtttatccattcctcaaaaagttaaacatagaatcatcatatgatccagtgttccatacctagatatatttgcaaaagaatygaaagcagggactctaacaaatacttgtatgccagtgttcctagcaaaactattcacaatcaacaaaaactggaaactcaaatgtccatcccagataaatggataagcaaaactatttagccttaaaaaagccatgaaagwctgatatttcctagaagacagatgaagcttggaaacattacactgagtgaagtaagccagtcacaacggacaaatattgtaggattaaaataggcatattcacaaagacagaaagtgagattacaagggactggggagaaggaagaatagggaattattatttaatgagcacagtgtttctgtatgggatgatgaaaaatgttttggaaatagtggtaatggttacacaacattgtgagtctacttaatgccactgaactgtatgcttaaaatggttaaaactgtaaattttgttacatgtactttaccataataaaaaaacaaattatagtatgttcatataaaatagtattatacagtgatggaaatgaatacactataaacgcactccacaggttgaatctytcaaatataatgttgagtgaagaaagtcatatacaaaataatacataaaattaattgtatgtaagttcacttacataaagggcacacaggcacaactaaactatgatgtatcgggatgcaactatcaggatgaagtaaaaagaaaagtaagaaaggaactgccctagaaggcaggttagtggttatctttggtgaggagcagatgaggcgtctttggggtgctggcagtgttccatctcttgatctgggtattcacttcataatgatttgtttagctgtacatttcttaatgcattttacatatgtgtgttacatatcacaataaaatgttatttaggcagggcatggtggctcacgcctgtaatcccaacactttcagaggctgaggcgggcggatcacctgaggtcaggagttcgagaccagcctggccaacatggtgaaaccccgtctctattaaaaatacaaaaattagctgggcttggtggcaggagcctgtaatcccagctacttgggaggctgaggcaggaggattgcttgaacctggaggcagaggttgcattgagcagaggtcacacaattgcactccaacctgggcaacaagagcgaaactctgtctcaaaaaaaaaaaaaaagttttttaaaaagaagtgaaaaaaggggttatgtgttgaggttggtaatacaagaactgcatggtgtgggcatgattctcttaactctactattttctatttgggtttttaactgtaaggcttatgtcatttaattttttcaattcaaataactaaaccagtaaactacaaaatgacctggatcaaatgactgcaagaaattttgattctacatatttaaacaatatagccttccaggaaatgtaaatacttgttttatataaatataaaaacaagtgtcttaaatataagtattgaatttgatttgtcttcagaatccaacattcagtactaagttccactttgaaaccctgttttttgacataggttattaaatattaagcatttaattattacaaattaaaaggaaaatataaaggaggatggatttgtttgtttctttttcagattgaaactgcttggccaaggcctagccagggtagctggcctacccatggcaaggacttgcagcaagccaaattaacttccttgtttggatcacacattaaatttcggaataaagccatttccctggaaaggatcaggaagcattaagcagtagtgctcaagaagattaaacttccatgttgagaatctcactggttatctttggccttctggatagctagttcttttctggcctgtgtacctttytatggctacataaaaaaattaataacctttctaaaagtaaaaatcctatttggagtaagatggcattgcaaattaaataagtattggaataaacaacattagcatatttttttcaaagctatgtgtttagcactcaaaacaatgtcatgttgggcatctataaaacagcttatcaacatttgcagttggcaaataggtgtgttttggagatgttatgagcccttcttttaaaatcactaagatttcttattagtgtaaagaaacatcatgtaagtaaacccagagctctttttaatacatttttttctgttttctcttgtgctactgttttatttttttaaaaccttcttaacatagatgtcatggactctgttcataattcagcagcaaagatcagatttttttttaagttcatagaaattgaagctgtttgtttactagatccccttaaactttgagactcatttttaccartaaatctttacacactaaagaacaacgatctatataaatagttcaattaggtagcctttctctctgctccttaatctgtttccaaagagactttgtaactttggcttagaacttgcatgaagatgttttctagtgttattttcttggtrtggttgcattgccttttacttttttttggttttaaagtaacacataattcctgacacacttatcattcaacacataagtgcttctatttagatgtctactttcattttattttttaacattgtactgtaaaaagacaaaacatacctactacaacaacagggattgttctaaatgctgtctacctactaactcaattgtagggaggtttgattttccattttatttgtgtgcacttctaatatacttggcaactccctatcatattcattaaagaaaaaactttagataaactatcataggaaaatctaaactgaaatatttaaaaaaaaattttaaatcagccttatttatttacatgcatatacaaatacacacaaacatgttaaaatgctcaaattatccattttacattccatacctcataactattatatacatttagtattaccatgtactatatgtttgtatgtagtgcagtttatccaacagcataagtcataccttctgggaagatgaggtgtatgtcaagcattggtgttctactgcctgccagttttagtttttaataaaaacaagagaatcacaaagatgaaacagaagcaatccaaagtgtataaatcatgcttctttcccttatgatcctattcttgacttttattacctcattggaggacaaggttatacatctcactgttaatcctgggctaggtcacctgttgagtaaaagaaaagcctttggttctcagattttaagtcatctgacattttaaatttgcatttggagacaataaaggaatataaccaactttttctgtttctttagatcttgaaaaggaagttgtttgaagtcaattctttgttttgatgtttggtcaataatgaaataatcttcaytttatgttatatccggcaaagaaaaacagtaacagcaatatggagccaggatgtaaatagattgtattgcttgaaatccacttgggtaaaaaataagcatgcaaagcaagggaaaataatcaatcaaaggggttggtagatgtttttcttggttgtggctttttgggtggctttttggactataagccaaagttggatcttgtcccaactgcttttaattaaactcctacttctttttcttttaatactattttttctcataaaattaataagggatcatggtaggacttttggaaagtatgagtattaattaggatatgggtctagctactctaacagacatccaagtgtcttatgattagagtttatttctactctgagataattaggcaagagctgacrtggttctccgtggtgttcaggactcctaacctggactccctccatattgttgctatgctgctgtcctccaacattgcttccacctcctgatctaagatggctgcttcagctccagacttcacagtcaccttccagtaagaaggagaacagaggaaaggatactctggacattcccagaagtgacacatattatctccatttaaaattcattagtctgtgctcagccacaacagaaaactgggaagtttcatcttaattctagttaatcctatgcccatgtaaaattggtggttctacagaaagaaaagaagactggttattgggagagagctagcaatctttcccagaatgcaaaaaagtataaagaagaaaataactattacccataaattcaaaacctaaagatactgttacctttaatttttggcatagttcatttcattactttactgcattacatatttttaaaaagaattatactatatattataatatgctttttctttttttaataataaatgctctaacattctaacagtctttaaaactttattttaatggctgcatagtatcatatacttataataaataaataaaataaatcaatcaataaataaaataaaaaaattatttttcagttctctaagatatgtaacttataggtcaaaatactcactttaaagtttttatttttcatattacctctcaaaaaggtggtgtaaaattatactcccacagtcatatttgagtactcactgcatcaaatatttctcactactaaatagtacaaattttaagatgattactcatttaatagttaacaaatggcctcttattgttttgatatctatttctttgtgaacaacatagaatctttgaaaaaacaattcttggtaatttgtctatctggtttaaattttctctatatgaccgttatctgtttttctacttataaatttatgaaaactctttcaataatatggatacaacttatctttaaccatggtgaaatattttcccaggtttgagttagtcttttctttcaatatttatattcttggaaatttgttctgttacaatatttagaataaatatttatttgtatctagtaagcaatcaataaatgttaatttaataagggattgaaagagtgaataattagatttattaccacattgtattactcttaatgcttactgctagtcttttcttcttttaactaggtctcccccttttggatgcttttcattttggttttcatcttgaatgactagaacatatattttagcaatacttttgagatgcatatatgcttcatatacacatgcatttcaaaatatccttctattgactttacccaaggacttgggtgattgtatagaattcattaatcctgttttccttcaaaactctgtataccttttcctaccttctggtatgtgacataacgtgtaagagtggcctgagttttatttctttgtaagaaattattggccaagcacagtggctcatgcctgtgatcccagagccttgggaggctgaggtaggaggatctcttgagtgcagaagttccagaccagcctagacaacatagcaagactctgtctctgcaaaaagaaaagaaaagaaattattgctcttttggttttatcgtcctggcagttctaaggtactttttctctcctcttgaaattgccccccaaaattagctcaatataatatgagtgcrcattgataacatttcataacttcccctgggaatatcaagaattatattaaatagacagatctggaaatgtttccttccactttgcccttaattcttatttctcttgggtctgcttggcctcttcctctggaacatcagtttatactacttgagtttgcttttcatatatgttgtcttctttcttagtctaagaatctgtttgtcttttgtgcctcttcattctgggagaatttaaagggtttgttcctgtaccagtggtttgctttttctgatctgacatttatgtgctcgttttctaataaagattttaatattgwtatggtatttttatttctcagtgttatgttagcctaccctgttcttgttttgtttctgcatgtgtctagctcctgttttatctcattctctggcatttttgtctcattgtttatagagttattgtttcaaggaattttattgatcctataaaccagatgcttcacttgtgtttgctctagtaaatattttcccaaatgtatgctccttctcttcgttttgcttttatatatatatatttctatacatataaatataaaatatttctaaatatatatatttatatctatatacatatacatcacagtaycttcagggctcaatcttttgaaatgtttttattccttttcatatttattcagaattgaacatagagactatgaagtaggccagatatttgaccataaacatgaaataatggtggctagattctagtatattttcacatccaatttttaatttttattttttaagaaccctatctcatctcttaacctggaagactggatattacagtcataggttcatgtggctggttcattgatccagacacttgaaggacatggccattttctgtgtttaactttctgtttggactggtctctgtatcaggtacatagtgtgaccatggatacatgaccctccttgagcagctacccacggcattattgaaatgaagctccaggtcaggaagatgagccatagtttacttgggtagctgcttcataagatagagcaacctactcctatggccttcacacctgtacccaccagtgcggggtttgtaggatactgtgagcattgtcatgtaatcatgctgtgtttatttctcaagtgagaggcttccaagatagttcctggtgtttcccttcaaacaatttctcttctcactaatatttagctaaatatttatgtttctcaaatattgatggtattttttcagggctggatacattagtcctttcatatagtagtccattggtcattttataaggaatccaagaagcatagcataagagaaaaggataaattttcatcctggcacagtggctcaygcctgtgatcccagcactttgggaggccaaggcaggcagatcacctgaggtcaggagttcgagaccagcctggccagcatggctaaaccccgtctctacaaaaatacaaagatttgccgggcgtggtagcatatgcctgtagtcccagctactcaggaggctgaggtaggagaatcgcttgaaccctgaaggcagaggttgcagtgagccaagatggtgccactgcactccagtctgggtgacagagtgtaactccatatcaaaagaaaaagaaaaggtacattttctcagcaccaagtttacgtgaatgccattaacttagcctgtttactgccctgattcctgatttctcatattatgtaatgatatttccatgttattcaatatactgacaaaaattattttatattactatttcatcatagaagcaatatatacatactcccagaagtatttgaaccagaagataatggactgttggccagtagagcagatctgggcacgggacccacagcatccagtacattaatcctttacagttccttccatgtgaattgtctgagtgtgctctttgtccattcctccttttgttaattaatttttaacaattcaacagttattgtctactatatgttagagctcttgaatctttctaagcgctgtccttcaatgaaacacagggatttatttgccagttccttatattaaagagaggatctccttatagtagctgctatataatagtctcttgtctgctttatttttaatataatactttctcagtttcctgttctccttgtaagtaagtatcatggttttggcctggacagggtgaaaattctcatactgtagaaattatcagtggayttttgtctatacttcttccatttgctttgtatatagtaagaccagccaaggatataaattctcatatmcaaatttttcatctaatattttaatatttaactttttaatccaacaggattttatgttgaattttttgtgataagagagatttaaaggaatgtaytttcctcagaaaacaagacaaattctacagtggtgtctattaaatatttcctacctattcatgtgtgactctttactctatatcccaaaacaatctcacctcagtataagtaaacttagtccrtatttatgtttatgtataaatatatttaatatttaatagtgtgttatatatgatgttgtagtagcctgtgatataatatatacatgtacattgattttttatatatttagcacagtgtttctgggatcacgaatatttaataatataaaatttgtgattagaataaagaagaggataagatgtcaccagcttattgatggtaactgccacccccaatacctcrtcttgtccccaggaggcttgctaaggcatgtggaggaggaatggagagccagatggtgcctgtggctccatgtagatgattcctacagggctggaaagcaattactcagtaccagtcccctgggaggctgccgacaaggcaggcatgttccccgcattcatctttacaaggtgtaataattaagccagcagaatcatagcattgcctgatggatgtacaaagaatcagcatggaccctcttggcttgttcattacctcaacgtcacctacacaaactagtaattactcacggaatttatggcatttacatgtgacaatgatctttgctgcattaacgcctcctaaagctaaggtccatggggccagttaaaaacctatttattaccaatgaagcttaagcattgaggatttgggtagattttactgacattacacttagagaaagattttagatgtcttcatcaagaagaagacaaagatgtgtgttggacgcagccattttgaatatatttggcagcagcttattaaatgccctagagttagcctgtttaactctgctttaaacaagcacttgacatgtgctaaaccaaagaacttctctatctgaggtgtaactgtctattatatttcttccactgacttaggctagttgcagaggaccctccaatcggtacaytggraattcttggctgaacttgaaggctgtgttttaggtctgcccttctctatcttgcgtttctatccagatgccaatatgaactaaaatagagcttcttgttagtcagcttcttgtccttgaggggcctggaggctacaaaaaaatgagaagtagccattcatcttgatatctggaactcttgccctgggakgctgtcaaagaaagaaaattctggaaagaagaggagaagttactattttttgtcagacggtctagaagcagagcttgagatggagattctgatgcaagtgatttttggagggaatgctctctggagaaagagagtgagaaagaaaaatagggtaggattagaaataaagtaaaggtgggacagaaggtctagcctcaacctggtcccrcagggagctttggggtaggaattgcaccacagagctgtcctgcagaatgtcatggactaccagcagcctacctctcccagaggtgcatgcataaacttccaggcatcttcggccagggtggtactcctcagccaacaacagtccttcagagaacggtagaggtgccagctgttagcagctgacaccttcagcatctgcaggatgggtgcaatggccccgtgaagggaacctgagtggggcacggaagtactaactacagttactgayccaccttcctctttcttgcctccaacagtcactctattactctgttatgtatagtcatagcatttatcactatctggaaatagcaggtatatttatatatttactgcttattatctgtctcctttccactagataccataagctccagagcacrtcagtgttgtatcatcagtttctaaacaagtgccaggcacatagttaggtaccggggacacaatttgttgaatgagtaggggcgggatgaggtaggaactttggaaatctgtgtcatgcccaactgtagtggatgctatcagtgtcccatccagatcacctcagatcctggctttttcaaccygggttcccattctccagcttctgcatgcttcactcctaacaagtgtcgtctgcttattagtgtgtgctttattagttgagatagtaatagctagaattgattgagtgctttcagcctgtctaacactgctttaaacaagcacttgacatggactaaagcagtgcttctcaggctttaatgtgcacacaagtcccctgtggatcttgttaaaatgcagactctttcagtgggtctgatgagggacctgaggaactgcatttccactgagaytcccgggaaagctgatgctgctggtctccagaccacactaagagtggcaagggatttgttcattaatcttcataacagctcggtgaaataggttctattattatttccattttacagatgaggaaattgaggcagagagaggttaagccatgtgctcaaaatgacacagctggcaagagatggaagcagaatttgaatccaggcagcctgaatcccaaatgtgtcacctgaaatactctgaataaaggcctctattgaaagatgaagttataagtcaggttgaccaggctaacaagtaaagacaatgcatccctctggtggatctcacagtgaataaagtctatacactgccccaggacactcggaatcttgaacgagcatgactcaatgggagactgttccactgtcagtttctcttccagcctcccatgactccaaaccattaggctgcagttttgacagtrtttcycaatggcttgaaagtaactaatgagtgagtgccagtgcctaatagaggtggatgatggcagttataatttctcaaagatcatttgattcatcttttgtaatatttcaacatttaatataaaacagcaggcaactggagrtttataacttgattcattctaattgatttcttggcttccttgggtctaattaatttttactgtgtaccctaaaatggtgcaataggcttcctgaaagctgttagaaggcagctgtatcatagtttataaaaagctgaaacttggcttttatttgataggtaaatagaaattgattttgcttttgaggtccagacataaaagagaaaaattgactccagaactcaagagaagatcctggattactctgtcttggtttgggttcccccaggaggagattccgagacaaggactctgaatgcaagtagttttctggaaggtcgtgccrggaaacctgccaagaatgggaaagtgagacagggagaggaggaagccaaataggggatgcattgtcaaataagtcatattatgggcagctggtgttcaatctatggagttgtctaggagacagcacaggttcacacttaggttttattccaaccaggaacaagtcaccaatcacatcagtcctgggttgagggctactttttcacattaactccaagcattctggacataggcctggctggttttgacagccagagaaaactctccatcaaagagatgaaagcgcttgcacttgaagctgtagggttgggtctacctgggaataataaatggcaaggggatatagacagagaacacagtgtctgttacaatgtccaaatataaactgtgctgctttgaccttttgtgcaccagtgacttctccccagttcccagccgcttgcccctgaccttgtgtagagcccataatcaagattcctgtgccactgacttgaagacctttaactaaggcagttgtccatcttacattttataatacaacactgtatcaccatttggaagaacataaattataactataaattatataaattataagttacaactattgacaagattgtgcatagtgtaaagtgctttgggattttattcatcagtgctcagaatagacctcatggtgacttggcttttagtggaccctccagtaacaatctttttgtgaaaaaaaaaaaaaagaaatgagaaaagaaatgccccatcaaactgaaaattgagtagaagcttctgtgttgcagtaattttttgtgggcttaagatttaatcttgaaaatgcaacatttgtgtttagcattgtcaaaggcaaaagaggaataaaatagtgccttccaggtcaatgaaaaataaatccagctcctgatcaggctctgctgcttgcagggtgttgttctctgagtgttctgattggcacaacacaggctttcttgccacctcccaggcccagctgctgtttgcccacctgtgagccttattcctgcccaaaacaaggaaaacagcaaaaacagtggggccactgaaactgggctcaaggtccaagaacagctttccctttgggttctgttattgccaccatgaagctacttgtggaagcccaggagcaactagttattaatctgttcctctcaactatttctttaggaatcatgtgagtgtatagacactacagacaacgaggatgatttcaaaaccaaaccatgatttatttgttgatatttggaaatgtacattcaacttcttgtgttttgttacacaactcgatggcacattttcatttttgttttagtttaattaacaaagggtgtgctcaccgtgtgccagaccataccagcacttggcaaattaaactcatctagtcttcataacttcaccatggtgtaggtactgtctttattcccattttacagatggggaagttgaagcactgagaaattgtcatggtggtattatcatgaaaataacattaagattgatgaaatgtatatattaactaattttgactcacaggttaatccttctgcccttccctgatcctatcccagatggcttttggaatgctttccaatacatattaaagggtttatctgtgctatctctggaatgttgcccaggctctgttatagtgaagggtaggttataaagtcagcacatagtggagaaaatgccatagagtccaaattaactctgaaaatgctttcaaatacctcaaagtactgcagtgtggttttatgcttatgaccctctgtggtaattctaagggagctaaagttctagaaaaactgagcctgactgaagaaagaaactttcaaatcactcagcttttaagataactctagggtcgaatggggattggatgaatcaatcaaaaagcttctgcttgcctgcaaagttgattcctttckagttacacatcaagattctttaatctcaatgtctggtaataggcttatttgttaccttaaacatatttgttcaagcacagttgtgctttttagtgaaatgtaaccaattgcttaagaaaagggtctcaagaagtagaaggcctgagtttgattcccagactcttcatagatayttagcaatgacaaattacataaagtatttgaccttcagtttgttcatgtttaaaatgggtgcataatctgtacctaaccttataggttcagtgtgaggactaattcccatgaagctctttgaagggtgcctggcacttagtaagggtgcttgaaatgtcaactcttcctgttattctaaagtcaggaggaaatttaaagaatcggttatgagattcagctgtaccatattgtcctgcataatgctataattatgaattgacttaaaaggggcctggttccattacttacaagcttgtgacattaatcaagttactcaactcctatggctcaatgtccacaactacaaaaagaggtttttaatgttacatttcttataacattattgtgagcattaagttaattaacatatgtaaaactccttggacaatgtctgggtttttaaatctgttaccactgctgtacccagaacgtagcacatagtaggtccttttgttaagtgggtgaatacactatcagtagccatagtaggaagagcttatcactttaaagtgttatgttttgattgacactgtggttgcaaaaacatggtttttggtcacagtgtgatttgatgtcatatgtggtcacattcattaatgtcaccactgatctcttaaaaaaaagtctgtaaatattgagaagcccatcaagctcacagtggtggatacaagcttcccaaaattctaagttttgcttggtagcttgcattttattattggcaacacatactgtcagttatttaccttgatagacccactttattcattttcaagaaaatatctgtcacatatccaagtctgaataaccctagttttcctgtcattctttcaagtaaaaatggtgttacttgggaagaatgactggttcagcttaaaactcagtctcctaagtgtttcagtataccggagaattattttatgtatagttctcattttgtcatacagaacatttgaaaagccacaaagagtaaaaaaatttaacaaaattaataacttttagcacttcaaggatgacattcttgaagtgtgtttttaacagtgagtgtgtagaatgaataatcaaatgatttctggtacactggaagtctggtgccattgtcttgatttgtatgaagacataagcagttttttttttagcaytgcttttgtataaagtgcagatttcatctcagtgaaaaaggcaataacctcttaatatcattatgaaattattttgacctcagggaccctcaaagggtcttggggaaccccagagatctgtgtactatgctttgagaatcacttagctacggaaacattcagtagataaaactggccagtgaaagggatagcagagtcaaggatgacaccatttcccattctaagaaagtgagtgggcacagatgccattgcagagaagtaagggactagagaaagggcgggtctgtggcagaaaagataggttcgtgttggtcatgaggcatctagaagatctatttgagttgcacatcttgggacgtcttgtgcaattgttcattcaagaaagattaatagaacatccactgtgtgctggaaatgagaggaatgtttttcattcccaacctttttaatgcagaagtcattttcttagtgaaattgtaagcttctttagaggatgacctaaattatatatttagaaaaaaaattgtatgaacctaacacaatgcaagacattgacaaaatatcccagtttacaaaaaatgatattctccttcctgacttcccacaatgacatacagtttttcttccaccctttatccaggtcagacagtagacacagtcattctaaacttcatcattaatcacgaaaatgcaaattaatatcacagtgagatattgtatatacccaataaactggtgaaaatttaaaaatctgacattaccaaaagttgaggataaagtgggtcattagggatatgaaacataccctatgactcagtgtatgtacacacaatttatatgcatatatatacacatacttacacatatgtgtgcatgtatatatttatacatatttatacatgtgcatgcatgtatatgtgtgtatatctacatgtctatatgtatatgtatctaagtataaaattgaaggtaagatgaccctggactaatcttccaactagcagagcacaagcactcctgataagatggccttatcagaagtgcttgttctctgctagttggaagattaaattgacaccaccatttagaaaacaatttcacacaatcctgtacaattagacattacactccctataatccagaaaatccacttttagggatataccctgccaaaagcctagcacaagtttaccaagggatctgcacaagaatgatgatagtaatatgttaataatgtcaacttaaatgaccatcgataggaaaataactagtggtatagtcccacactggaatattacactgtggtaaaaaatgaatgaactactgctacatgcagcaacatcttgaaatcttagaaatataagccttaaagataaaagaaaaatgcaaaagactacgtgcagtaygatacattatgttcaaagcaaacataactttaaacatattatagtggataatacctgttggataaaactatacaatgaaacaggactacatttaacacagaattttaacaaggtgttttctcctggtgggtgtgtagacaaaacgatgtgatacaggaagaatatataggtcaaggcaatgatataggtaaccttctatgttttaaattgggaggtagataaattggtttttattataatgacagaatacacacaaatgtgtgatacacatattgctgagtatttttatatttataacaaaataatattaaaatatgataggaggaaaggtttctttggtaagcctttaaaattttgtaactttcatgttttacacatgtattgtaaatatgaatttttctgcatgtctcctaataaattatgagagtttccagggcaaaaatcttatttcagtcatgtttacatcttgccttaaaacaaaagaatttctaggctctattatggaccaaatctatgtttgctaaccaaaaagaattaatcaaaataaataaataaataaaagctgctttctagattgatctatagccaaaataattcactgatgttttcacttatgtacttgccaaaggatattagctatcatttggcatttagtctctctctatatatatatcctcttttttattattttatttttgagacagagtctctgtcacccaggctgaagtgcagtggcacaatcatacctcactgtagttttgacctcccgaactcaagtgatcctcccacctcagcctcccgagtagatgggactacagttgcacaccaccacgcctggctgatttttttctatttttttgtagaaatggggtctgactttgttgcctaggctagtctcaaattcctgggttcaagcaatcctcccacctctacctcctccaagtttacttatttttaacaggagaaagattactgaaccaattttgactaagtttatggggtgagttcgtctcaaccaaatactacagaggattgaaatctatattaagatagtcactgcaattattttcatgttaagaccagatatcagaacatttttaaaacgaatatgtggtgttctgtcagtaattagccattgaatatgtcaagttaatcacctaattatgtcttgctgtagaargacatacatgagaaacttacaagcctgttttgtacaacgttgtgtcttaaacactgtgtgtgatccatctgtcctctgaaattacttggagtcacctcccatcacccrtcagtgttctttcaggaatcatacagattaatagagtcctcacttccgtgctgtgctctgaacctttttaactttaatttagtcctgacagtggggaacaaggacaagtatatgccctccaagaacccgagagctctctacattttgtctagctgaggtaataaccatgtttattggcctaggcaatgtcttttaggtcccttttcccattaactttgtagttgtgaacagttgtcttgaggttaggaggaaaggtgatttaaggaaaaagaaggagcagagggatggaatgtgtacatagccctttctttctgaattatgtctccttgtttggcattccttcctctgggtgttttgtttcattggctgtggttgagcccagcctttattgatccccctgtcccaccagcactgtgtgatgtaaatgcaaatgtctggagtcatcggggatgcttcataaagtgtggagcagacctagagaaaggttatgaaaatgtacaatgcttttccatygttgtagcttcatgcagacattatatatcatgaaatgaccatatgtttgagtaaccatttatatggaagatgagagagtttgaaagttcatttttttgatacaaagtattttctactcagtcgcagccttttctatctcagtatatcatcatttatcttgctttgaatgaacttgagtacatatagttgtgtgtatatgtatatatatacacacacatgcaaacacatgcatacacacacacctatatatacatctgtatagatgtatgtatatgtacatgtacacacaatatatatgcatacatatatacatgcatactcctgtatgtgcatatgcatgtatacatgcatgtatatatttatacatatgcatgtatatctatatgtgtatatctatatgtgtatgtttataagtataaaatgtacgtataaaattgcggataagatggacctagtatgcsactataccacttgtgtttcttttccatattgaaaattgtcaatctttccccatttctgtagaaaaaatgaatttacactcaaaaaagttgattagccatgttaatagtaataatgttcaatatctggaaattagctgagtacatcgatatacaaattagtcaatacaaaagtagtatatgaaaaagccactaaataacatggcctctttgtttattgataaaaaattccaaaagggaagtggagaaaatggagaaaggcaattgaatgccaagtaataatcgttataaccactgaggggtggctgagagtggatagtattgattggcaaaagaaagctttcttgggattctgaggatatcagtatcattaatgcacaaccactgagaaggattttaaaaggtgaggcatagacatcactgttagaaataacagcagggcattttttcaggaagctctggccatttggtcagtcaagagctattaatttcagtgaattctgcctgcataatatgtgcagcccctagagaggccaccttcaattctaaacctcaacattcatttgctgtcttaccaccttagtagatttctttttgggtttttttttttttttgccaaaatcttcactgcatgattttgcaggctcacatgcttcttgtttgccattttaaatcacagtccccatcaaatgcccattatctttaataaggtgaagcaagaggctgggtgcttggctcacatctgtaatcccaacactctgggaggcctagccaggaggattgcttgagctcgggagttcaagaccagcctgaacaacatagtgagaccctgtttctaccaaaaataattaaaatatacagatatagtggtgcacatgggtggtcccatctacttggatggctgaggtaggaggatcgcttgagtcttggaggtcaaggctgcagtgagccatgatcacaccactgcactccatactgtgtgacagagcaagactatgtctcaaaaaaaaaaaaaaaagatgcaagaacttgaatcaagaatataaagctctgcgtctgcaccacaagagacaagagtaattggtagagtttgtgttatcctttwaagagtgcttgtgactagcagatgctgagagaaaaaccaacatatttttcttgttcctcaagctactcattattatcttgataatatttctaatatttatttttttaaactgacatgctttaaagtaaatatactgaaaaaaaccttattcactgactgaactaagtattccatttagaagtgtggaattggggctttttttttttttcctcaacatgtaatgagtcagtgtggaatattgattattcatctgaatatttaaatcttgttttgtttttggttttgtttgcatgtgggttttcttggctcaraaaaataaataattgcatgtaaaaaccatttattctttaatttcagaagtatttattcagcatttcttctattcaaatctctgatggtattacatagcacacaggaattcaaatgcagcagagcatctaaaacataaccaaacagatgtgtggggcatgtgttatgctaataggaaaggctatgcacagcatcactttaaccataaacacgctccattaagattatagacatagacaggtaggtattaggttggtgcaaaagtaattgcaattacttttgaaccaacttataggtaggtagatagacagacagactagattcattcattcatttattcattcatttttctgaagaagtagcaaaagagagactgcaaaactttctaaaatcctctagaggcaaagccaacacattatagcacctgtacttcccatgctgcatcacacaccaaatgtcttttcttgctggagtggccccatgtctttctgctggaattcagtttagactctcttagtctgttctctctatccattatcctgaccaacatataaaggtgtataagccaagctgcccaataattatgctgtaaaacagtggttttgagtactttctttctttgtgtttttgatgaatgcacaataaaatctacatttttgtcattttgccttggaatacaagtaaccatctcacacacacacacacgtagacacacacacaactttcaggcccaggcactctcccattctcaatcaacagtcttgcctcaagggcatatcattcaatctcatggatggaaacatacctgctgtccactcccaaattcacgtcactgtttcttccatatgccccttttgagtttaaggctgtctgtctgacatttccacttacatgtttctcatgcaccctgatttctcaactgcaactgaattcttaattttcatatacctccaaaacggctgttcctcaatctttcctttttagtaaattcgttagctatcaacttagttgcccaaactggatgtcaaggagtctctctgggtaccccttaggttctcatcttctatgcaatctatcaccaccacgtcctgttgatttaatgtccaaaatacatctaaaatccacccacttctctccattttcactttttctcaaggctcaaggacttactcttgcttaacttggctcactgctcctcagggcgcagctataatgttgccttatgtatcagctatctcttgtcacaataatgttgtgtagcaacaacaaaacctcactggcataaaacacaacagtaggcatttgtcacatttgagtgggtggggttcaccttgatgactctactgaccttggctgagctcactcacatgtctggggatcatcgagctgctggctgacttaggatggcttcagctaagaagactgggatgactcagttctgctccatgtgtctcatcctcccataggctagctagggaatgttctcgtgggaatgacagaggcacaacagcacaagtagagatatcaagtacgagtatttgttcaatgctctggtgtgttacatcttctaatattccattggcggaaacaaatcacatttcttagcttgtgatcaaggggcagagaattagactttgcttcctgaatggagatctgttagttccataataaggacggggatatagagaggatgatgaattaggatgattaaagccataaatccaccacgctaggtcagaaaggcctttctccccaaattagagtctcacctctctcccatttatactctctcacagcaccctttctatgactccatagccatttgtttggaagtggtttttttttattattattatactttaagttttagggtacatgtgcacaatgtgcaggtttgttacatacgtatacatgtgccatgttggtgtgctgcacccattaactcgtcatttagcattaggtatgttatttttaaagaactatgtactacccaaacttgtaagcctcatgagagcccagagaaaggagctcccttttgtttattcactcacagagcctagcacaatgcctggtacattgttaagtgttcagtaaatgtggagtggaagacaggaatggattggcagtggaattctcaaggtgcagatgatatatcctcactatagccccaggctagagtgctgcttacacctgcaggtaaagataaggacttcagctaataaattggccctcctactacaaggcctctggyttcattgagccttttgggaaatgtaccagttcccgaggctgtgattgtgatgtacttctcaccctggaccagagtcagggcaggagtcagttctacaatgctgcattacggagagccttgcctgcctatttctgctggttacaattccattattacaggacccagtcaaagcagctggagaaactctactgtatccctgaaaattcagctgtcctttgaggagtgtaacctaagacaatgtgtactctggtaatgccatgttctgcaatatcttccatgccaaggttggcatttttgttagtaatactttcttatagtgcaaagaaaagaagctgcttttaaagagctgaatttggcacctcataatttaatagtcaaatcatttgctgtctattttcaagggttttcaggggaatttaagaaccaggaaggactgaaagatccataatactttctttttctagcaaattattaatgcaaacagcattagtacaattgaatacaattgcaaggaatcaaggggattataaatccaatgagagaaaaggcagccagaatgctaagagagccaccacccactgctccaccatgacccgccattccacgtcccatgctatcctccacacactagacacatgcaactcctgctgccactgggttgtgatccccattgtccttctggtcatgctgtttctaccgtctggaataccctcccccacctttcctgacagcccaggctctactcaacatctaggcactaggtataaatttaaaatgtgcaaatgctttgacccagtacatttgctttgaaggatttatcctcgggaaataattggagttgtgccttgagtttgcacggcaatatgccaggacatttgcagtatttacgtcatctccaggagttaggatctggtggtcaagaatgtggctttggcatcagactgccttgattcaagtcttgccttcaccatttgctggttctgtgactttggacaaatcatttaatccttttgcctcaactgcttcatacctaagatagaattgatatcggcaactaactcctaggtttactgggaagagtaaaaktgtcagtaaatgtgaaatactttgaacagtgcatggtgctcagtaagaactcagtacatgtaagcacctatgctttcaaatggactctcattcgttgagaatttttcttcattttcttgctgtagttgctattagtggaacggttagaaccttctctttgtattctttgcaagctttaacctactgttttagatatatttgatcttcagtgaacagttgttagtatgtcaagaaaagtaatgaaggttcttaaactaaacttaattttttatggaggaacacaaggcaatttgctaattcggggatctacttctctttcatgatagcatctgcagatgtcatgacagtttttcaagaccctggcaacttgataatgtggcccaaatagggggccaatttcattctgctatgagtccaatttaaacaggctcgattgcgtcaaaattagacttttaattatactttatctaatgtcaggaatcagtgttgtgctttagctatttaaaactttggctttcaattagaaatttgatagcaatgcattgaatgcatctcttcatcatgttttcagaatttaaatatctaacttttttcttctttgattaaagaggattccaatcattgctgcttgtatacaatgtaagttacatacgctaatgcctcttcagttttttaatttttttaattttattttttaacataccccttcatttatctatatacaaattgtgtcagaagacaaaattatttctgtgtttttcaaataaaaaatagggtcccttttatttttcaaggaatgatcttctttattaaatattatattataccacaatataacatctagacattgggagggatctttgaagatggtggaagacagtcttgatataataagattgaagatgaaaataggctaatagaattgcaaccgattatactgggtgtacccactgctatgctgtgaggtagggatcaatgacaaagctttgtgtacttccagagattggaaatatctatacaaagagaggtaaggagtagcctttccttgtaaaagtagaattgattccatattatatatcctctgtatgtccccgaaatagaaggtctgctcccatgagcagcttctcagaacataagaagagcatctgggctgaaaaaatgtttcttgtttcctccttgttacctattctttgtatagatccggggtttcaacgtaaaggtcatgattttatctcctcagtcatttgttgctgggcacaatttgcctttatggcaagtgttgttgctagttcttaaaactaccagaagagatacwtaccctcctgagcagacagaagctcaggagtgccacaaagatgaatatagattttaaaagaaatttaggtaagaaactagggaagtgataaatcatggccccctgttaaacagaaaactcattaactggaatactgcgttctagttaagtgacattttactatccttttttgtacatagagcattacttctttaataaaaggattacagaagcacaatataaagagggtaatttaaaaatctctaaacagtgaaaatactactttttacgctttgaaatggctttttatgtccagtccgagtgacacttttcttccttagtaaaatcagcaggcacttccaggtggctgaaatccaccctgtgcattgttgctgagaacatttatagcacattgttcagattagaatagctgagaacgacagggggctcttcaaatgtgcctcatcgagtcccaaattggagatgtgtttttgtcatttcaaagttttggcagtagggtctaggattcaaagcaaacaccagctcctgcagaacacaagccttaattaatttccagcaggaaatgagtgattgccaataagccatgaattaaaatggaatggttcaccaaaaaccaggtcctcatctcaaatgaatagcatttcttgctgttttcttgaaagatcatctcagactaagaagtgagcaagctcctatgacagctctctgtctgtaagggggtagttggtatggacaaacaccaaacagtaagtcctggcccagtaaaaaatggggaccaaatctgatggactcaagggcattttgtcagtatctctatcatgtagcctgcaatttttatggagaatctgtctatttttctggcttcattatttatcatgttgtcattaagattcagtcttgagaaggtccttaaaggtcagctgttttcatcattcagtcagtgcttacagtacactggggctacttctgccaaaggggtgtccagttgctgcttgaactcctcttgtggccagaaactacccccttctaagagaagcctgtttcatctctgagcagctcagccagttttcattttttcttaaaattgagcaaaaacgaatcccctgytgcttaaatccattgagcctggtttatccctgagggccaaacacaatgaatcaaaaaccttcttctgcttgatagctctttaataaaaggggaaggcaggtctcacactccccctgaggggcctcttctgtggacaaacatctctgagcttttcmtatcttctttgagagtgctttgtgtgtgtgtgtgtgggtgtgtccacttgctcttatgtaaattctaattactattgtaataataaatagccaatacatacagaatgcttccagtgggccaggcagtgttctaagtgctcccataatcctcacaacaactgtatgaactggttactaggattatcccattttacagagaaaaaatgaggcacagagagattaagaaacttgctcaccaggatctgaatccactattccacactcttaaccccagcactataaagtttctcatgtcctcatttgtctatttcagccatacctgtcctggagacaagagccattgctagttttctatggggaactgacattgctatcatctactccacactggctatatgctaggaactatagattagttggtctgattaatcctttgaacagtcagcaatcattgtttttgaggatgtgttgttgttattgttgtttggtccagcacttccccatactatccccattaatcattaattatgttgttaattaagaacacctgtacttaactcgtggccatttattccttttctagaactatttattgtctatattttagagaaccttaaatatgaaaatggttaatccagaattttttgcttgggccaagcaagcaaaatgcattgctgctttatgaagaagaccttcttttggtaagaagacagtttttcatattttcatagccagcaattaaaaccacatgagacaggaaaaccttcaaattctttctgagcaaaatactcttcctagtgagaaatgtgctcaaagtggttaaagataatgggaagcagcagaattaggatttgaactcgtgtgcttctgggccaaaaccatggagttcccattttgcaaacacaccttggggtctgtaaccaggtgcggctccctgcaggtgccaaccacctgtggtaaaggcatgatgagtccacttcctgtaaggctcagccctgctagtcgcgactagcgccctctagtggtccaagagaaagggtaaggtgagttccggtttatgatttgacttgaggcattcggaggctaaacatccacaaggttagttccctgaacccctataaaccttgctatttatatctcttcctcaactctgaggccctcaccctacatcggctgcagtacagattcagcctttagcgacggaattatgtactgaaacactcatttctgtgccgctgcagtggttagctttgatttttatagagatgcacatgagaaaacagtctgagcctggagagtgacttgtgggctgctaaggtaaattgaacccatgtgtgtggtatcctcatgattgggagcagcagcagatggtgggctaggatgcctccagaaatgggcttcggaagcataaaataaggacttgttctcttacatctgcctctgttggggtgtttaaagaattgttgggattaatgcatttttcatttgaagtttaaacactctcagaggatgtttagccgatggactattctcattatagaatgaattgcttcactgggttgcactttgcaaagattggctgcagggagtaagtgatttgttggaaaagaaggagcaaaaaagggtggaaagagcaaagactcagtgtctcagacaagtcttcaacttttcctctccatccaaaatgaattcattatgactgagaggttccagttggactcctggagacatttagaagtgccccagaaatgccacctgcaggtcagtggtcatgtcaaactagaatcttctgcacaagtcaaatataagaaggaaacttgtttcatttgagtcagatttacttaagttttggattgactcctagatcggcttctcactttgggcaagctccttaatgtctgcaatccttgttattttcatctgtaaagtggagcttgtgatgcttactttgtgagatgtctttggaatcaagcgaagtaatgtctgtaatgcgaatagcctagtgcaggcatacaacagatgccccatctaatgggattatattaaaattattgttgttttaatattggttatgaaaatattgcaaagtgaatgaagaactctccttttacccaatttttttgttcaattttgtacgtgaacagtttaaggaatcttttaacggaatttttaaaaacacttggaggcggtgactctttaaaagctaaaccatgaaatgttaccatcagaaaagagctgctgctgccatttacaagcattaaccaaatcctcaagaattaagctagaactgagcacattcttaacaaggtggtttcgagttttcagatacatctttatttcttcagctcatttgcaaatacttatctctgatttaaatcattcaaatgacttcaggaacacaatggaagcagagcagaactaagtgtttccaactgtcaggtctggtgagggatgatgtaaaacgggacatttagctggcatcctgcatagtctttaaatagaattaacaaaagcttccacgtttcaatggctaaaggtagtgtttattgtaaaggcagcatgcctggagacctaagagtgggagtaggggggtgggcatgggcacgtgtgggtgcaggcagggcattctgaggggtcagttgaaaggctctgtctctggattcagctttaactggttctaaaataatgaagcagaaatgactttccttctctctctggtgtcagcttcaaatgaattatggatactgaacctacagaggtaatgctgattaaataattgaacaatccattgattaactacagattgtcaattggaataatctgtcgacgacctgactgcccacctttagcatttagacagtattttaatgttaatgaggttttgaactttttgtgcttttggtttggtgggggttttttttgttagtttttgagggtttttggtgggttttttatttttggttcagcacttccccacctaatcccaattaatcattaattatgttgttagttaagaacactgggctgggcacggtggctcacacctgtaatcccagcactttgggaggccgaggtgggtggatcacctgaggtcaggtgttcgagaccagcctggtccaacatggtaaaaccctgtctctactaaaaatacaaaaattagccgggcatagtggcacgcgcctgtaatcccagctactcgggaggctgaagcaggagaattgcttgaacctgggaggcagatgttgcagtgagctaagatagtgtcactgcactccagcctgggcaacagagcaagactccatctcaaaacaaacaaacaaacaaacaaaacaaaaacacctatacttgacttgtggctgtttattccttttctagagctatttgttgtctgcattatagagaactttaaatatcaaagtagttattcctgaactttttacttgagtcaaataaacaaaatgcattgctgctttgtgctttatgcagaagaccttctcctggtaaggagacagtttttcatattatagccagcaattaaaaccacatgagataggaagaccttattctaattctttctgagcaaaatacttgcccttaatttattatttaataaacacatatatagcacttaccatctgccaaattatttatattcttttaaatattaaccaatttaatcttcatagggactttctgagtaaagaactatgaatgttcagcygggcgcagtggctcatgcctgtaatcccagcacttcgggaggccaaggtgagcggatcacctgaggtcaggagttcgagaccagcctggccaacatggtgaaaccctctctctaataaaaacacaaaaattagctgggcacggtggcaggtgcctgtaatcccagctactcgggaggctgaggtaggagaatcacttgagcctgggaggcaaaggttgcagtgagccgagaccgtgccactgcgctgcagtctgggcaacagagcgagattccgtatatcaaaaaaaaaaaaaaaaaaaaaaaggacaactatgaatgttcctgttttacagatgagaaaactgaaatacatggaggctacataacttgtcagagatcactagtaagtggaagaggtgggatttggacccaggtagcgtccatagcttaatcagtgctctctcagtactttttggtcataactcttaaataagtgtaataataataaaaaataataataatgtctgccattcatagcattgtacttcttctgcctttgtagtgtagttcattttgaatcccagatagrgactcatagatttttttctttttaatatttaaaaaatctcagatttgttgacttaaaatccatatagttttttttttaaatgtggacctagaactgagtattattgggggaaaaaaaacattgtaaattagtaagtagtgtggttcatgggatcatcaactgttagcgctgggaggaatagtatttttctgacccattttattttgggaatgaagaatctgaggtgggagaatctctggttttatacaacagtaggttgcccatggctttctttctgaggagactgggggagacacttggataagagaaggacttctgtgaacaagggggtatgcttttctaaaaatgatttgattaatccttgaaaatatccttctacgaggcacagagggaaatcctccctacccccgaataatgcacaagaccttactggtctacaaaggtcctgcagatagaactaaggacaagagaattcctatgccgctgtaatggcctacataggaaaagcattcttcttgttgttgaataagaaaacataacatcctccagatttctaccagtgtttttcttatgactggaaatagtaagtagaacaatgtcatacttggacaactatattcaaactggctaawagttttgttaattgggactacaaatgagaaatagaagtcccatgatgacctagtccattgaagtgtcaagtttaagtctcctagttcagaatcaaagggagcagctatagggtgagaagcaatcgcgtccataattccgttgacagcagttttcttcgggctttgattcatagctcatctgctccctgctgattgccctgagctcagcaatgccatgctggtttccatggtgctgatttgcataccaaaccaggacttgtatttttgtgtttgcctcacacatttccagtgctaagtgttcttctaagaaagggattagcacgctagccaattaagggagtttgccagaaataaagcacccagggaatttttcttcaggttatatattgctactgctatgcctaagtactgatatggttgattggttttcttaggtcagcaatgagtcttaaagataaaatttctactgtgtaatctttagtgttttcttttttttttcaactatcttttaatcagtttcaaacatttcagtgattaaaagagagatttgttgtggttttgttgtggagcagaaatggatttcaaggagtttaccttcagagcttttgtttttgttacggtgggtctctctagtggaaaaaaaatttccccatccctttggaaatattttctttaaaggaaatcatgtttttaaaacaaattatcgaaatcagctttctaatcaatttgaatcatctgaacaaaagctggaaaatgtttagttgtaaatttcaccaatgaatactacttagcaacacaaagttgaatgaagttcaactgttagtcccaagcttatggatcaatctcaaaacatgatgctgagtgaaagaagccttttaccaagagtatatactgttttattgcatttagatgaatttataggacaaaccaaattaatctatggtgaaaaaagaaacagcagttgcctctgggtgctgggacagggatggcctggaaaggggtatttgggggctgtctagggtgatgaaaatggtccattaatcatcatttatcttttgtttgttttgtttaatttccatttttattttagattcaggggttacatgtgcaggttggttacaaggatatattgtgtgatgctgatcccgtcacccagatagtttttcagtccttgaccccctcccactctccctccttttggagcccccgtgtctatcgtttccatcttgatgtctgtgtttacccaagattaactcccacttataagtgagaacatgtgatattggttttctggctttgtgttaatttgcttaggattaaggcctctagctgcatccacgttgctgtagaggacatgatttgttattttttgtggctgctgcatagtattctatggtgtatatgcacccccactgatgggcacctgggttgatgccatgtcttttctgttgtgattagtgctacagttttatactactctcaccagcaatgagtaagctttcccttttttctacagcttcaccaacatctgttattttttggctttttaagaataaaaaatggtctatattttgttaggagtttaggttatgtgtgtgcattcatcaaaacttgtaaatgcccacttgggatgtattcatttcactgtatataaattttacctgaatgtaaaaaacaatctgtaaaaataatgttcttcattgtaaaatctagagtgatcgttatcaaagacttagaaaaactagaaactgagaaaaggtggtatgatttgtggcagttcaattggcagaatttagaaatcatgaatagatatgtttattctgctatttcaaatacttatgtgaatctctagagccatgtgggaagatatctgcttcctgaagctctgcattcatttatagttttatgtggtcagggaggatttgattgagttggaaagtggatcatttgtacttcactttgatccatcttcctttttagaaacgagagaaaaggcatctgtgattgtgcctctgattgggtggcatccaaaatcttgtttctcagggtgagcttarggttcatctctattaaacgtatcatttgtcagacattggcatgtctagtgattcggaaagcccttggagtagcacagaaatgctatcataactccggagtgatcttttgcccttaccagkactttggcttttttaagttgccacttgaacttgggtaagaggccaaggaggtggtggctgaggcagtcaaatcttgtggaatgtggctgtcaattgatgccctaaagttaaggttggtctgtattccacaattgacaaaaacacatatacagttgtgggcccagaattggagtgatgagaagaccttgcataatgtctacacaggaggagagcaagcctttaaactccaactgccttgtgaatgttcttctcttttgatgtcccctcttccctctcactgctcaacctctaagtccatgctgcttgcatatacagataacggtgagttgcagatgatattataggtggcctatccagatccatgtcacctggcctgtgcttttagagccagctgctgtgaggattagttgggaagactcacagctgccttcactctcagagagttatccttgattgctggaagttatctagccagggttggttatagatctacccacccaccaatgacatcccctctccccgcctcctcacgtccgcttctcaagcgcgcatacaattcttctaccccgcaaaagcctacaggactatcccattcccacagttaggaatgactccatggtacttttcatggtccagagctctctgtgggatcaggccaaaaactrcactttatttatcttcttcatgaagatggtgaagaatctcaacagaccttcaaagagatcaaggcttgcatctaagacaggatcaatgattgcctctaagaagaaattacacctggatatttgggtacctgtaattaggtgttggctatgttaatgttttgcctgctgtgaagctactgcatgcggtgcttgggtagtgccactcttcttacatgaggcagaaccaagaggaatgaccctcccacatagtaatgaaggggaaaaaacaaggcaaagcatgtttatttttaacattttgctcttcttaaaagggcatcgtttacacccattccatctgtagaactttcaacacaagggacacatactgaagtaatataaactctgaccttgagttattagaatatgccagagactttgtagttcctgagagccacaagcctccatcttttctctatagaaaaaaaaaaaggcttaaatcattggtcagctctcctgtgcttgaaattgtcaccgtttgaagagtggctgtccttttcaaaatatttggcattatagagtcacagaaaaagtgttaactattctgtgcatttacttatgttgaaaatgatgtcatgtatatttgtatttaataaaatgtgaaaggaaaggaaaataagttcttttcaaaataaaattttggtgccccggaaggtttctcagcctgcctgcagcatgagttttacttaaagcaaaaagcactagcattttttttaatataatgggatgcaatagaagataactatatcaatcacctatttgtaaaatagtgctgtgtaacaaactatctcaaattaaaataattaaattagctcaggtatttttagtttgtcaacatagactgggctcagctggcagttcttctggttctggctgggctcgcatgtgcctggcagctggctggtgtttgagatgatggagacaatgaagctacatggttctcattctccagcaggccactctgagcatgttctcatggtggtgacagaagagcaaagatgagagcaagcaaggcacttacaccctttcaagcctccacctgtgtcttacttcctaagatcttattgactaaagaatgtcacctagtaaagcataaggtcactgtaggaggtcaatacaagattaatgatcaaatatgtgaatgctgggaggagcaaagaattggacacattgagaaaatctaccttatacaagaatatacatacataggaaattttattaagtgaaacatgaaactcactagctagaaccccaaagctacaatgtacttcacattttctctctgttttctttccagaatcttgctcctactcactgaccttgacctttctcattttgaacacttcatttctgtttcttggaatatctgtttttcttttctatccaaatccaaaatattcctcaaagcccagctcaagtttatactttcctggaagcctaatatctgtgtcattgttcaagtttgtttttatattactttatagtcatgattatttttatctgtataacaatgtcttgttgcttcaatgtagtctaagctccttcaagtaaggaaccatgtcttatacttacttgactctcccgaagtaggcttattgtatagtaagagtttaatagtaagttgattgacaggtagttccattttcaaagttctatgctaatcccttttttctttgtctctrccaacattatcttcctctacatctgagatggcatctcgagagtcatcttcagtccattagtaacagctgtcttggagaattatataaagaacaactctagccataactaggaaagttggaatgagagctaccatagattagtaatgtctgccataaatagaggaaggggataggccattcatatttactaccaaaatagttcttaattttttttcggagttgtatcttatcttctaagctcagtggagaaatagtaatgatattcattgaagggaaatgatagtgatggcaaaatatcagaatatatgtaagaagccatatattcaggaaaaatcacttaataataggcagtattatgcccacagaagggctttcagccaacagacttgacttcaaattctggttctgctgattactatcactgtgactttaggcaagctatataacctttgtctgcctcagtttccctatgtgctaataaatggcaccaaatgagggttgttttgaggacttaatgaattaatatactcaaaacgcttagcatttgtcttggcccatagtaagcactgaataaaatactagctactattttttattaagtagtggtaaaaattacaaataggtaaaacatacctttaaagttaagatacaatgtaactcctccatttgaaatcttagatgagggcagttgatgagaggaaggggaggtgagtgaccctgggcctaacagagagctaggctattcctatgataccaggaacaactttgagcaatgattttgccagctacyggcactttatttcagtcatatttaattagagacacagagccactaatcaagattggttaccggatttgaccttatgcaattgtggaagctattaaacagtccctatgagtctgtagtcttcacatctgaggatggagctcaaagccaacagggaaggaaggatggatataaagtgggggagagcaaggcaagctgggctcatgagctagagccagaccttaggagaacagactggaactcaggtcagttcttacttcttccatccttggactaagcagggatcctgtaggagaagctggctccttcgtcatggagctgaacatatgtctgaccgaggaagtaacatatatgtagggacagaaaagggtgaagcaattgcatgcaaaataagtgagccaccaaaaaagtgacaaagggcacctgccctgacctgagtgggaagagaagtggggacactttagtttgtttttccagattttctgcaaaatgtctcttgtggctcatggtaatcataaacagtgggaaatcttgttaaccctagttaagctgacacattttgaagagtcaccatactcctctagtgaccatgtggtacaacagaaagagaaataactggccttcaagtcaaaagatctggaagtgtaaccttggccaaaatcacttaccctttctcacttgtgttcttgtgttcttagttttcttatgtataaaatgagggaggaaggtgggctttttcatccttaaggtcccttccagctcttagtctgtaattttgtcaccttactgcctactttcattaagtttcttgtgtctgccggtcttgcttacatatttcctgctattctgccccaagacagccagccaagccaaaatgagcgtaggcaagggaaagaagcctgagtgtttgcctaaacacttagggctgctgaagtcagatgctgagggcaaagggcaaccgtaagtgatggaattaaatgtttactgtgttaaccgttgaccactcatggatttcagagaaagctgaccatattgattggagttttcactcctgtttttctaatgatatgcaatcttaactaaatctgccagctctcagggggttgaacgctattcagcaacattaatttctttgcctacttccagttaccagcaattataatcttggcagttttactcaccttgaataagcacttgtatgctttattgatatctggcagagctggctccttccatgcaaagacccacttatgtttctgacactgctaactctacaaagcgctcaagctgcagatcaacatttgttggacattctgggggaagatgttatttctgaatatggcaggacagaaagttccaagaaagctcaaagaaattgtgtttatatgctcttagacacatttttttccatcccctcccctcaaaatcagtgaatgagccagtcctgaaagacacttggcacagtttcacagtctcttattgacaatttccttgctgggaattcacctagcctggagagagcgatcttgcctgtaatgactccttctttatagcatacaatcaattagtgcttatccaatatttaagacccagcccctcacgccaattcaggacagttctgttggtcagtctcaacccggagttcccatgagattggccgagacttctatggcaactgtaacacagccaaacttctgcttttaccccaactactcccttccatagttattaatcccagaactattctctaataaatgcctatatacaaacccctatctccgggtttacttttccaaggaatcagtgatataactgccatgacaatgaaagagatmaaaatttgggagacagaaagacgaggggtgggaagttgaatwtttttcctcatttataacatgatctggttgggaggattcaaggcagaccagttagtacagatccccagtcccttttggggatcataggactcttgttttatcccctcacggcatttatcaccttctctcataaaaaatttatttatttattatgttttatgttgtttgcctactttctgtctatacccaccccckgcccagataccctcaaacaagaaagtaaaacccaccaagatgaagttctttggtttgttcaccagtggatttcaaacacataatagatggcaataaatgctaagtgaatgaatgaatgaatgagtgaatgaatacagtcagggagaagagctgggaggccatgacagtaatgtaggtgagcagggatagaggctgaatgacatcaaagaatggggatgagaagtggatagagtctaaggttttgtggataatagaatgcataaaagtgctttagaaacacataaagttctcacacttgagggtacatcagattcccttggagggcctcttaaaacacagattactgggccctatccccagaatggatgattctggatgtctgtaatcaaagtcccgtttgggtcattatttattttagcaacatccaccatcatagattgtgagccccatggtaggaggggctgtgccactctgatcacacaggctgtctttcatcactagtggagtgtttggcacaagctagtactcagcaagatttgttgagtgagtaatttacacccccccatccccccracacacacacacaacaccatgcaaatctatgcaatcagggcacttgcaaatccttagtattatcaaaagaaaaatgcaaattctaaggcattcttatgccccagttttgaccagaattgacctgtgaagatgagctcaacatccaatccagattattcttagtgctgttcagagtgggaggatcaacagcctctgctggtgtatgctctcactaatcattatccttatttccagttaataaggtttttgtctattttattcattgtagaaataaagaaaagagttagtgttgaccttgtaaccataaagcttcatagttttaaagtcaattattaaataacccattcatctttcttcttttagtttgtttgaaactctctttttttaaaattattttctcctgggcactactggcaacatttatttttcttccattgagaattcattaagaattatttcttttcttttttttttttggaaatttatctaacatctcaacttctttattggaatacagagaccaacactgaacttggaattcataagtaaaatgrcagttacaaccagatattatttctcttaagccttatctctgtgatgcatcctagtattcataactaggtcttaatcaaaaaattattttgtaaatttttagacagtgtatgatgttatatgacttctaggacttaaaagtcttttgacttttaaaagtcagagatatgtattttcctttttgaccttacagtctaccacattcattattaattcctaacctgattttctagtgggagaagggggaggaatgaaactttcaaataatgtaatgcacctgaattaagaccattttgactagtcaaatgcagatatgcagatattttaggccttctgaacctttcatttcatagaaatagaaattgcccccccmctttttctttggtagtcatccagcttgtttctctgttgtacaaataaaacagaaattaggacagcgctgagattgttttattcatccctgagttctcagaggttagcacaataccttccacatagaagatgcacggaaaatgtttgttgaatgattaccaataatgaagttttattatcatttttatccaagggcactgtatttcattctgtctatacccactcctgtgtttatttttttkgggttgtgtgacaatattatgttcctggaaaagcaamtaagaaaaaattgaaaaaataaatgttttcagtgggccaataagatggttacttttgtgcatatttttgtggtctgatgttcaaataatacaatagtcagagaataaaatccttaaaaataatgatttataatctattaagtgtcaaaagtgagagtagtcatcccttcttacttttataaaattgtcactcttttttgtttggtaaaagtgatatctttttaccagcccttccaacagctaattccttccactgccacttaaagtagtctgtgtttagctgtattacatttatacctactcaacttatcttttagtaatgtagtgtgtattatatataggcacccatacacatatgtttaattatgcaatgactgctttcttacagcttctaggacatgggtcttagagtcacaaaacctagtgttgaaatcttacttctattattgcatcagttatttactgccaaataatgttgcataactaattactcccaacctcagtggcttacgataataagcatttatttagctcatgtatctgtaggttggaaatttgagtggggatcacctgggcaattctggtcttctgggctggctcactcatatgtctggcgagtagctgacttctgtgatggggtgactgggtcatgtgtctctcatcatccagaaggctagcccaagattgttcacatggtcgctgggcagggctctgagagagagtggagagcatcaggccctttgagacctaggctcagcatgacacactgtcactctggtgcattcttggcaaagaaaaaaaaaaattgcaaagctagctagaatgaagactccactttttgaaggcaaatggtgttgagtacaagaaggagggggtgacttagggccatctatgtagtccaccagagctattcacaagctgacttggaacagtttattccaaccttggctagataaacaaggagagttcatgcttttctttttcttattgtgaccccatggagggtgcattactctagtgaaataaagattctccttatttaccaccaagacatgggagtgaaccagcatacataatgtcactatccaacactgggaggaaaggagaagcctcttggggtggggggaagggggagggatagcattaggagatatacctaatgctaaatgatgagttaatgggtgcagcacaccaacatggcacatgtatacataagtaacaaaactgcacgttgtacacatgcaccctaaaacttaaagtataataataataaaattttttaaaaaaagaaagaaagtgtttagcacgaggttttgggtgaakaagatgagacatgtgaggtccgggggcatggcattttggctgcctagatatcccaggatttaggggaatgcataactttctcactaagtatatgatgaatgagtaaatatgcttctctatatgttgttattgtgttgttgttaataaagtgtgtttttcacactgtaatctttcagagtaacacagactcatatacatatgaaattgaggactgtgggtatcaactacaaaacatccacgtaatagcagttaatactatttgttacatgccagactcagttctaggagctcccttctggtaacacagttaatttttaggaggtaagtattaggtaatataaacttccctattttggagatgaggaaattaggttcctagacattaattgtgtgtcccgaagtgacacagctaataaatggcaatggcaagatttgccctcaggcaggaaagctccaggctcagaaccctaaacccctattctacagctgtggcttcagttagggtttccatatgtggtcactgttgtaattctggctttcttcctttgaaccaactctcaggaaaaccaaaccatgacttgcatgttgttccatgggtgtttttcatccttctctggctttgtcttgacaaagtcatttggtacatatctaataagactttcctttgccatccattcacgtgtcatcaaggaatgcaaaacagttttaatgcaaaatacttgtaatattaggacagaaagaaagaagaaagaaagaaagaaagggagggagggagagagggagggagggagggagggaaagagagagaaagaaaagaaagaaaaaggaaagaaagaaagagagaagaagaaaagaagaagaggaagaagaggaagaagaagagaagaaaaggaaggaaggaaaagaaagaaagggaaaatagaaaaggaaggaaagaagaaagggaagtaaaacagggagggagatagagaaagaaagaaagagagagaggagaaaaaagtataatggattscaatatttttctgtcatcctcaatgttcggctcatactctgtacttctgtgttagcaaacataattgaaataaaccgtttaggtagtaagctaattctgcagcattcaaaaaagacagcgtgcaatactcacaatttgcaaaactgttctcctttttttgtttgcataggtttatacatgttccctttttatagcacaatgtaaacacatgtgagaaaaactgatttgaaatagattttaaaccaggcagcccttttgctgtttcctaattggtattcatcatacctcttattgttgtgttctaagcatttcgttcatttgtttttcagtcctcagtttcctcatataaacttccatgatctgctgcctaagaatttggtatctgttaatgaaaatcaacttttaaaataagcattcttcctgccctggcaattaggagaacctttgaagacattgggggagtgatatgggtcctgggatgggaacagtaggattctgataacaagccaaagagatcagaaattcctttaagtattttaccggtacccyatagtcctcaaaatcacatacacaaaatatcatgggtacagatcaacaacaaacttagactggctttataacagtgcaaggtctaaaactttgttaccaagtcaccaaaatattcccaaataagtaaaaatcccacattaaatgccaccatcctttgtctcctctctcccccgcattgggttctggaggactttggtcatcatagccgacatgtcagtgtcccctcgatagacattcccttggcatgcagtatatactgctagcatcttgttataagtacctgtggctttctaagagatttctctgggttccacaatgttttcagttacatgctgggcatgctgaaagtatcaaggaattaaagcttctggaagcagccgtccactagttactaagggatttgatagaaaaataccccaggtccatcaggttttagtaggggcggatctgaggcatgttctcctgatctagaattccccagcagaactgagcccccattgccaacaatggttgcctatttattaatattctttattttggcttctttctcttcattgtcttgtattcctgctcacctgtcattgcttcctggggttcctttccccagataatctccctccacttcagctctaattcagtgtgtttctgggaggactttatagaagacatctaccataatattacaaaaattaaattactgaagctattcaaattattttctgatattttcattctgtccttttcttacttctatcaacccatccccatgtgtcttttttccctgcagtccaagattatttagccccatcctacaaggtcaagtattttatacaccagctaaggagtaaagtgtaaaattttwwaaaaaaatcagtaggtagaatattacactggaatcttaatagttcttgctgatagtgcccttaaggttaaaaaaaaaaaactcattaaattccaagagagaagatggttataaaaactgaatgaaaagatagaagttattccacaagcatttcttaaattagtttgttaagagccttagatcatcagacatcaagtagaaaaacacttatccaaatctacagaaagcatttctcagaaagtgaaagaatgcagaaatttacttccaaagttwtgaattaaacatgacagaagaaggcatcaatttggaaaactttctcagaactctcccttgcttggtagagtgggcagcttacttcatctgtcagaggaaaggaagtagctgttactgaccagacgacatgtgttgaattgtttgaggctgtaccgcatgtcaagctttgacasaactgacataaaaaatatacctcacattgtgttagaattgaagagaacagctcttgttcattagaaggtgaggctcttcaaagaagcttcctgatgcagcccgatctccagctcacagaatgaaaagggtttcctataaatctcagttaactgattgctttggagacacagtcccaagagggatttgaagccagcataaacttgattatatgcacagcttgcgggatttggtcattctctttctttcggatatgttttgtgttctttctaaaatatagtcagtgatattttaagttgtttataaggtatttataggaaaatttatttataaaatacacaatgttccaattatcaattgctgtataacataacatcccaaacttagtggtataaaacaataaccatcatttgttgttattatctattgtggttctgtgggtcaactagtccaggctagataataatctttccacgtccctcaggaatctgcattcagaggatgcctggggctagagcatctcaaaagcttccttccccactcacatatctgttgtcttgtctagggagacccaaacagctgggcattggtgtctattcctataaactctctccttatggcctctccagcaggatggattcaggatagtagggcttctcattcggaggttcaaggctccaaagattcatgtcctatgagggagcaccaggcaatagctgtgttgcccttcacaatctaggcttctctaggttagaagcaagtcactaaagcagcctatattcaaggaaggggcatcgattttacctcttgatggaagaattgtcaaggaatttgcagactttttttaaccattacatttaatgattacctttcatcatcatagggccttattggtatttgcaagcctagttcacttaacctaataccatgcttagtcattgccaaaaaaaaaaaaaatctggctaatttaatgtatcaacaattataatatagtgatgcttttactaatttttatgctctattcaactatcctttaaaatatacttatctagagggaagagttaagtgagaaaactgaagatttagaagtatgatgttgatttctaaatcaagaaaaacatatrtactattgctttttcactgaattaaactgatttttacagagtgactgctataatcataacactgggctagactactgtgattaatacaggtaagtaaagacggttttaaaattatgaacagaacttagtcctagttcacagtctctaaactggtaggggtgtgtgtgtgtgtgtgtgtgtgtgtgaaactacgtgacaaggattatttacacaccattatagaagtcacactaattaaatctaatgaaagacatgtattcagttttgatattttccgtaagagtcaggcaaaagttcccaacaamcttctaaatctataatcaatccaaaggaaattataaacaatrggctttgtatagagagagtaggtgkatcatattaggcaataatcacatagttgatttcttactataaattatgatttatgtatcataaatagcatacaaatgtttgttaaatgaatgagatcttacaaactattactgggaaaatctttaattggcagctcttctctgatacggggactccaagggtccttggaacctggggactggggacttcctgattattttcaagtagaagtgtttgatttatagttgaaagagaataagaccattaatgttctctcattttttttaaataaaagtgtaagctctgccaaggggcattttctcattggctttcagtgttattttggtctcatgaattcataaacatcagcatctctacctatttccaaagaaaaaaaatttacttatgctcaaatccttgtcacagccactgcttctagggaaacataaactaaggcagggtgattgcagttctgggtatttgaaagaggttcttatggatttttccatgtgggaataacgtctaagtaattttccaagaatgaaaatactaaagtttttgataattaaagatactgacacagtacagacacaaacaggtttttcgggtgcttttcttgtgaagctttgcatttaaactgaagttttattcatgtaataatcatgcccctactattcgcaggagtaggaataatgggagttaacaggtgaggcagaaaagaaaggacatttcagagatgctctgcaataaagaagtgactgaaaactatagcactggtttttcttggttggatgaattaatgcacattctgaaaaacagtgttttagatttcaagttccaggtcttccagaaggagctatcatctgagctaagattgatgcattctagaccattattctggactcttctctgataagcccatgagataattttgttgaggtgtgatcatcccagcgttttagttatgtttcactggaaaatttaaaatattttaataagcaacatttgtttgggagagatacactgtccctgaacttggcctactatgatgggaatcctctgttctgttcaaaggcagttttctcaggcacctatggagtcagagactgatgtgacacttaagtggtacttactatgttccaggtactgagctgagaaatttatcatgtattaattcatttaatcctcacagccagccatttaatcatttcatctattttaaagacaagggtcaggaaggttaagtgacacgtgtaaggccacacacatatgatttgctggaacttggattcaaacctgtctgtccttagagtccatgcttttgtgagactccacctctggctgttcctgaggagttcctagttaagygggaatgggggtgggcaagccagtgatgacagggttaggtggatactggaatattcaggaagygccagaaagtacagaggatgaaaggcttgacttcaccttggatatttaaaagctccagaggacaacaccttcatttgaattggaaaggacatagcccattggaaaacttgttgtttccagggaacaaaacattttagactattttgaaaatctgtatgaagctacaagtacttgtatttggttttataatctaggtaacagtaattaaaagttgattcttttaaaagagatttacccttcgaggttgtttaagtaaatattttgctctctgttaagtgttcctacttggaagtgtaaatatctgcaaatgtgtttatgtgagtcctctaacttcagaaagagtcctawcctattttcttcaagctcttcatactaaatattaattctctgggaaattatatagtgatatattgacctctacagaatagattcttcatataaattaaactatgtggtttaattttctgttgttactcatttctttagcttgtgagtgttcacccatgtcctgagtgtaagattgtggggctggaaggtttgcattccagcccagcgcttacagcacagcacaagctgaaggccaaagaataggcgattttcagttgtttttaagctttctaggaatgataggttatgatttcccttggcctgtgatttacctagtttcataaaaagtatattttccttttttatgactgacaaaattgttcctagtgtaagttacctgctttttccgaaaagtttgttggtgacttagtttaactattaacccatgaagtctctgaagcaacaaatgcctattattaatcatgtattttgtctgggaaacccccaatgtcttttacttttttaaaagaaatatgtataagtcaatgccagattgcatcctcactttaattttacttctatgaccctccagaattttctcaaaagtagacctgcttattgggtctgaaacaccacactgaaacagatgctgatacttgctagaatgttgacagggctgctttcacagcgtccaaataaaactgacttaaactagatggaggttttttgttttttgtttgagacagggtcttgctctgtcgctcaggctggagtgctgtggcacaatcatgattcactgtagccccaacttcctgggctcaagcaattatcccacctcagcctcctgagtagctgggactacaggcgtgcgccaccatgcttggctaagttttgtattttttggagagactgagtttcgccattttgcccagactggccttgaacttttgagctcaagttatccacccaccttggactctgaaagtgatgggattacaggtgtgagccactgtgcctagcctgtttgtttttcatattaagttctgaaccagagggcagtttaatgtgaccctactccatttggttgttgaggtgtccaggcttcttttatgttgttccgccatatgctaaagtacttgtatgtctgaacatgggttacagcaccatgtcctcattccagttgtggggagggagaagaaagtgggaggaaatttttcccttgaaggacataatgcagaactttcataaatcacagatgttcacattctattttggccagaactgagacagatgcccatgcttagctgcaagggaagttggaaaatgtagcttaatgcaagagttcaaccaacagactcagaagttgctcttgccaaaasgaagaaakgaaaacctgggtattggaaaacagcctctgccatagaaggcctctaccatagaagscttgttagcggcctcttccatagaaggcctgttcatcatagctcagttcagaatatcagggtcttcctaaatttatgtcatgataattctaatttctaatgtttaagttaacttttagttcacttgtgccttcaggtagttttctgagggttttctggctgtcaatttatttctcacattgttgaaaattatgttatcttctagttgccaccatagaaaattaattatcttgtagttcatttcactaactacaaatatatattatataatgtgtacatatgtatagttatatatatatatacacacacacaaattagtgttatatacatatrcagtaatacacatgcttatatacatatatgcacatatataaacacacacaaatcacacaaatgcaggttgagtattctttatctgaaatgcttggggccagaagtgttttaagattttggattgtttcagagttcagaatatttacattatactggttgagaatctgtaatccaaaaatctgaaatgctccaatgagcatttcttttgagcatcatattggcactcaaaaagtttaggattttagagcatattggattttggattttcagatgagagatgctcaacctgtacatgataacatgactaggggtgttttttttaatattttgttcaccaaatctttttttctctcatttgtcttgctgaatgcctttatcatagcttaaatttgaattttctgcttctgaacagtgcttaaaatggaaagaggaggcagatgctggagttgctggtatctgcagccagcttctcttgtcgctgtgttggcttttcttaatttttaagcatatgacatatgactagttgttttttgttttttggttcattgcctgattttggccctaactattccattttaattttagttatcctgcatcatttctgtaggtgtgttttatttgttatttctgggtgactaataaatatatacatttatatattattatatatgaattatataaactttacaaattaaatgagcatgtatatataaaaaataatagcctactgccactctaatatgcaactttgggtatatgaaagttgattctgttttgagtattcatatgctctgagacagatgcctcaaaataagatacctaacggagtacttgctgctctaggcttctagaggactccctggggtgaggattgttcagaaaggaaacacggaacataagcatgatattatgttatggccaactaattagacatctagtcaattgactaacaatgtgtgtgtgagaccctgtgctgggtacagagtcagggaaaagctatcaatcctgaatagccccagtatcttcagaatcaattactgatgctaacaatatcttccagtgtcaaatgagaatacaagatgcacatgactttcctaactaattactatgactcaattggttagtttgrggaggtcttaaatgacaaaatttaattctgtattcctgtatatatagccagtattttataaaagagaaatttggtgaaatggttctgtatgtgttgctatgaattgaaacaaattccagccacttgaaaagattttttaaagtcttatttgcttttctaccagatgtgcttggaagtgagtgaaagtctctcaactagaactgccaggtctttgagtataggtggcattttgtcttagcctaaaataaatactttttttttttttttttgagatggagtcttgctgtgtcacccagtctggagtgcactcctagcctccagtgatccacctgcctcggcctcccaaagtgttgggatgacaggcgtgagccaccaaacctggccaaagacttgtttttatccaccacatctacagctgtttggttttttctgtttgtttgtttgtttttttgttctcatccctgcattcagacaatcaaaatgttttctyctttcaatttccagaaaattacaatgatccaggttcttcgctgaagctaccatatctttgtttcttgtgcaatgataatgtcactgatggcataatgtcttcctctgctagtggagcctaaagcctgatttccaatgaagcttttcagcattgctctctttctaaaatcctcatctgacgtgggctgtggtttgcttttagagtttgcttcagagtccacctatgcaattctcagagcactgccacagcatgttctgaaatcagagttgggtctgtttagtctagcaacctcatgaggaccccgtcttatgattgcatgaactctcctacacagtagaaatgtgtatttctataggcgttacttaaatgtttgcaaaggagctgtgtttcagttttccctcttgtaattaaatgctgacatattttgcaattgaaaataggagaaaataggtaggtggcaagmmggtgttcaagaataattctttcctcgggcaaaamccactaagatcaagattccatccccctgattcttctgcaaaaaaatgtaggacaaaaccatggggccttaaaatgaatgagaacaataacatcgaatcaataataatagctatcatttataattgcttatcacgtgccgggccttgttcttagtactttacagtgtattaactcatcgtttcattatagacaatgtagagagcagatattactctcattttcctttttagattggaagctgaatcagagagaggttaagcaacttgcaccaagcctcacagctgtaactggtaaaggtgagggtttaacccaggcagtcagattgcatataaacactcaagaagctgcattttatagccgtagaagagccatgctgcattgataaaatgtgctccttagcaggygctcaaatgttacaccagctcactggcttgastaatcagtcctcctttcactggttcagttgcatcagacgagtgttcatttttcacacccagcaaccactctcagttcttaattctgatgaatgcatgtcaggctatggagctttcttgtttctgaagaagttgttggctcaggattcctattttcttgatagcattcaagggatcctgcaaagtcagcagagtgttctacaagtctgctttgaggacaaacttattgacatgtaacagattctgaagatggtgtctggacattttcatgccatttgttgctagttgagttgaaggaatgctgttggcacctacaacattagcrtctacatcctttgctgtgtcataaaggatagatgtaaaatacaatgaactatgaaggagggaggtaggaagtatgacatcatattctctcagggcataaagcagatttacagtgtacattgcacatttaatatgcacaaagcgcttctggtacatatgaggttaaactatataaaataccattttggtaagtcaaaaacagtggactagcagaaaattcatccacacacatgcacagatatacacagactcatgtgtacacactgcactgtgtaaaggtatttatgttgtcactttagttaataaaacaaatagacaaaggtcaaaattacccagtggaattgggcttaacctccaaagaacaataaaaccttgtatgactgaaattagaaagtggtctgaggacccattcttaaaattctatcagaaaagaatgttttacagacaaagacttgcttttggaatactatgcctgctaccatattctcaaggcaaaattcacacattgaaagaatgagattcaatacgtgtgaagtttttttttttttttctatgttcaaatcgggagaagggcattatccaaagctgacatattgaggtttctttgttttttgttttatgccagtctgctgaaggcaaagccttttctcttggcaggctgatgccttttgcaaggttttgtggttaggggcatgcctgtgctgcagtgatgtgagcagtttatcagcaccatttttctgacagaagttactgaagcatggtgtctgagtccaccaaaccattacatcttcagttacaaggcacttcactaaaagagtggctttggaatattttgatcctaaacaaagagcttgttgttaaagtggtgttattttgttttattaaagaaatgagggcaaatgctcatagaaggtggaaactcactttcagtttgggggaaatatcccttaaactagaagaggtatatggaagaacttgacaccttactaacaggtattctgtggattttttgtgtttgcttcatatggcttaatatcacttcactctgcagaattatggaatgtaaggtaatacacatcaaagcagcataggtaaracaattggatcgagaattagcaaatgtaggatttaggcttatgtgtcccatttaaccatggacttttctggacttttgtctcctcatctgtaaaacaagtgattcaagaccgtgaactggaagatgtgattgggtgccgggtgtctgttcttaagagrctctagaatttctggtcgctgaactggcagaggaacacacaaagcatttgaccttgytcccatctttcataatgccttgtgctgyccttggtatttaaatgaacatgattctactgacttgctgtcagcgggacttgcactttgggctgctttccagcagtggggaaggatttgggatgattcatcgacacttgctttcccagatgcctctgcttctgcattctactgtcaaattgagcaaatttgccaaagtcaatgacagattttatttgttccttgcaaacaggctaaggtggaaaaacctaaatagatcccaaaatacatagaatttcaatgtgatgtatattaaccagaaaattctgtaaatgtatagattaagtattagttatcacttgtggcatattatcaataatcaaaatgtactggacactattttaagtgctttccatgttgcatctcatttaaacttcatgaccactctatagtgtggtaactatgattatccctagatgagaaaatggagatgcggaaagactaaatgacttgcctgagattacacgtagccactcagtggcaaagccaaggttagagtagtcagactctagtgacagtgcttataactgctacattgtccctctctttggctartggtgctccctacctggcttttgaggcaggaactctcaactcatagccaragttatggagtctagccctaggatgtcaacccaagtcagaagaactatttgtgtgcaaactttaccatgtataagatgtgaaaatagcacatacatgattagaatcatacttgcttaacttttaggrtcttatttgactaaaatatttatgtagctgctttggaaggtgcatagctgtggcacagatggctagmtgatcactaaaaatacacgtgccttttcatggcatagggtaattgctggcaaaagtcttctcaacgagggactmcgtgaccatttctcaccaataaaatgtgaggagaagtgatgtgtgtcacttccaggatgacatggttacagagatgcgctttcctcaccatcctttccccagtccctgattgaatggagggaattccagtcatgtgctgaagattatggagccaaagacattggagcctgagttcctcaataatcacctgcaggaaagccatctgaccatgaatacccacattggattttcacatgagtaaggataatcttgcagtgaattaaggcactgagttctgtgttatggcagctaactagtgccaaaagtaaaaagtgttgttgctttcatccaggtggggattccatgaatgtccagctttttacaatgctgagtaagtcattgaacttagcagtgtctcctgttatgttttgataacgaaaatttttatttcatggcctcagagcaatgttttccaactaggggcaatattgtccttatctccaaggaacatttggcaatgttgggagacatttttggtggtcacaacttatgagaggttgctactaacacctagtgggtagaggccagggatactactcagcttcctagaatgcacaggatgtactcttataacctaaaaagcatctggcccaaaatgttgatagtgctgaagatgagaaaccctgtcttaggagcatgtttgcagccacagatgtgagcatctttactgcattcttgtgacatgtagttcaattcaactggtagagaccctgtgtggcccctgctctgcactgggtcttacttactggatrtatcattcagggcacatattctttacaacaagactgttttggttctcaattcgcattctgtggtggaataaacattgagtggaatagaaaacattagctttgggcctggcgcggtggctcacgcctataatcccagcactttgggaagcggaggcggacggatcacctgaggtcgggagtttgagaccagcatgaccaacataaagaaaccccatctctactaaaaatacaaaattggccgggygtggtggtgcatgcctgtaatcccagctacttgggaggctgaggcaggagaattgcttgaacccgggaggtggaggttgcgatgagccgcgatcgcgccattgcactccagcctgggcaacaggagtgaaactccacctcaaaaaaaaaaagaaagaaaagaaaagaaaacattagctttaaagctagatctttctgttaacaactatgattcgaggcaagttaataagcccctgcaagcttcacttccttcacctgtaactgagaataatatcatctgcctcatagatttataagcattaaattgaatggtatacataaaacatttactataatcactagcaaataacaggcattcattataaatattcttttccttccccggacttcataaatgtgacaaaaataacttgttaacaagatttgaaaccatacagtggaataaaytagaaataatttactgagtgccataatgtactgatccatatttttatatattcttagtttattggtcaagtaaataactggtttccagagaaaaataaaacactcaagttaatattcaactctaattcatgccattccagttttaattccagtcrcttcttgacaaagaattggtgaaccttttgacagccgtgacttagagaaatgttgctatcctgaaacaggtccaaattctttcttctgtggtcattctggttctatgtggtcttttgttcttttatatcctaggctagtctatgacccagacctacctctgccccatgcttttccatgcatagctgcttatttccttgtagcaaggtcaacatgccattgcagaacattctcaggtgctcttggcaattagtcaaagttcagacatcgagtttcagactcttcataaaatttcctataaccatacctatttctgtaccaaattctattgacacagattaatgcaatgctaagtcttaatgaatgaagctctattcatcaatacttgaactacaaatgtcttttcctattgcctggggagtgtttgctttgctccaatgctataataaatgttttcaaagtggccctggaagttgatggaaaaaataatatttttataccagtgcttgtaattttttggtgacatagtatacatagtaaaaatatatatgcagaccatttggtgctggaggtgacaagctgggactttgtactcctgatgtctcacccagccagggcaaagggtcaatatctaggcagagctgtcacaaccattcacgacatgctgacttgttgaggaactctattctagactgccttggtgatgaaccataaaaatgacaattttaacacaaagtcctagacacctccctctaacccacaacctcctaaatagttcacattaaagtcttgtcctttatttttatgttttgtgttgttatatgaattgtcactttatctttaggaacttgattcatgtttcatgattttccctgttggctacacttgagggtctctgtgtatacatgagtagatctggtccccacccgtagttgctctcctcctgccttggagattgcttggtgctcctgcaatgtcttccttcaagcatgatgcacattataattattctgttctgcttcaggratgcatatcaagttctatgcaattaatgccattacaagrcaaatacagagctcttcttggcatctccaggacatctgtaacgctgcagaagcaaagcattgtagtaatttatgtgacttaggaacttcttttttctatgactgttaaaatggcatttttaaatgaagaagttattagccaagaaaaaaggacttctggagaatagctgactgcctacaataacgctggtcagggaggatttgggttctggcgctgcttctagaggcacgttgatcacagcagggagggattcagaagggtgaggcaaggctggtagagcagcaggatccagtgggaacatttggagagtctttagcctggagaaaagtagtccaaggggatgcgggaagctatttttagctctctgaggaagaattcctaaaactgatcttgaattctgcggtcaacagaatgaagactaaagggtaaaaaggtagttacagaaagaaatgcaaacaacacatttaaaaattggttactagtgtcaacagttaggtgttatcctctcagaagattatctgtgtaaaccgaaacctacacctatatacgtacatrtttttaattatgcgtatatatttaagaatagttttacaaaaatgggattatggcccatgtattttccttaaactgggaatcamatttggatttcatataataaagacattctatgaattgggagtatctaggattctcagtgggatagtattaccagtggaacagactgcctcatgagtagcaggcttgccatgagtacaatagcataggccagcaggtctccacatttagtattcatgcacatctcctggggatcttgttaaaatgcaggttctgattcaggaggtctgggctggggtgtgagatttcaaacaagataccaggtgatcgtagtcctaggactacactttgaggaataggtgtctagcttaacatccctagggatgctagaaatagattcctgtcttgggatgggataaaataaccctaaatttccatataacttgaagtttttatttcatcttgattttaactttattattttctatggaaaagaatgttgattatataggtgtttcatttactgtctcaccattattcatcattttttttcttttctatttctctcttttctccagtatagcctacaacactgtgatgataactatgattataatctttccttttttaatgttcaaaacaaatattatagctcttctactggttgcttatatctttatttagaaaaacatgtatttacatattttaggatcatttctatatgtctaattcagttcccatagtaatatgaagattatatttaaattatgcccctagtaatgctaatagaaggaaccagaatgaaaaataaaaatagataataatgactaagaccaattaaacacaacttatgtgataaacattgctttaaggggtttgtttatatgcattaaattatttaatccaaagtgtagacttatggaataggcattatttttatcccattttattgataaagaatgtgaggtataggaaaattaaataattggtgaaagtcacccagtttgtgtggtagaattggaacttgaacccaggcagtctagcttccaagttgaggatctcactgttatagccatattggaacaattcattaggatgatgcaaaataagatgtcaccttatatcaaaatgtgagtttttatttttgtaccattatggtaccatctttgttgataatttagtcttttaaatagacatttagcctttgagagcatccatgctgcattttgtaatttctaacttatttattgaattgccttagacatatggaaaatgttggactatcctatttaaatttcatgaaataggccttaaaatcgcacttgtaagatacatctgaaacttttataaattcataatgataatttggtgacccttgctaaactagaggacactgggatttcaatgttggtttgaacaatttagaaacccttttgcaaagttacaccagggttttaagcattctctcttaaaagacaagtggaaataagtgatttcttttccaaagcggtttatcttcttggtaagttaactatgtttaagatttagtattcactccttaaaatgtttttctataaggaaaatgaaaaggattgattaaatgagtaagagtgaggtcctggcatctaaagttgtagagttgtccatggcaaggacatgtgctcatttcagcacattatgaccattgctggagacaaggatgaacagagagggatgaatgatgcccagaaaggtgcctgtaaccaagactgtggttctcaggaagccagagacgtccaggattcagagatgtgaaggcagtggcggtacttccggactgattcacagttctaggaattagcaggggctgtctgtttctatttcccaaataccttaatttattaaattttaataatatgtaatatattctcatacttccaaaaatataaagggcaggattttaacaatgagaggcatgttaattattcacggagttttgcacattcmtaaggaaagcttagaaagccctatttctctgtgggaatatattccgccagtggaacccagcattataattattttgttaacattaatgggaggaatgtcttttcatcgatacccttttcttgaagaaagcattaaagtgttctggtaccaagataattgttaaatagaaagggcacctctgatgggtattctctgtttcattgattctttttccatcttgtgatgttgatgatggtcaagtctaaggagcagagctagaacaaagatgaacttaaaagtcatcaataaagaggtattttttacccagctgtcagarcaagaaaagttttttgtacaatttttaatcttgtatattaacggttcttctttaagatataatttatatagagtagaatgcacaaatctcaaatataacactcagtgaattttgacaaatgtatacacctgtgtaaacacagcgtagattaagatagaacatttcatggtcccagaaaattctcttgtgccctcttccagtcaatacctctctctcctacccctgcacgcacataaaatacccagtgatgactattatcttatcatccagcttagtttactgataattacctttcatttaggtggaatcacatggtgtgtttttgtgtttggcttctttcgtgcaatgtaattttttttgagattcatccgtgttgttccatgttgcattcctcttttttattgctgtgaagtgtttctttgtatgactttaccacaatttgtttatctactgtccagttgatggacatttacattctttccagttgtaagctatgatgagtacagctgccataaacaattttgtacaggtcttctcatggacatacattttcatttctcttgggcaattaactaggaagggacttactgagtcatggagcaggtgtccattttgctttattagaaacctcagttttctgaagttctgtgtcactttatatctcaccaggagtgtgggagagaacaaagatggtcttgatcacagtggtatgctgtcacttgctcctcatgtgggcacttccacagtcttatatatcactgagctggaaagaggaggagagaatgataggctggggacaggaggcaatggaattatggagatagtgtattggagaggtaattgatcctgcccctgccagcaagaccagctcatttactcccagaactgctcctcagcccagcgatgcctgacaaccttccattaaaagttacaccatgcagactggctgtgttacagaattaattccgggactggctttcagcccacttgcaccttgacctcacctctgcctgttttctctcacgcccagttcatgtgtattcatacagcttcacaaaaactctcttctgttgttggtgatttttttggttgatcctcatcactgaaacttcatagtcatgagctgtctcttacaagatacataactttgggccagttacttaacaaccccaagtttctgttttcttgtctataaaatggggatcagaatgctatattaaaaagttaatggggccaggcactgtggctcatgcctgtaatctcagtgctttggggggccaagatgggaggatcgcttgaggtcgggagttcaaggctgcagtgatcacaccactgcacttcagcctgggcaacaaagtaagaccctgtctcttcacaaaaataaataaacaacttttaaaaagttaattcaatcattaatgcctataaagggctcagcacatagcatgtgctcagtaaacactactgtaactcccagcacaacccctcctgttgtacttcctacatatgattggttttccaactctctaattccccttaattgataattctagtgaaataccctcctgggaacggacctaggaattcctgccyaggcctctgcctttccaaggctcatcctcaaaccgttactctgagacaattgtaatgaaacaagcaccatttatacggcaaactttaaagctcctgctagcttgagctggggctctttggatttcctgtttcatattttccaggatgaggattcgattttaaggattacatgctaaaaatagacctctattatgcattttcaaggattttaatatattgttaaattctagtttttttttgtttttgtttttgtttttgagacggagtctcgctctgtcgcccaggctggagtgcagtggcgsgatctcggctcactgcaagctccgcctcccgggttcacgccattctcctgcctcagcctcccgcgtagctgggactacaggcgcccgccaccacgcccggctaatttttttgtgtkttttagtagagacggggtttcactgtgttagccaggatggtctcgatctcctgacctcgtgatccgcccgcctcggcctcccaaagtgctgggattacaggcgtgagccaccgcgcccggccaaattctagttttaacacatagagtacctcccctttaaaaatgaattgttaccaccggccgaatacctaaacactatcattctgtgctcctgatgttcctgtgatctcatggagtctagggtgcctttcccagtctcaacagagaggacttcatgagccctgggtacagaaaggtcattggttttattttaaacagtgtcagctacctgctgcccactttgttccaagctcttccttggccctgctattttcaggcaagatgcccatgaaccagtacagctcttcacactcatcccttctgcctcttgctccagaatcatgcttgggtatcacaagcctacatgtggaccaacctcctttcccttgttccaccatgcccccctcccatatacacatcacaaagcttctcttccccatgccttcactcacattacccctctctggttagtacttcctcatcaccaacatgaaatcaacaggtactactcattmcatgactttgctgctctcctgtacagccaaactccttagaaagtcttcattaacttctctaaaggaagactttgtagagagtcttcactgtgcttcccctcctcccagtctcaccccaacacactccattataactgttgtccgctccactctgctgaaaagttgccaatgtccaacatcttgtcattccttttcatgaaacttgaccccttaggctcactttatatgcctgatgggcctacttcttttttgaaaggtgctcttctcctaacttctgggacaccggatttgctgttttttcttcctggattcttttctctcakatcttcatggggatgtttcttctcatcatggatataacccctttgcagaggccctcccagtcccaagcgatcctaatcaaagcagcttccttcaacctttggcctgactttctacctcctttatatttttaatagcactaattatatctgaccttctcatttatttatgtagatgttaacatttcatgtggaagtttgtaacaattgcacatttgtcaataatgatccctgacattcattaatgacctgctatgtgctaattctgtcctaaattagctcgtctaatattcaaaataatgttatgaagtaggaactactatcatcattttttgtatgtgtaaactgaggttcaaagaggctagataacttgccttgattccaaagctgtaagtaacataatgagaattcagacccatctattttgatgctaagatctgtgatataaatcattgacagaaaaaaaaaaacagtgaattaagctgtgtccccatgctttctaggggcacaaagagagatttggtgagacagaacatctttaaaggtaccacctggagagaactaacattttgtttgctctggagtgttgagaatttaaaggtttggctttgtgatggctcaagcagtaaatagatcacacacagtgaggaattcatctcattttgcatcgagtgtgcaaagcagtcataaatgatgaagaactgcattgtgggtcttgtgtaagtcttagagtaagactataaatttctaaaacttgaagtttgtaaacaaaatatacattagtttactcattaatgaatttataatctaagatgaactgaaactagatcctagttaaagcaaaataaggaagatgcactggtctatattttctttcctttgactttccacttaatcattaaagccatggccttcatggattattggcaagggaaagcagattgtaacacattttgcagatagagagagcaggtgtttcccacctgttcagttccatctccaggatgaactttgccttcattacatgaatccagagcatactctcccaacttggtagtgctcctgtgaactgttgatctgttactggcaagcctgaatagcccggcgcaagagccagtctgcctagaaaccctgaactgagtctaacctgttctcagcaaatcccatctctgcctctctggtgggtcctcacggcacccttgtctgctgcctattacttcccaaagaaagagacaaaaaaatccttggaagtgttacactaatgactttacatataaaacctctctcagaaatgtctgcatttttctggaagaggatgagtagaaaggtcaataggtagccccacagaatgaaaagtattattcagctacagtagatgctgggggccctyaaatcccaasagtccaataaatcccatccacatggatatccaaggaatagttttatacaattggattataagtcaagtatttgagggagaagctgttcactaatcgcccaaaacattcctccagtctgcacctccttctcattcccacagcgactctcccttttaggatattgttgttcatctcctagtccacttttcaaacttaatgtgygtaccaagcatgtggggctctaggtaaaatacagatcctggctcagcaggtatgagatggggcctgagattctacatttctggccagcttccaggagatgccagtgccattggtccaccaaatcacactttgtatagcaagatcctagcccagaactttccaaggcagaggaggcctcaaaatcccctgtaggcatgtgaaaacacagatctctaggccctatggcaagatattctaattgagtaggtctaggatggtgccccagaatttgtatctttaacaagttatcaggtgatgctgctgctgatggtctgggaaccccactttgagatccaccatcctagattattgtagtagcccgtgacttctctctgtcacctgtacttcattgtttcactgtcaccagaattatcctttaaaattctaaaaataattactttgtacatgttttaaaaactgctaacgattctcartggatcatttagtatacttccaggcttcttggcatgctgtaacacacagttaggtataagcagccctaagaagtttttcagaggccygcccctctggttatctcaatagctgctatgagatatagcccacccagttcacatgcctgtatttatcagtgatttagagaattctttatttcaggaacttgtgcagaccacaaaagcatttattgaaaatgaataaacatatactatagagtgatgtgtgcaaactttttagtaacctgtaataagacaataccaagtacaaagccatcatgctttgtaggatatcaggattggctgacgtactcgttgacatcaggattccactgtcaacctccatgtccaatgtcttgagaaagtggctagtgtccagccagagagaggctgttctgtcctgctctgacctaaccttcacattggtctgccctatttttgttaattgtcttctgtgggatctcatgccatttcttttccaggcagctagatgcaaggattatttgttgttgctgatgtttgttttgttgggggatcttagtcctaattctttttctttgaatctgtaaatacttcaagtgcagtccataaagaagcttgacttgcctccagaatgcactgccagatgctagcttccagctttactaaccaacccgagagatggattttgtgggtttgtttggtctcgcagtttgtgccaactgggcaccgtgtccttagtccaccctcttctttgcacacaagtacaaaagggaacattttattctgctgctttgggtgggaacagtcactttatttatggggtctgagctaaaatttgatttctctattgcatggtgcactggctttatccatgtacatccacatcctttattattttcccatttcatgcgcaagttctaggcttctcatggtgttccaccctttgtggcttcagccttcctttccagcttcacctcccagtactgcagcccayctgctccagcgattccctgaaaaagtcacgtcccctstagtatatctgctcccggtgctcaccccaacaggattaagcccacacttgtaggcctaaccagatcctaaactcaatcttgttgagcccaatgaaaatcaggtggtgtaactcacaaaggcaattgacttkaactcctctaggttttgcttttgtctggttttcaaaggaaagtgcatgagggagcagggaagtgtttgcygcaagcaaatgtttgaacgttcaggacagttaaaagaagaaaagatataagcattggtgaaagtgagcacaatwgatgcaratttggcacgctgaaaggaatttttgccccttaatgatctgtgttttctttatgcagcataacccgaggcaattaaaggcaggaaactactctaaccaactggcaattatgttttagtayatttggtacaatgcatactcgctctccatattttcagaatttttgaaaagtaaagaagcttcaaaactgtcaaagttggctcttctttcactcttcacgaagccttagtaggaaaaaggaaagagctgggctgtttgctctgggtccttttatgtgctgacatggatgcatttgaaggatttgaaatgtgctkcagtttgaaacttgggttccttttactgtttattcttttttgtgttttcacccattggtacccttgattgatagtgtttaagtcaggggacaagcygggggtttagaacattgatgtcctcagcgaatgaccctaagcttaaaagggagcccaaactcatcaggcctcgtgtttaaaaatagtttatttttgatgatgttcatgtgaatgagccatagtcctactcctcagggctgtggaatggaaagccttgagtagcaaatgatcgtagttgcctggccaaaccctctttctggtccaggcactgtcctccagcagtcacaggtgctgccctgggcattgtaggatgttcagcagcactcctgcacttgaccccttagatgccagcagcatcccaccagggtgacatccaaaatattcctagactttgccaaatgcccgggactggagaaagggcaaggtggaggcaatgggaggcaaaattgcccccagttgagaatgattgatctctagggatcctgaagatgtgctrggtgaaagccaattctcttcctaagctgatccaggcacaaaggagagcagaggcatctgcaaaatgaaaactacattcttttaatgatatcactctttcctcttgacccaattttggccagtttttagaaaatcacatcttcctcaagcatctaaactggcagaagagagaagatgccacagtttctgctttgaagggtccagtgaggtttggtatggtcctcacataaagtaaagaggccaaggatatttgtgttttacgttaggtcttggcaaggtaaaaattwtaagagaagttttatagtgtaccagatttctatcgtgtttttaaaaagaaaataacttattgaatataattgccagacaaggtgaagatagtaaaagtattcaggttgtcaccccaaactgcaaagctgactaaactaatttcaaccttttcctgctaacaaacttcacccttctgtgttttctctccctccatttttgcctgcctgtacaactcaatcctttgtatttactcatgatgaaaggcctacatgcaataaagaaaattaagcaaacctgattttcaaggcttgagtaatttaaaaactatgattttgacattttaagaatgttatgttgaccttgttcttgatcagtcatgagaattaaatgcaggagctttgcaccaaagcaaggcccctagcttaataaagatttaatttatactgcttcctaacattctctttctttttagtctacacagctcacattgtaccttttctcaaagtaatcatgagttataatttaaactgttaaatacacactgccttaatcttgtattttgttgttacattaatcaaggcagtgacaagcaaaattctgttcgaggactcttaacctgccttgcaagaaaagtaatgttcactttttaaatgagccattaaataaatccattgactttttgagtgaaaagcctctccctgtcccaagagctcaaattgcattcaacagttgcttttggaatcccaaagagagcagcaaatagtaggagttatgtctctggaaggcttcttgagttccaaaaggcgatttccttcctctccagaaggaaatcaaagaggaaataaacaggaatcatctgaaagataagaagtaaatgcataactcagtggaaagctagctagctagacagatagaaggaggatacaggctttctagagaaattgggattttaaagcatttatggagtggagaagaaatgactgcaaacaaagccaagtgctaaatatagaaactatggaaataaatagcccatattcccaggatagccttagctttgatgttaagcagcaaagcagatccagagggttcctgtataaagctataaacagaaaagaattaagaatatgctgattgagagaaacaaatgtggtttaccttgggaattacctctgtattgtgctatttatggaataaaagacaataatgtcatagcaagcactttgtataattaaagttctagagtttatagtggaaaaaatatgcagtccattgtcttgaaatgtttatttcatattttgttgtaagggagctttacaaaggtaagtgccttattctgacagtgctagctaactaataaagtaatcaagaacatgaactctgataagcagacctgaaaccaaaccagaaggcagaaaagggaaagaacagactccaattggagctaggtgatatgtctaaaataaatttcatgtgtgcctttcttttatatttccttggatccattttaatggaaatttccattagtggggcaacctatgtaagtaattgatagatatacttaatttatttgctgataagttgagaatatagccatattaatggaattggaattgtcaaaaaatattgttggagttgtccatgaaaatactcagtatttcttttagggctacttataatgttactataacaaccaatgaatggacttaggcctgaaagataaaatgaaacataaagatgatgaattttttaagttaaattttttattgaattccatgaagaaatagctctgaaatctcaggattgctctagtttcaagtggttagaagacaaaaagagcctgaggcaggagaatggcatgaacccgggaggtggagcttgcagtgagccgagatcgtgccactgcactccagcctgggtgacagagcgagactccatctcaaaaaaaagaaaaaaaagaaaaagagcctggcttcttaagaaaccaggtagtaagatggtaaatcatgtaactggagaaaatgattgggagtattttggggaaagatatggttgtgaacactgcaagtttctgttggggaagaggtgtttgtagtcatgactacaaagatgaccctctggaaaagtctaggaagcaggtcataggacaattccagaaagaaggagaattattcaatcagtgactccactgtctttcagcaaatgcttgcctgattactacagaacatgcaacttttgctgatacaaacatgcacgaaggaaggtacttcctctagatagagggaccttgtgagtaattgaccttgtggctattctccccttatacttcccaaagtcccttgcagctagatgtgcctctgagctaaattctggcaaagaggtgtcaacaaaaacctgtgggaatttggggatcttttcttaaaggtggggacatggggtgcttcttccttccctctttgctgcaggctgaaatgtagccaatatgaattgtgttggagcagccctctctatcatgagggagatgctgcatactggggattgagaggttgtcagagagaaaaagctgagacccaaacaattgtgtgatgcaggcctaatggcctggtctcctacctccaggcttctttcacatggaagaaataagtctgtatcctttctaagctgctgctgttttggcctttttagaaacttacagctgagcttaaacttaactcatacacatttactgtggttataagtagaactaaaaatatacttaactcatatttagcagttggttttatttcctcagttcatactgaaactagagcaatgtctttgcttaaaaacagaaatcaaaatcaatcaaacataattgattgaatacagattgcaaagaagtataaaatggaattttggccctcaagtggctttcttcaacatgaagaaacaagacttttaaaaaggtatatgcatatatttgtatatatatatgtatgtatatacacacatacatatatatacacacacacataaatatatacatatctacatatacacacccatgtactacacacatatacatataacaaaacaatattaaaaactccattgtgtaatagttcaatagaatcagtggtgcacagacaataaaatccttgggaattcagaggaaacaactgaaagagatgggagtttgggcagagaacctggttgtgaagattaaaaggaaagattagacaggtgacaagaagaggaaataggacacaatgaatgtattgtcagtaaaatgaaagagttttaggttgatatctcagtatgacatatttacagtcacaattcaatataaagggtcttttgctagcgttcatgtattttatctggtcttaatgaaatgtataagtgaccatgatagacctcactgttccacaggtagtgttttcaggaaaattgtgcaattagtgtctgaatttattctatgaagagtccttacagtttgtctccaacttgcagttctgtggtcaaaggagctgtctgaataattgcagtatagtaattgtgtctacagaggacataagcaaagcattttgcttaagcaaaaacattttgttttgttttggttttttgtttgtttgtttatttttgctggcagcattgctagtcaagactgaaaaattagggcatttaaaatagtggagtaagaatggtggttgttgcaggggagctgagtaagatagagcaatgtgacaagcaggtcttataagactaggtagaagatcaatactctgagaaggagatatggaggggtcagaayggtctgtggaaaaagtactgaatgtggtccagttgaagaggaagrgaatcaatatattaaaaaagacccaaatgaaaaaaagaaataaagctgtctttatttgcagatagcataattttctatggagggacaccaaagagtctattaaaaaaaactttctagaacaaataagtgagtaaagcaagatgcaatatcaatgtacaaacgtctattgtttttctatgttccagaaatgaacaattggaacttgaaatttcttttcttcaacttttattttatctggggttcatgcactggatgtgcaggtttgttacacaggtaaatgtgtgctatggtggtttgctgcacagatcaatccatcacctaggtattaagccaagcatccattagctattttttctgatgctctccctcgcctgacccccaccctggataggccccagagtgtggtgtttgccccacagtgtgtccatgtgtactcatcattcagcttccactcataagacagaacatgtggtgtttggttttctgttcctgggttagtttacggaggataaargctccatctccatccatgtccctgtaaaggacatgatcttgttcctttttatggctgcatagtattccattgtgtatatgtgccacattttcttcatctagcctatcattgatgggcatttgggttgattccatttctttgccattgtaaatagtgctgcagtgaatataggtgtgcatgtatctttgtaacagaatgatttatattcctttgggtgtatacccagtaatgggattgctgagtcaaatggtttttctgcctctagatctttgaggaatcaccacaatgtcttccacaatggttgaaataattgacattaccaccaacagtataaaaatgtggaacttgaaattttaaaaattactgttaaaaatatcaccaaaaaatgaaatacttaggggtaaatttgacaaaatatatcaaggagctgtatgtggaataccagaaaactctgataaaataagttgaagaaagtctaatgagattgggtgatatttcatgttcatggatggaaagatttaacattgtaaagatattaatttttttcacattgaaccacggattcaatgtaatcccagtcacaatcccagcaaactttttttatatgttggcataattgttgcaaaatttatatggtaatgcaaagaactgagattagctaatacaaaactaaaatggaagaataaagttagagaactcatatgatttaagacttactataaagctacaataatcaagaaagcatggtgttggcaaattagatacatagatcaatggaaaataatagcaagyccccatatagacccagataagtatagtaaactgacttttttatgaaagtgcaagaataattcaataaagaaaggatagtcttttcaaaaaatagtgctggagcaattgggtgtccatatgcaaaaatatgaacwtagagttcatactttacaaaaaaaattaactcaaaatgagtcatagacatatatgtaaaatgcaaaccaattaaacttctagtagaaaaatagaataaattttgtacaatcttggatttgtggatgagtttttagatacaacaccaaaagcataatccatgaaagaaaattttgataaactataatttgcttaaatttaaaacttttgctatgcagaagacagtattaaaagaatgaaaggaaaagacatagactgggagaaagtatatggaaatcacattgtgataaaagaatagtattctgaatatatagagaacccttaaaacccgacaagaagaaaataaataatgtaaattaatatttggcaaaacatatgaacagatatctcaccaaagaaaacatacaaacataacaaatacccatatgaaaagatgctcaacatcatttgtcataaaggaaatgcaattgaaaaccccaatgaaatatactacacactattaaaatagctaaaattataaaaattgatgatactaagtgttggcaaggatgcacagcaacagtatctcttattcattactaatggggttgcaaaatgggtataatgaaatataatacagtttagcagtttcttataaaactaaacatactcttaccacatgatctagcaattgtgctcctaggtatttacctaacagatttgaatatttatgtcccacaaaaacctgcatgcaaatatttatagaagccttattcttaataacccaaaactggaagccaccacgatatccttcaataggtggacagacaaactgtgatatatacaatggaatattattgagtgataaaaaggaattagctttcaaaccatgcaaagacatgtatgaaccttaaatgcataatgctaagtgatataagtcagtctgaaaaggctgcatcttgtataattccatttatataatattctaaaaaaggcaatgccatagagagggttttcagattagtggttactaggggctgtagaggagattgaaaaggtgaagcacagtgaatctttttaggatagggaaatttcttttgtatggtgctgtaatggtagttactatgcacgtatgaggtactatgcatttattaatatactgtgtactttgaaatgtacaaatgtactatgcatttataaaaatctatagaattttgcagcacaaaaataaactttaatatattcaaatattagaaaattatttaaaacatcaagagaatcccaggatggaaagcagattgtgacaaataatatctatattataaatatagacaacaaccttactgaaggcaataagggaggaagttgmtaactgaagtaactggaaatgaatggaatctgtgaaactgaaagcaaaaagaatggttgttaacaactgttaacagttctgagaccagtattcttatatactggaattgaataattagttggatggctgacggtggaagcaaggtttctcactgttggagcaggtagttatagagcaaaggaaaggtgctagaatgatccatgtagacataggctagaattgtgacatcagtgtgaactcatttttagcttaatatacatgcagatggatgaatatagaaagttctgtgtgtatatacatgggtttgtatacatacctgtatttccaaactgggttcttgaagaggacctacaaacaataacactttggtatcaatgagcataaccagccccctgaacttggtttctagtgccgttcttcaataaaaggaactagggctcttggagaaatggctgattctagagctggrgaagggaatttacaagattaggctggagcatctaacaatgccaggaagcaagaaagtttctcaaaggaacrtatggaaccaactaaaagacttctcaatggtcaaagctggaacaatttaagcaacaaaataaagatgtgatattagattgcaactcaaagtataaaataagtatccataggccacattattataaatcagtcattgaatgaataaataattgggaagaatacacaattctcccatataggataccaaataatttatgtaggagcataactgccttctcttaagtgtgggattcacatagcaacttcctgcaaaaaaagcacaatatggaaagaggggataaagagtaattgtgatgcagaaactgacaaacactgcctcagtcagctgaccaaggataatctcatcagtattaagtcatgttgatagtaggtacctttgacatgatgtgatgaaaatggcattttacctctgtggtctctctcccgaaacccacaacttcagcctaatcatgagaaaaacatcctgtacccatattaagggatattctagaaaatacctgactagtactcctcaaaactgttaaggtcatcaaaagcaaggaatgccaaagagacaccctaagatgacaggtggactaaatgcagtatggtgtcgtgaatgggctcttggcacaggaaaaggacagtaggtcaaaactaaggaatatcaatgaagtatgggccttagttaatattaaagtatcaatattggtatattagttgtatcaaatgtatcatactaatgtaagatattaaccatagggagaactgcctgtgacatacatggaaattctctgtacaaattttctgtaaatctaaaattattctrgaatagaaggctatttaaaaaaaaaaaaaagaccaaagctaaacatataatcgtggtggcctggggctggaagtgaaggttagagaatggagagttattgcttaacatgtacagaatttctatttgagaagatgtaaaaggttcctgagatttatggtggtgatggttacacaacaatgtgaatgtacctaatgccactgagttgtatacttaaaaatgattaaaattgtaatttgtatcgtgtattttatcaaagtaaaacaagtatttcaagaaaaaaactcaaagacacagaaaactagagaagagaaacatcagaaggactaaaaacaaaatctaaaagtggaccaacaacaaagcaatgggataggaaggaaaactgcgtaagattcacagggcaaaacacttccattactagaacaccaggaaagaaaacacctgtttagaaatcacagcaaataaattagtactcacggttttctctttacttcgtaatttttaaattgtacacaccctcttccaaaaaccttacaacacaaggcaagaaatacaaaacaaactttttgtttattagtaaattaaatactgtattgaatgtggaaaaacagaacaaaaagtggaggctctgatacactttggccccgaatactggccctctgagcggaggagagttggggaaatcagatgttatattaatggactggcatttagaagccaggcattgaactctgtttattttatatattattttaaccctcacaacagcattatatgctagtactattatttctcactacagagctaacatttgagatcatggttttctgtcaatgacttgaatttagtaacagtgaaaattccatacacataggaatatagcagaattttttcagtaaggctgtaacgtttaagtgracttagctgatcctacatatattagagaacgcttgctataaattcatgggattctgtctaccaagtcagagaagtggtttaaatgtgttgatgtatctggcgtattagagtctacagtcatgaaatggaaccctagttgtacaactcattagctatgtgctgtcaaattacttaacatgtagagatctcagttttaccatctattaaatggggataaaacaggttctttgcttataacattctttttccttttctaatatcccatgtgcttgtgactttctatgatcagagatagtggtatttgtcttaaaaaaaaaaagaaagaaagaaaaggtcatttaagccccatattatttggagatcataggtacaataaaaaataaatgccagagtttcaatagcttaacacattaaaaagtattcctcatttacttagaagcctagtgtgggtgtttttgatataaggtgattttcttctacctggtgatttagggacttagactctgtccaatctaacagctccagtatctcctagggtctctctgtcctctttaaaaaggacacaggagaaagaaaaagacctgaaatgaccctcgtctcttccattaaccttccatttgtgagaactattcatatgaccctccttaaatgcaagcaaagggtgatgtgaaatgtggctgtattcaggcagcaatttccctgtaattctttgaactgtgtaaggcaaagtgcaaagtttggtggcgaatgagcaacctttgccttaagctctgtgcgagcccagtattgctgaactgtgctaacccactcacctgtatggagagaagagtagcaccattatagtaaggactcctgcagtaatcaccaagtataatgggggcacttaaccctcagcttttttgcaccttaaatggtttaataataattgcaacaaaaartatttataaagcattcgggaatgcttataagggattaaagtaatattaaagaaatcactagagtctcagcattaaatgatttttaatgcaacaaaatctcatcatactgtattttttcttcttagctttaaaaatagacctgcagaatagatatggtataaagtgagactccatagtgtccagaattcttttctttgtatttgtactgawattctctctctcttttccagtgtatcaacttttagttatatattttgttcaaaaataacatctgatcatcataaacatcaattatttaaataggataacatgcttcttctgagtgctttaaagtaaacttgagtgtttataagtaagggaattattaagaagaaaccctggtatatccacaagataaatgttaccagtctctaagagtgcgtctcagtggttctcaaacttaaaagtatatcagaatcacctgtaggatttgttataatgcagattgctaggtcccaacctctggagttttcagttcagaaagtctgggatgtgggccaggaatttgtgtttctagcgagtaaccagatgatgtgatgctgctggtccagggaccatactttgaaaaccactgatttttctataaaatgatgctgaagaaggtaaggaggaaggtatcaaatctacgcggtttctctgaggttggactacttgatgtgtcccagcttttatgtttaaaaaaaaataatgccgaaagacatacagtgcttaagactcaggttaatttaattccataatcatacggcataatagcaccaattttggtacatagagtcttctgtacttaattttgactgacccacatagagcaaatgtgatttatctgacttgaaattgaaaacccaaataagctaggttgtgaaacacagtaggtttttacgatggggcctataaggagacctatgaattattagagggatagcagtggttaggctaaaggtatacagagaatacgttgcaaagatattaaggaaaataagaaaattatggaagactttaaggaaaagcactaaatatgagttcagggcctgagctaagtggattttcaaaaaaatttcctgggtatttactttcttaatacagaggaagtaatttggaggaagatttatttttaggttttactttcatctgagcaagaagaaatatattgtgcaataatgaaaaagcgatctatcttcttgggtgctcaaaacctatgttaaggatttatgaattatttattaagaaaaattatacacccagggatggtgaccctggtcaatatttaagcttcaaaaaagataatgaaattcagtttttctaaactgtagaggataaagtgttttatcataacattacaaattgtggaatgaatgaataaaagtcacagtgggttcttttttgaaagtctggggctacccggaatcagcatataggacccaacttcaaaaggtgaacaatgatattaaccaataatgtgtttctttgaggaaatgatctgaagcaaaaagatacctcacagaccagggaggtaatattcaagcaactaaagaagctaaggactatttcatatgactatcttgcccttggtgagaaatcctaatacagtgattttttttctccactatatttacaaaggaagcataaaaataagaatgttggctgggtgtggtggcttacacctgtaatcccagcactctgggggggccgagcgaggaggatcccttgagcccaggagttcaagatcagcctgagcaacatagtgagaccttgtctttacaaaataaaaaaggaaaaaaagaaagaaaaaagaaaaaaatgagaatgtctggatttgaaggaagaaaaggattcaaagaaattctgccctgcgttctgctgatggcagttttatttgagaactcttgcactgtcaaatgtttcttagttcatygcccaatttaatatttcagaaaagtcatccaaggactgttttcttttgtggttttctttctggcagcattctatggcttctctgttcttggagtgttcttctgccttgacaaggwaaagttcatgcctaagcatgtgcagaaactcaaggtcaagtgcaccactgagcaccttcagagtgaatttttaggggataatgttgtcacaactgtcttcatcatcaaacagcaagccttcatgataggcctgccagggaggtggccctgccagcctgctgcctcttgtccctttcccagtttacactgttatttctccatcttgccctgacttttgcccaataacagcaagcctttgggttgaacctagcatacctgctttccttgtactccagggccataagcttgcagagctaccgtggtggcatggcccatggtttgtcctgccccaacttttttgtttttgagacagagtctcactctgtcgcccaggctggagtgcaatggcatgatctcggctcattgcaacctccgcctcccgggttcgagcgattcttccacgtcagcctcccgagtagctgggattccaggcaccctccaacatgcccggctaattatttttgtatttttgtacagatggggtttcaccatgttggccaggctagtcttgaactcctgacctcaggtgatccacccaccttggcctccccaagtgctgggattacaggcgtgagccaccgagcccggcgtgtcctaccctgccccatcttgcttccttcctcctctccctttattccttccttccgttctctttagaaatatttttgatatgtaacagaaaaatatagaacataataggaaaaagtccctcttaaatgttttcgcttttattttttgcattatcccaataacctgtttcatttatgtactttgtcttcagggtgcaattgtatgcaatatgtttggattctctgccacttgcactaacattctcttgccttaatgctgtctcttcttatctactcattttctgtttctcatcctttaacttttttaaagattctgtgcttctcaccaacatattgcaataaactgcactgtgcttccacctttcaggctttttaatgaagggagtaaatttaagaattaacttgtttctcatgaaggtcaagtcaaggatgtgttggaagaagacagatgtcttctattagttgttcttctgtattttgtttcaacctactgttctgaagcagcaatagtagtaaacataaggccttgtaaaagagtttttacacaattttttttttaaatctgtccccatcccacttttggtctgacagtgattgctttttacttactccctctctgttcataaagaggtagtaatactaaattaatagtgtttgtgaaaattcctagaaaaaatgttattcacataggatctttttaaaaattatccttattcatttttaagtgaggttttaatgaaatgataaaatgaattatgtttatcaactttggagtagagctttatatattctgttatggatagtttttttattattttaatgaaaggaaagtcagagtagggggtagaaaatagaataaacctttaccaagaagaaagtaaaataaagagaatatgaacatatttctttttagctatgggtatgacaaaaatgaactctgatttggagattaggtaaactgatgtttttcatagcttttatttatttatttttagtaaggaatatttcttttttaaaatcaggcactgtctctcacgtgatgatgagaaaaagcttttgggaaaaccatttgcacgttagattacagggtatttatgcatatgttttcccagtagtactcactatattttaaaacctgattaagatgacataagataaaatgtggcgtattgtgaytgagaacccctagtctcgaatgctcatatttagtgggtataatgatgaaaactattttcgaggacatttttgaaagattccaaaaacatacagaaatatatctaaagccaaaaaagtaagtaatataaaaatatgagtttaaaaatagtaatatgtgattcagaataatttcaagtttaacgttattttctaagttgattatttgcaaatgatagctatttggatcctgttctctgaacaaacccagatgcaaggggttgtatacaagtgatttattaaggaagctacttccaggagacatcagtaagagagtggaggaagcaagacatggatggagaagagttaagtaagggtgagctttcaggtgaagtcccaacctcaacctaagctactgaaagctgcagagcacaaattacacctcgagttgcttctcctgcatctgtcagacatgaactatcagctctctggggagatctagcatctcaggcacttcctgctctctacacatctgagtgaagtagctccaagaagccaaaggtagtcaaaggctgcaagtgtcacttgtttggaataaagctgatagacgctgggggatgggtgtctagccagtaagggagcctagcagggaaccaggctagtatcaatagaggttcctgcaggagctttaggcaaacttcctgagtaattggaaaatggctctacattgattttttttcaatcattcatagttcttaatatgaacagctagcttcgttttgtgtacatacattagtgttgagattgatcaacagtcgaatgaaaaggagagttcctttctggtaaaatttacgcacttaggcaaaacctttgggctgatttattgattgactcagtgaatgttcttctcaggaaaattcattaagcatgatgttcccttttagacatatccagctcctacccccacaaattagcatcggaaaagatttggttgaattccgtctgtcttgccagaaagccaaaagcaatgttaagaagcaaatcttctttgaaagggaggggaaaaaagaccacacttgtcaacttaaaatatctcattttggaaaatagattaactcattacatattcacaatgtcttatgagaggaaaaggtcatcaaaatgcaaacctttggcagaaaaaaaattgtgatacattttggaataaataactggagaaaatgagactatccagatggatataaccaatcagctactaaggtaaagmaaggataaatgcygtctatctatacttcagaaaatatggaagtcaccagatatgccatactgtgtgatgagagagaaaagaaaatacgttggttgagaaaatacgttggttactcactcaaatgtatcatgcacagggctgaatcaaaacatgtggaaatcagccgagcatttttagaacctctccttgacacagtctggcctctagggcccaatgtggaaattgctgctttaatctacagtgatattagagctactgataagcacagtagtctgaagaagacttctcagttttattagtagttttctcattgctcttagaattctgatgcagctactttataactggatgtaggaagcctgtccaagtgtcagaatgccctacccgttctagacctaattagccttctctgtgggcagccattgtcttcatttaatatctagggcagagattctcaaacttcagattgcatctgaatcactgggaggkgaatcacccagcacagattgtcgggccaccccagagtttctaatttagtaggcctagagttgaaccagagaatttgcatttttcacttgttcccaaatgatgatgatgccataggtcaaaggaccacacttggagaaccactggtgtggagaaatgaaggcatttaagtcctataagcagataagtgatggattcaaatattatattaaggtaagattgagggagtagtttgcactgccagttaaaaaaacttggctggctgttcagccacagtgaaataggtgtaaaccagagataacattttagatgattcaaaggggaaatctggctacatttatatcatctggagttttcaagtggaaacagcttgtttgcctgatgaatctatatcattccatatttcttatcaaaagaccttttatgaaaatcagattctatgctcacccaaaatattcaggaagatagtttttagcacttatgaaactatttgcaaaatgatggatgctgtttctagttaatctgattagtctgaaatgaggaatttagcttatcacaggcagtaatagaaaattgtaacaatgccatctttatcatcatagttgtgattttttttaactctgagttctgaatacatgcaacatcattcattcttcatccataaagatgtggagaattcctctgtgagaagcctgtaatatataagaactggaaaaataaaacacgtgctataaagagccaatatatttctgaaattattcatctttaaatatatatagattatccatggtgattatggaactttttctcaggtttttaatgtcaacctaataagttgacatctcgttaaaatgaaggcagttactagcatgttaaatctgacctgtttttcattcatcatttgaaagaaattacaaaaatatrtctcttaatataatgtttcctagaatccagaagcaagtgtggcagtttcttccctcagagtcatagatgcatgcaactataccataaatactgttacaattaagttttattcattttacctcttaataaagccgtggtgctatacatataattttatgtttagctgcatttaactttcaactttggaagtgttttactcttagatgagcgtgtaggagtttctaaggttgctgaagaaggaagtaagaatgagaatatttggctattgcacaaccagccaccaaactatctcacctggcaatctgcaaggaataaattaactgcatatctgctgatatagttcacattgccttgtgcagacacagcctctgaaaactagtgttatatttatttatcatgattattttttcatatacgtgaaaaaagacttaagtggttttctttcatttatgttacacaatactcctgctaccttatcaatatccaaaatttttagaaaaaagtaagtttggggatatgtggattactttttctattatgtacatagggtcaatgatcctgggcaattaacatattttctctgggacttagtttcctcatctgtgttctctttcygttcccagttactatgattctattatagtaattgtttctgtttgggcacattcaataatggtgacagcattgcagtcatttttatgcagggtgggtggagtgccaagatacgtaaattcattttcattcctttttaattagttgcattagaacttggaaacaatggggttagtgtattagttatctattgcttcataacagactaccacaacttaatggcttaaaacaacaaacatttattatctcacagtttcagtgggtcagggtctcacctgcttagggtatcctaaggctgaaatcaagatgtctcctgggctgtgttctcatctggagctcaaattcctcttccaagctcatttaggttgttgccagaattcagttccttgtggtggtagaactgatgctcttatctcctggaggtcttcttctccatagtcagtacacagcacagccagcagattagtgtctctgctgcttcaagtctcttgcttctaaaccctcttttgaatggcctacccaagatatctctcttttggctaactttatgttgtctgattgggaaccttaattacacctcaaaattcactcactcttgctgtattacataacataatggtgggagtgatagcccagcacctttgccatattgtattggttagaagacagctgcaggtccctctcacactcagagggaggggattacacaaaggcatggaaaccaggagacccacatgagtgtggccatcttagagttctgcccaccaaaggtaggcaaaaatgcagagatttgtgaggaaattgtgcagttgaccaacagtagtcaatagtagtcataactatctctgttagttttctcatctgcaaaacagagaaatatgataattaggtgacagtattattgcaaagactaatgagataatacatgcaaattttgttttacaattcttggtatgctggttctccattataaatacatacgattattattgctgttattattaaggatattatttgactttgccacctttagtgtgggaacctttaatctcatcaataataatttctcagtttttattttatttgtaccgagcagactctttagattaaaaagtgcattaagagagattgtctgggtttttttggttcggtatcttcctgtatactgaccttggctcccggaagaatgcatgaactccagaccttggtggattccttatctccctaggacaggcaatgggacaatgaaggaagcaaggaaataaattaaaaatgaaaagttatcttccacattatctgccgcattcatatacttgccaataacattgggccaaatactttggaagtaggtccagggataacattcagactggagaatggaaccgataatatccgcaggcattggatcacccactttttccccaatttatgctatgatatttatgagagcatgagagcatggaaggtaattccaactgctgtattaatgaactttcagtgtccctaggttgcttgcaaaaataaggcatcttgttggttttctgggtaaagatgagtctgacttgtattttatgtactgtgttcctgttaggtccaaagtctgaaatacctaacatcttcagcagggtgtcattcattcataaaccaggatgaaatacagcctctgtgctgaactttatgtcaaacactatacaaatcaggataaaagtccaaggtctttttgtcgagggattcacaccaagtggtgaaaccccatgtcaattgacagttacaatacaacctgtaacacatgaacgttttcattgcttgtcccatttcaaaggttgatcctatttttcatttacctataacacataaaagtgaaaattagtttctctagaagttttctctattacttaggttttaagtttttatgaagtagctatagagttccaggttttcagatctttttctttttctttgtttatttacattccttgtgtttcttctagatgctttacctaacaacttttaacttttctgctaggatctttcccctttcacttagaatgggaaatcttgcaagcataagaatttctatatattcagtactcgctgcttgctaagtggagatcttaatttaatatttcagttggtttagcagcagccgaacgagggagatgttgctggcatctgcacctgtgtttgacagatgaggatacaaggcatgcatgagcatctgtagcaacttgtttaatgctacattgataacaagtgataatttgagggaagaacttacattttctgcctcctacttctatgaaatttgcactatattaaatctaagtgtgtttaaataaagaaagccagatgtgtcatctttctcttttctctgccttggttcttattgatgacctatacctctcatttccattggtgtttcttactgtgggtctccactgaaagttgtggaaataaagatgaaaatcatgcctaggaaacaaaggaaaagagagaccaggtggcagacggtgcagagatttctttgagaggtacattgcacagatttttcaccccctcagaagtggaataaagttaaggaacaaagaattgagtctaagtccatctgcttcttgttaaatgaaaactatttgttaaaatactctaaaatcatttttttaaaaaaattgtgcattttaaggaggtttggcagtcagtaaaatatattaatgtattctacttttggtaaatcaaaatagaccaacttaatgactataccacacatgtatgtggagatatacataatcacaatgcacacacccagccattaatatcttctctgtgaaatgtttatgactgtaattgctgttctgattatatactgtgtgaacctgaaacacattattatattgggtgactaatggaattcaataacaatgcacagaaattgggattctggaaagagttgagttttaaactgtatttcctcctcagtttgaagtggatttcatgtctcatctaccacacagtatgcttatggctgatggattgaaatctctctgctaaatagtaaacaaccaagacaattcagtcttctcttagcttgcctgctttctcgtcactcattcaaaatatttttgttaaatacccaaaacccattaattagtaataatgggttttgagtattttgttaaatacccaatacctcagtttgtttaagagtttaagagtttctgttttccagctttgtggaattcattatttctttacgactttctttgaaagagagatcacagggtatatatgtggaaaacttgggtttgagtgaagaccctaaaattaattattcatgtattcagtcaataactttaccacactaacaatgcacagaaattgggattctggaaagagctgagttttaaattgtatttcttcctgagtttgataattaacatcttcagcagggtgtcgttcattcacaaaccaggatgaaatacagcctgtgtgctgaactttatgttaaacactgtacaaacagagataaaagtccaaggtcttttgtcgagggattcacaccaagtggtgaaaccccatgtcaatagacagttacaatattattgtaatattactgttaattcacttttatccatgctgttaattcatttttatccatactgacaaaaagagagggcatatccatcaatgcatcagtggatgcatctgaggtcctaagagtgtgatctccaagctttgcagggtgtcattaatggccttggaaataaagggttcttttagtacatgcctcstttaatgattccggtaggttcttttagtacatgcctcctttaatgattccggtaggttatgtgactttaggcacttcaattcctttctcattgttggatggacttcaaggttagagagaacaaattttaatttctttattccacttttctaaagatgtatctaatgttatgaagtataatgcaaaggttctatgggagaacatctgtgacaaacaaaacgatttcaattgttgcttgagtttctgaacacctaggacatttgcttggatagaatatgatttaatcctaaagagaaattattaaaatagcagtcgatggcatttgtcattcaatagttttttcttcagctaactctcaccactaggcacacttttacattcagtaagtgtaatatttttatttgaaagttcccaatataaagaaatgatagttatagattcttcatattaacaaaagtaatgtattgctttatcaatgatattcacatgaaaggccttataacaacatgagtgagtatataattagtgcttctcaaagtgtggtcattggaccagcaacgtcagcatcacctggaggtttatttgagatgcagattctcaggcctgcctcagactcacggaatcagaaagtctgacaggtgacacggagcaaatctgtattttactaagcttttcaggtgactgtaatgcaggctacagttggagagccactgatacggaaggtatgatcatacccatttaatagatgaaaaaattgatgctcagtgtggtaaagttattgactaaatacatgaataattaattttaaggtcctcactcaaacccaagttttctgcaatatacactctgtagtctctctctcaaagaaaggagtaaagaaataatgaattccacaaagctggaaaacagaaactcttaaactgaggaagggcagaaagggaccatttcactgctttattgtaatgagttgttaaaactattgtcacgagaaaattaacctagaaaaagttttaatgatacaagaaacacttttgtggtcatgcattgggttcctcattttctttttagtggcagagagaaagggatgcagttaaactccagaggggtggctgtggtatgttaatagaagtgggagacactattkgaatcatcgctttgtagccaaatgagttcatggacggcatttccacccaggtcttccccacgccacattacccttgatgacagtgccctgcggtggttttcatgcacacagttggcgttaactacccttccgtggcttggggaatgaatcctggaagtggaatacagagttcattatctgtaatgcaaaagtctatataatgatgcctgctaagatctagttctttgttaattcaatttgggctttgcgtatataatcaaacaagttatgtttaagtctattgtttcttcaattgggaggaatttccttaaatagaaaatattacgggccgggcacggtggctcatgcctgcaatcccagcactttgggagcccgaggcgagtggatcacttgaggtctggagtttgagaccagcctggccaacatagcaaaatgccgtatgtactaaaaatacaaaaattagcagagcattgtggtgtgtgcctgtaatttcagctactcgagggctgaggcacgagaatcacttgaacccgggaggtagaagttgcagtgagttgagattgcaccactgcactttagcctgggtgatggagtgagactctgtctctcaaaaaaaaaaaaaaaaaaaaaagaaaaagaaaaaataaaagaaaatattactattgattaggtaaaaatactgtgtgtgagagatatatttttatcctatatagatgtaaaacatcatgcaacatatatggaaaattacatcaaatgtaaatgttagtgttttataaataattataaagagaacacccatgtaatgaccactaaatcccaaagtgattgttgctaatgctccatatacctctgtgacatatcctaagtgggttgtagttttctgcacacaattcctgcttctgtgagtttctacccgcaatttcctctctctgaaaccaccacccaccctcccaccccgatcacacagttataaggctggcaaactctgtctcatccttgtgtactggctgaaatcatgccatagctctctgtagccaatgtctgtagggcactttgaaatatttcctttagcatataatatttgacttgcttgtgaactcatcgaaactgggatcttatctttgtatgttttagtttctcagtactagtgtatacctgatacattgtaggcattcaataaataatgctccagtgaattaattactggcattttcacttggataaacccctcaaaccaacatctccagaatgcactatcattttgcccaaacttctgagtctcagtgtaggaaaggtggaaactgcagcgtgttttatgacttccctctttccttcagtcagttcctccattgccatctctctcctctttcttccaattacttaccttcattttgtctctcatctttcacctctcagatctccacttatttcccatcttctagattaaacttcttcaagcttgattcccttactgtttctcctcttccagcaaatattttggttgtcattgctgtagagatgaagaaacctggacatatgcttgacttactcatgtctggtttttccaccgtttcttcacagagggttctataatgtgcattttctgaagtgaagcattgaacatggttgagaccattgttttctaacactcataaggtaacctccaatattgtggatggtgtggccttcggggaactgtggcaccagtcactctgtattgcaaattccttgctgggttgccacctgtcacaccccaggggtttgggagaatttccacagggtcagacacagcatgaaatgggctaaggaaccctctaaaatggggaaaatgaaacttacaaggtcagagtgagcaagagcagagacccactgtttcctgtccacccttcatctcacagagaggtgtgtcaggagttctgttggaccttctgtgtgggtttgcattcgaggagtgagacttcacctttaatttggcctttactacaaggcaatcttaggtgcagaaaaataatcagaccagtttgcaccagacatttggaactggcagcagctgtttgaagaagttgactaagagcaaaaggtgctggttcttagggagcttggcctttaagaagttacagccactcctatccagaggttctattggcagctgaattaggatgcagtgcctccttccgggagaaggggattcgatgctccatccaacttgctcattgcccaggaatcatagttaggacatctggagtcactttaagacaactgctcactgcaccacagtcctacctggctggtggtagagtccactgtctaatgcagcaacctgtgtgtgtcacaaacctcatggctcagtctccttagccagacatttagggtttccattctttggccatattcctttctgatgtcatctctcatgacttcttgtcacatgttctgtggcctagccaatggaatattgaatgtcctcccacgtgaatccgcttccatccttctacaataccactgtacctgcacctttgcagttcttccctcctggatgcttctctatccttctccctacctcctttccccgcaatgttctctgtctctaagtgtctaaaggccacgaacacctcaaggttcagccaaaacctctggccctttctcatctaggcatttgctcatattttcccctccaactgggaggaacccctccccaacttctttttttccaagcttaatgatttctcataaacttttctctgagcccctaggaaaaaaactgtgttttctttgctgccccccaaccatagtagtcaactttaaaattggcattaacacattcccccttgtcttacacatatacatttctttacactcctatttgatgacaggtccatccaggaaagcaatcatatcttctatgccttattccctagagtaacttgtgtattacaggtgttcaatgatgggtaatgattaagtgaaaagatcagggcatgaggtatgtgtgcaaaaggctgggggctgtcagaggcagattcgtrtctctgccttggccagataagctgggtatgtatgtgagccgatgggagcatcccactccgtcctcctccctaatctttctctctaccgacataccctcataccctcacctacgctcagtgactcccaggattatattcaaaagtaagaacaagaagacctgattcatcatgatttaggaatggcttgtaggatagactggggacataaccacacactttttgctttcaaaatgtataactgagcagttagcagttagctgtcttttgtttccaacctaattcaattgagaagtgatataagaggaaagaaatatcccaactgcagagaagtcttcagtcaagtctcaagataatttttttaagtgatgtcaatgacataaaacaaagaggaaaggtctgtgtcgttgcttaacgatttcacrtttttgccttccaggagacagagctactggatctcagccttgtcaaagatgccagatgtgggagacacgccaaagctcccaaggtaggaggttgagtgttgtgcatgcaccagatgctgccttgattgtttggctgtgtcacaatatcaattaattgccccaattaaaagtttctatgttatagatgttgtaaaacacaatagccagtatgccctaaacactttcacttttattaaaagacggaaacaatgaacaaatatgtgggctcttggacagaggggcttgctttatgtcctctaattttgcctttgtttgaaaaaaaaagacaacgacaacaatgcccaagttactgggtaattctaaatgattaaaaagtacttgaaattatttgaaaaaatctttgaacctcgtaaacatatgggaactaaccgttagacatgatgaatagaactcccatatagctgaaatgctctgcaattgaaatgattccatccacaatgccaaaaggtgtatagtcttaattctgcaaatgttactagtaaagatcagcatactttgggatgaattgtgtgcagtgtcatttgttttggtttgaaaaacttactgaagaaatattcaaagaagtgtttgcagtctgtttattttttgaagataatttttaaatattggatgaagaacrtaattttttaagcttagatgatctggtaggatatagtagcaggatatgttgtcttgccatcaaagttaaaagctattcttcattttatttaaaatttagtactttacatacttcatttctggcagagagggtattggcaaacatagaagtacagttgccatttaggagctcaatgcgtctttccatacttgatataaaactagctattttctatttgagtgtcttcccacaacttttgttttatcttttaaaagtcaaaattctttctctgacattaaaatgatctgttgctttggagatgcaagaaaaaaaaatcacctggaataattattcttcagaggcgtaaaaaggcagtaggtgccagcatattctatgacacagcaaacacacggctgctgggttttttaattttttaatttttattttatttgctgaaagggttaaaatgatctatggtaaaatgtaaaaacaaagatttttgaaagaaaaattagaactgtattcaagaaggcttctataagtgtttcatatgaaactaatctgttatttacatttatctccttagtaacatggaatttcaatagtttagcctctcagttttgtatcagacttactataattaatgctttgttgatgattcaaaattgctcacagtttttagtataggaaagaatattttttcttcttcccccaacaacatttcagccaaatttcatataagcctgttagttccaagaactatattgataatgcagctatgaaatttatctttgaacctaagtttattggcctaacttgcaatttcaatatcgatattagttttaaagacagttgccgacactgcatcagagcccygtttgtccccaggcattgggagtcaaagtgaattctgctgccacatggagggtttctttcaggcttgaatctgtctcttttattgcggtacacagcttgcttatcagttaagtgtttcgtttatggatgtggtttgataaatgtctactgaacagtgacaaatgaacagcagtagggcctgtaytgtgctcagctgataaaccactgttagatcctcaaatgcttctcgtgaggatggatttttaacacttagaatactctgactttgtcagcttttctccatcagctctttcttggagggactgattacttcctctttgaattatctatgctcctggcttcctttttttccctcctatttattgctgatgttcaagaacctcactctcctctaatattttcaaagcctggttctattaaacattacctgtgtggctttcctgagactccagcttcttccttgttggctaaakggtgaagataatgataataataagtacttgaaatggttgctataaggattaaatgaaataattcattaggaaacctttagcacaggagttctcaaatttaattgctcatggaattacctgggaaactttcaaaaatgctgatgtgtgttttccgcctccagaaatgctggtaccataagaatcaaattgatacaggtgtggtgtgggcatgatggatttgaaaaacaaatttgcagcaaaatttgagcaccactgccttaacttactcttggtgtacaataagtacttactaaatattagccaatattgttggtagtaacattgttgcttttgttatcactaaaaaattcaagtcagaattgtagaaagccacttttcatttcactcacttaatttggaaatgtttatgtcagcaaaagggatcagaggaggggcttatctcaaagggggttgtggattgacaggcaagaaagaagttgctattactatcagtttaaaatcttcaaatttccagagaaaacctcagctcaaattggacaaataaaaatataatttattgaaaatgactggaatgtattgaaaatttcagcggaattgccaggttcaggtgaagtttcattccactgctcagttaatgtcaccaaggactaggtgcctctttttttcatcagtatgccatgcaaggttctggtaggggttctgatatggcttggctgtgtccccacccaaaatctcatcttgaattgtaattcccatcatccccatgtgtcgagggagagaccaggtggaggtaattgaatcatgggggcagttcccatgctgttctcgtgaaagtgagtgagttctcacgagatctgatggttttataagtgtttggtagttcctcctgagttcactctctcctgcttccttgtgaagaagatgcctgcctccccgtcgtcttccagcatgattgtaagtttcctgaggcctccccagccatgcaaaactgtgagtcagttaaacctctttgttttrtaaactaccatcttgggaagttctttatagcagtgtgagaacrgactawtaccgggtccttttccatcttcaggttccccttggatgctaccctctgcacaccacccttggcagctcctggcctccccacctaacagtgtcatatggggtggcccaaaagagagactagctgcctatcagagaattgtatcaggattacagtataactaccttgtagaagaaggtgtagggcctgcaagaggaaaactagaccattgagttggttagaacaaaagcagcaacaggacttagagtagattaaaagtataaagataccaggataaagtgaagaaagcttggaaactggggacagaaaggcaatgtaacaaaaggacagattgagtgcaagactttctgcrggggcttatagaccataaaggaaggaagaacatttgtgaagcagatatttatcaaaatacccaggcaccccacaaatatttatctctatattcatattatttttgttttttacagcatctcattacataaaaattcaagatctggttgaaaatgarctgttttttgtgcctgctgtgatttgaaataacatttacaggaaatggaaaagcttccatgtgttaccctgtttatgaatttaaatgtcaacccccaacacaatacatgaaattccagatcttcttttctgtatataacctttgttcaagttgccagttttaaaatttcacattagagagaacttgggagatctttatccaaatgtaataaccaaaagaaaaacactgtatcctttgaaatctaaaaggtgcttactttttttcttgctctctctctccctccttccggccctcccaggtttgtagagcacacgtaagggcaagatgctgtggtatatatatcttgtctgtgctatgtacatgtactttctgggtcgtcacttcaaaaagatctttgcttttaaaaaaagtgtttatcactgcggcctctgatctattagtagttcctgacccatcagatccattcagtggctcatgtgcagctttcataaaataaaataaacttgataagagtggaaaataatcttgtcttgtacagaaaaagttgttttttgaaacttttttcatgtatgtgactgtatgttctgagtcacagcataaagtgtaatttttactgtgggcaatacatatcggagaagttttaaaaaggatgctgaacaagatcatttcttcagcctcatgattctcagcatgtattgagtgcttaggggtatggaaaagtggggaaagtggagatgtgggttcaagtgccagctttgccattaacaggcgtaaggaagttgtgctgtctgctggcatctctacttcctcatctatgaaatggggcatgggatacatggttttaggtatgtaagttccgttagcccttgattccagcttttaaattgagaagttaaacacccatgactttccaccttacagattgtaaaactgatgttgaataagtttacataacctgaaacttcttacctccttcatcatgcaaaccaagtgaaccaaaaaaaaaaaaaaaaaaaaaggtcacactctagccaaggtaaggtactatgccaacaaaaaggattaaagacttgtgtcaagcttctttatgtgtggcttctcaaaagcattctaggattgcttttggacaccacagggagcgacctcagggtcacagaggctctcccaactttagtacatgaaaactgtgtgctgccaacttccagctctcaagaatgcacgcagcaatgtcattgaaaaatatttttatagttacacaaaataaactgcttgtcatgctgatctgacaactagtttattctattggtaaagggcagttatttcagatatgtagtattaattttaatgtagattctttgtaaatatctaggccgcaattaaattctaggttgtatgtagtatcaccagaatcacataaggtagattagagtaaaatcaaattttaaaaattgattaggcttttctttcctaatctctacataaacatgatagcttttttacttcattctttattgattcattgattgattgatattcaatgacagaagtcattgagtgactctttctgccaggtactgttacaggtgctggaaaacagcaatgaacaaaaagacaaacagctatgctgtcatatagcattttatttaagagtgagaaagtggtggtagttttaaactgggtcttaaaaaagaaaagaaatcagccgggcgcagtggctcacgcctgtaatcccagcactttgggtggctgaggcgggcggatcacgaggtcaggagatcgagaccatcctggctaacacagtgaaaccccgtctctactaaaaatacaaaaaattagctgggcatggtggcaggcgcctgtagtcccagctactcaggaggctgaggcaggagaatggcatgaacctgggaggcagagattgcagtgagccaagatcacaccactgccctccagcctgggcgacagagcgagactccatctcaaaaaaaaaaaagaaaaagaaagagaaagagaaatccctgatttgctgtgttggctgacttcctttgggcaactatttccatggaggcaaatttcaagctaccaacctgatgtcattgaatgaagagttggaaggcaatacacaccatgtccagtagacctatcagcaggttccagcacctcatggggtaggggaaacagataacagataagtcccactgagaagcataaagcgggatcggagacctgagaaaatgagtgctgggaaggggtctgctgctttacagagccatagtggggaaaggtgtcttgataggaggcagttatatgagtagagacatgaacttagtgagggagagcattcctctttgccggggatacagcaagagcaaagcatatttcaggaatagaggaaggccaatgtggctacygtagagttcagaccttttaggccatgaaaatgacttgggcttttcttctgatggaagagggaaggcttctgaaagttctgagcacagaagtgatgggatctgagcttttgaaagttccactggtggctgttgggagtaaactacaaaagagagaagcaagcagaccaactaaatggctgctgcagatatcctggggtgatgatgataactttgcctgaggtggtagctagagaggtggtgaacaaagtgacataatctgaatatgttttaagatagagacacagggtttgataatgtattggatgtgaagtatgagcaaaagaaaagattctagaacaactattagtgttttggcccagaaaattgggagaattgggttgccatgtcctcagataagaaggaaggaagagcatatttaaacagaaaaaaatccagaatttggttctggatatttaaatgttgagatgcctgctagacttttacctgataatgtcaggacagttagacacaagtctggggttyagggaagatgttggccctggagatacaaatgtgggcatttgaggctcaaatcctgggtgaggtctcttaaggaatgtaggtgtaaaagaaagaggtttgagatctgagacatgggattgccagcatttagactttgaggagacttggaggaaacagcaaaagagactgagaatggtatatacgtaaaagaatagaaggcaggaacttgaacagacacttgtgtaccaacgtccatcgatggatgagtrgatatacaaaatgtcgcatacacttacaatggaatattgtttagccctaaaacagaatgaaattttgacacatgctacaacctgagggaaccttgaagacattatgctgagtgaaataagccagacataaaaggacaaatatagtatgactctgttcttatatgaggtacaggcataccgcagcagcattgcagatttggttccggaacaacacaatacagtgaatattgaaaaaacataagtaatacacattttttggtttcccactgcatgtaaaagttatgattacactatactgtagtccattacatgtacaatagctttatgtcttaaaaatcagttatttttagacataattttacaattaaattaaataaaaaatattttattggtaaaacatgctaatgatcatctgagtcttcagcaagtcacagagggtcttgcctcgatatcaaaggctgctggccattcagggtagtgattgctgaagattagggtagtggtgacaatttcttaaaataagacaacagtgaagtttgcaacatcagttgactcttcattgcatgaaagatttttctgtaacatgaaatcctgtttgatattttacccacagtagaacagtagaactactttcaaaattggaatccatcctctcaaaccctgcttctgttttagcaactaagtttatataatattctaaatcttttgttgtcgtttcaacactgttcagtgtatcttcaccaggagtagattccatttcaagaaacgactttctttgctcattcataaaagtaaccccttgtctgttcaagttttatttatttatttttacttcttattttgttttatgtttttaattttactttaatttctcggatacatgtgcagaacatgcaggtttgttacataggtatacgcatgccatggtggtttgctatgtctattgactcgtcctgtaagttccctcctctcacctcccccaccccccaacaggccctggtttgtgacattcccctccctgtgtccacatgttctcattgttcaactcccacttatgagtgagaacatgcagtgtttgattttctgttcctgtgttagtttgctgaggataatggcttccaacttcatccatgtccctgcaaaagacattatctcattactttttatggctgcatagtattccatggtttatatgtaccacattttctttatccagtctatcattgatgggtgtttgggttggttccctaactttgctattgtaagtagtgctgcaataaacatatgtgtgcatgcgtctttataatagaatgacttatattcctctggctgtatacccagtaatggaattgctgggtcaaatggtgtttctggttctagatccatgaggaatcaccatactgtcttccacaatggttgatccaatttacattcccaccaacagtataaaagcattcctatttctccacagcctcaccagcatctattgtttcttcactttttaataatcacgattctgactggcatgagatggaatcttactgtggttttgatttgcatttctctaatgatcagtgatgttgagctttttttcatatgtttcttggctgcataaatgtcttcttttgggaagtgtctgttcatatcctttgcccactttttgatggtggtatttgttttgttttgttttttttcttgtaaatttgtttaagttccttgtaaattctggatattagacctttgtcagatcggttgattgcaaacattttctcccattctgtaggttgcctgttcactctgatgatagtttcttttgctgtacagaagctctttagtttagttagatcccatttgtcaagcttggcttttgttgcaattgcttttggcatatttgtcatgaagtctttgcacatacctatgtcctgaatggcattgcctagattttcttccagggatttttatggttttgggttttacatttaagtctttaatccatcttgagttaatttttgtataaggtaggaggaagggatcaagtttcagtttcctgcacatggctagccagttttcccagcaccatttatttaataggagatcctttccccattgtttgtttttgtcaggtttgttgaagatcagatggttgtaggtgtgtggtgttctattccattggttctgtatgtctgttttggtaccagtaccacctgtttcggttactgtagtattgtagtatagtttgaagtcagctagtgtgatgcctccagctttgttctttttgctcaggattgtcttggctatacaaggtcttctttgatcccatatgaaatttaaagtagttttttctaattctgtgaagaatgtcaatggtagtttcatgggtatagtattgaatctataaattattttgggcagtacggacattttcatgatattgattcttcctatccatgatgatggaatctttttccatttgtttgggtcttctcttatttccttgagcagtggtttgtagttcttgacaagatccttcacatccctcgttagctgtattcctaggtattttatgctctttgtagcagttgtgaatgggagttcattcatgatttggctctctgcttgtctattgttggtgtaaaggaatgcttgtgatatttgcacattggttttgtatcctgagacttggctaaagttgcttatcagcttaaggaatattggggttgagatgatgtggttttctaaatatagaatcatgttgctgcagacagagacragttgacttctctcttcctatttgaataccctttatttctttctcttgcctgattgccctggtcagaacttccaatactaggttgaataggagtggtgagagaggccatccttgtcttgtattggttttcacagagaatgcttccagttttttcccattcaatataatrttggctatggctttgtcataaatagctcttattattttgagatatgctctatcaatgcctagtttattgagagtttttagcatgaagtgatgttgaattttatcaaaggscttttctgcatctattgagataatcacatggtttttatcttggttctgtttatgtgatggattacatatattgatttgcatatgttgaaccagccttgcataccagggatgaagctgtcttgatcgtagtggataagttttttgatgtgctgctggatttagtttgcagtattttatcgaggatttttgcatcgatgttcatcagggatattggcctgaagttttttttgttgttgttgtgtctctgccaggttttggtaacaggatgatgctggcttcatgaaatgagttagggaggagtccccccttttcatttgtttggaatagtttcagaaggaatggtaccagctcctctttgtacctctggtagaattcagctatgaatccatctcatgctgtgctttttttggttggtaggctattaattactgcctcaatttcagaacttgttattggtctattcatggatttgacttcttcctggtttagtcttgggaggttgtatgtgtccaggaatttattcatttcttctagattttctagtttattcgcatagaggtgtttatagtattctctgatggtagtttgtatttctatggggtcagtggtgatatcccctttatcattttttagtgtgtccatttgattcttctctcttttcttctttattagtctagccagcagtctatctattttgttaattttttcgggaaaaaaagaagaagctcctggattcattgattttttttggagggtttttcatgtctctatctccttcaggtctgccctgatcttagttatgtcttgtcttctgctagcttttggattagtttggccttgcttctataactcttttaattgtgatgttagggtatcagtttgagatctttctagctttctgatgtgggtacttagtgctataaagttccctcttaacactgctctagctgtgtcccagagattctgatacacgttgtctctttgttctcattggtttcaaagaacttcttgatttctgccttaatttcattatttacccaggagtcattcaggagcaggttgttcaatttccatgtaattgtgtggttttgagtgagtttctttttctttttttttttttttttgagatggagtcttgctctgtcgcccaggctgaagtgcagtggtgtgatctcggctctctgcaagctccgcctcccgggttcacgccattctcctccctcagcctcctgagtagctgggactacaggtgcccaccaccacacctggctaatttttttgtatttttagtagagacggggtttcaccatgttagccaggatggtctcgatctcctgacctcgtaatccacccatcttggcctctcaaagtgtctttttttttttttgagacacagtctcactctgccacccaggctggagtacagtggggcacaatctcagttcactcttgtgctccacctcccgggttcacaccattctcctgcctcagcctcctgagtagctgtgactacaggcacctgccaccatgcctggctaatttttgtatttttagtagagacggggtttcaccatgttagccaggatggtctcgatctcctgacctcatgaccagcccacctcggcctcccaaagtgctgggattacaggcatgagccaccacaccyyggccttgagtgagtttcttaatcctgagttctaatttgattgcactgtggtctgacagactgttatgatttcagtacttttgcatttgctgaggagtgttttacttccaattatgtagttgattttagagtaaatgccatgtgatactgagaagaatgtatattctgttgatttgggttggwgagttctgtagatatctgttaggtcccgttgatccagagctgagttcaagtcctgaatatacttgtaaattttctgtctcattgatctgtctaatattgacagtgggatgttaaagtctccaacaagtattgtatgggaatctctgcgtctctttgtaggtctctaagaacatgttttatgaacctggatgctcctgtattgggtgcatatatatttaggatatttagctcttcttgttgaattgatccctttaccattatgtaatgccctttttttgtctttgttggtttaaagtctgttttgtcagagactaggaatgcaacccctgcttttcttttttcttttggcttccatttgcttggtaaattttcctccatcactttattttgagcctatatgtgtctttgcatgtgagatgggtctcctgaatacggcataccgatgggtcttgactctatccaatttgccagtctgtgtcttttaattgtaacatttatcccatttatatttaaggttagtatggttacatgggaatttgatcctgtcatcattatgctatctggttattttgcacactagttgatgcagtttcttcatagtgtcattcgtctttatattttggtgtgtttttgcaatggctggttttcctttccatatttagtgcttccttcaggagctcttgcaagtcargcctggactaaatccctcagcatttgcttgtctggaaaggcttttatttctccttcscttatgaagcttagtttggctggatatgaaattctgggttgaaaagtgttttctttaagaatgttgaatattggcccccaatctcttctggcttatrgggtttctactgagaggtctgctgttggtctgatgcgcttccctttgtaggtgacctggcctttctctctggctgctcttaacattttttcctacattttgaccttgaagaatctgaaaattatgtgtcttggggttgatcttcttgtggggtatcttagcggtgttctctgtatttcctgaatttgcatgttggcctatcttgctaggttggggaagttctcctggatgatatcctgaagtgtgttttccagcttcttttcattctccttgtccctgtcacktactccattcaatcgtaggttcagtctttctrcatagtcccatatctcttggaggctttgtttgttccttttcattattttttctctaatcttgtctgcatgccttatttcagcaaggtggtcttcaaactctgatatcctttcttctgcttgattgatttggctattgatacttgtgcatgcttcacaaagttcttgtgctgtatttttcagctccatcaggtcatttatgttcctctctaaactggttttctagttagcagctcctctaaccttttatcaaggttcttagcttctttgcattggattagaacatgctcctttagctcagtggagttttttattatccatcttctgaagcctacttctgtcagttcrtccatctcatcctctgtccagttctgcacccttgctggagaggcattgaggtcctttggaggagaagaggcactctgcattttgggttttcagtgtttttttgttgattctttctcgwctttatgagtttgtctagttttgatctttgaggctgctgacccttggatggagtatttgtggggattttttgttgttgatactgttgttgttgctttctgtttgtttgtttttctttcagtggtcaggtccctcttctatagggctgctgcagtttgctgggggttcacttcaggccctattcatctggtttgctctcgcaccaggagatgtcactcaaggaggctgtaggacagcaaagatgggtgcctgctccttcttctggcatctctgacctcaaggggcaccaacctgatgcgagtaggatcgctcctgtatagggtgtctgacaaccacgttggagggtcttacccagctgggtggcacagggaacaggacccatttaatgaagcactttgactgtcacttggtggaggggatgtgcttcgctggggagaaacccactcttctgggctgcctggattcctcagaactaccaggatgaaaggctaagtctactggtccacagaaactgcggccactcctctccctggggctcaggcccaggaagatcagggttctttccctgagcctctggctggagttggagttcctgcaaggagtccccaccaagtgagaaaggatgagtcagggtcaggcctgaagaggcactctggctgcagtctgccacagctggtgtgttgggctgtgggggaacctcttgggaccaagctgcccagcctycctggccccaggagaggaaaagcatggcctggagctgtagagatggatgctgtccttccccacccagggagcttagcgtgacaggcagttacaagtcccagtgctggctgctgcccctcctccaaggagttcaaatggcttagacagcaggcagccacagctgtggtgctggtggcccctccccctgggaacttggcaggcttaagcagattcgagctgagaggctgttgagaatctgcacagctctggggttgggaccctaggccccagtggcgtgggttcacgagtgggatcttccgatccatgggttgcacagttctgtggaaaaagcatggtttccccggctgggtagcacgctcactcgctgcctcccttggctggggggtgagggctcccctctcccatgtggctctcaggtggaccaccacaccacactgctcttccttcctctccatggatcatgccagctgcctcgtcagttcygatgagagaacctggatatcttgattgctggtggaggattcacacactattatgattctttttgatggagcctctctgatggctgctgctcctagttggccatcttggccctgcctccccgttcaagttttattataagattgcagcaaagcagtcacacctttaggttctaataataattattgtcctctagcaatttctaccacaactacagtgactttctccactgaagtcaaagtcgtccatgaggattggaatcagcttcttccaaactcctcttaatgttgatattttgaccttctcccatgaatcttgaatgttcttaatggcatctagaatggtgaattaaggttttaaatttacttagcccacatccatctgaaaaatccctatctatagcagtgtagccctacctaaagtatttcttgaataataagatttgaaagtcaaatttattgatccatgggctacagaatggatgcgttagctggtataaaacaacattaatctccttgtatatcaccatcagagctcttttgtggccaggtgcattgtcaatgagcattaatattttgaaaggaatcctttctcagcattaggtctcaacagtaagcttaaggtatttagtacaccatgctgtaaacagatatgctgttatcagattttgttgtgctgtttatagagctcacgtgaaataggtttagcataattcttcagggccctaggatttccagaacagtcaatgagcattggcttccacttaaagttaccaactgccttaatgcctaacaagagagtcagcctgtcctttgaagctttgaagtcaggcattgacttctctcaagatatgaaggtactagatggcatcatcttccaacagaaggctgttttgtctacatggaaaatctgttgtttggtgtagccaccttcatcaatgatctcagctagatcttctgggtaatttgctgtagcttctccatcagcacttcctgcttcaccttgcacttgtatgttatggagaaggcttctttctttaaacctcatgaaccaaccactgctagcttcatacttttcttttgcagctttctagcctctctcagttgtcacaggactgaagagagttagggccttgctgtgggttagattttggcttaagggaacattggggctggtttgatcttctatccagatggctcaaactttctccctatcagcaatacgtttgctttgctttcttatcatttgtgtgttcactggagtagcaattttaatttccttcaaggacttttcctttgcattcacaactgggcggctgactgcttggcacaagtggtctagcttttggcctatcttggsttttgacacgccttcctcactcagcttaatcttttctagcttttgacttaaagtgaaaggtgcatgattcttcctttcacttgtacacttagaggccattgtaaggttattaactggcctaatttcaatattgttgtgtctcagagaaaagggtggccccaggagagggmgaaagataagggaacagctggccaatggagcagtcagtacccacacaacatttattcattaaattcaacatcttayataggtgcagttcctgatgctccaaaacaattacaatggtaatatcaaagatcactgatcacagatcaccataacagatatattaattattcaaatgttgtgaaaattaccaaaatgtgacacagatacatgaagcatacacatgctttgtaaaaatggmaccaacagacttgctggactcaggaatgccacaaaccttcaatttgtaaaaacaaacaacaaaaaacccccacaatatctgcaaagcacaatgaagcaaagtgcaataaratgaggtgtgcttgtagctattgtagtcaaatccttagagatagaaagttgcrtggtggttgctgggcctgggggaggagaaaatggggagttattgtttagtgggtacagagttttagtttgagaagatgagaaagttctagagatggatggtggtgatggttgcacaacagtgtgaatctacttaatgccactgaactgtacacttaaaaatggtaaattatatattatgtatgttttaccactttttttwaaaaaaaaaaaaaaaaaaagaagaaactgagaaggagcaaccagtgaggagggagaagaaccagaacagtgtatttcctggatgcctaaaaaatatttcatggaggaaatcaaatggtgaattcaggtcaaatgatgaatttccttctagcttttctttttttatggagacttcactttggcacacttgtaactttactgacaatacccttttrtatatgcttttttttcccttatatcatgaccgtttcctgctaatattcaaattaggccgtttatttaagggttgtcaaatctcaaatagctcatcatagaatctggatgccaatatataaatctcataatgagctgttatttrgatgttatacaacagtggtttcaatgaatcatccatgaggcctggagttgaaatgaatgctttatttattgtctcccattgctgattataagctgtttccctgactttgtacagatttcaccattatgtgaagccacagtcataaaatttggtatagatatttgaggtttaggaaagaagaagaaaactctttacacaacaaagtaaaggtttctccttttttctcctgattgctaaggagatcaacctttgacccttattcttggttccaactatttcttaatttacctaacatgcttcagtagtttttttggtttgttttttggtttgttttgtcattttgttactataaatgtgtttttatttacatctttactaaatggagcaaaatagggctaacaacttattgaatgatctgtgtgtgtgcgtgcatgtgtgtgtgtgatggttttgacagctattcacatttatctttagatgtaaattatatggcatagttccttttttatgttcattaaattccatagatgtcagtggtttccttggaaacaaaaacctttatataactagtcagagatttggtagcagaaatatcaggatgctggcaggggttcaggggtggttaaggaatggttcccttggcagatgtttgcatttaaaactcttctgacttttctccctgccccttaccatcatggccattcaatagtgcacaagataagatttttaaagctactattaaaatgtagaatattttctttaatggctaaaagctttttactttaaaaaaaaatcgcagatatgttaagtcttttctggggtggtataatttcccaaatttgagaagaggttggtgtatctcctatcaacagttaaatctgcatgtttaggcaatgcctacatttttcagtatatatggtgtccatttgtaaaatacagtgaactgcatatgtgtgtggttgaatcaagattctatgtcatttataatggccagcatctgtcctattaccttattgccaaagggttctaaaggacctggagaggttgtagagaaggtaagggaaaggtcacggttctgctcaagggtaatagtaggtgaaaggcctggcagccaagaacattctcacggaggcccagagtggacctgttgttgaagacagaattagtaccatgagttaatgaaacccaggtcttttcagaagattgtgactcatttttatcattgcccctgtctggtgtaatttcaaygtaaatccaatttgttctacatgcaatggtacatagttgcatttgggaaacatttctcaattttaattcttttaaacgcaataatgcgccatcttgtggacatatccgatattaaattcttaaattaattctacatagygaactgctctctaagccagggttttcaatcatgggttctaatatagagatatgagaagcacttggggagcttttaaaatcctgatgtgcaggccacaccccaatcaattaaattgaaatgtctgctgtggggctccaacactgatattttctttaaagttcccaagagattccagtgttcaaccaagtttcaaaaccattcgtctaagtaaaaagagtaccagcttaaatggatgatttctcttttgaaaatagagattttacacagaaaagcattgagaattttcctacaaaatatgcttgtcaaaaggaccacttttcagtcaagttttccttaaacttgaccactatacttaatgtagagaagtacaccacggtacttgtatcagtcttctctggttaccacagcaaagtaccacaggctaagtggcttaaagcttaaacaacagaagtttattctctcacaattctgggagcgggaagtctgagacaaaagtgccagcagggttattttctttggaggcctttctcctcggcttacagatggctgccttccccgcatcttcacgtggtcctccctctgtttctattcctaatttcctcttctaataaggaacaagttgtattgcattagggcccaccctcatgaatgcatttaacttaattacctctttaargcactattgctaratactattaccttctaaattactgggggttaatacttcaacatataaatgttgaggggacacaagtcagcccttaacagtgttccctcattacattacaaagcctagcttaggatttgcttctttataaggagtagcagtgtatgattattttgctgttggtttaatatagaaaagtagatttttttctttataatcaatacaatggtcaatgtggataaaactgcatagtcagaatcatttcagaaatacacaattgcttttgcagagtggctttagtacagaatatgttgatttggcattatcagcactaatttctgcatgccccagggcacccagtatgtgtctttgtgtattrcaagtgcctataagagtatagttattaaggtcacaagctcttgggtcagaaagccaagccacaacaccaataacaagctgtataatcctgcaagttatatcatgtctctgagacttagtttcttcatctgaattacaggaataatcgccatgtttatatcatctagttgcggtaaggactaaatgacaaaatgcacgtaaggcacctaacacaattgtcacatccattgtttgtctaaatgcattttgccatcattattaagtaaataaaatatataacttacatgtatgtgatgtagtgggaaaaagcaagttaaataggcataatttacctatttaccatagaattccatgcactaatatagattgtcactataatctatatttatatatatagattgtcactataatctatgtataagagatttatacttttgtagctgtggcatttaaacctactgattaaaatctaacttctatgtattagctatagaaaaatgaacttgaggcatatttmtctttgcagccaaacacctacccccagagaactatcacagcaatattgttgtactaagacttacagttcttatttagaaaactgtctagatttgccaacagttaaatagattttccaaccatcaaaataattttagagcaatttactttcagttaagaacatgcgggtatctttttctgcactatgaagtcattgaagcaaaatccaaagcactgttttgaaatggaataacaaggttaggggtcagagagacccagattcaaactccagtgcacttattagctgagagaacccaggaaggtttattggtttccctgtgaatgataatacttgctgtattgatttgtcttgctagttggattttaactggtaacaagacataaatcataatgtttgatactacttacttccctatgggccttaagttcacttttcagtgtattcttcttaatgttctgtgagactggtaaataatgaagtatatatatatatatgtgtgtgtatatatatatatatatatatatatatatatatatatatacacacacatatatatatattacttgaacttcctcaattttggagattaggtcataaactaatgtggcatgtaatttgatacatgttccagcaggggaaaatactgggatgtaatttaacgaaagaaacattttgaaatgggaatattctctgaaaatatggagtatatcattacaattccttttcagctttaggactcataataaactgggcactgtccagtttatgagcagcgagttcctatagtttgaaagtttgcgtcccctccaatattcatgttgaaacttaatcgccgatgcaatagtatttaaagttgtggccttttgaaggtgattaggcaatgagaactcctccctcatgaatgtgattaaggtccttataaaagagatttcactcaaggttcagtcttttttgcccttcctccttggcccatctgaggacacagcattcgaaatgccaccttgaaacagagagcatccctcaccagacacggaacctgtctacgccttgattttgagcctcccagccttcacatctgtggaaaataaatttctgtaaatatttcccacctgacagatctttgcttataaattggccggtctgtttgttatagtagcacacatagactaagatactagtttttaatttgggtactgcagctgatggaataacctgggtagagtcataccatcttttaggaatctcaccttcctcataaaaaatgaaagagacaagcaggatgatccctggggactaaaggtaatatttgtatccatcatggagctattgggagaactaaatgatatacatctctcaaatggatttgccagccataatgtgtgatatagtaatatcaatttgtgagtaagttgggtagagtggaaggaacttaggaatgtataccagtttattctgagaaatttgtgttttgtcttctttgaatgggaaatggctgaaaattcttaaattccttcaatgtaccataaaaaagtgaaatcctatatcactgcctttggatgtgatacatgacccatagtaggtattttcgtagatgaaagaattcctatctatggcatttatcttatgtgaaaagtggcaattaagatagtaacatatttgccacttaacagatatttgttaatgatgaaataaagttttccggaactcctgaaattaatgtccatagagatttcaagaagatggaataacctaactaattagacagtatgtttgttggtgtttaaaggtgagacaagaccactgagattaaaagatcagaaaattctcctcacacacctaatacattttctctatgccacctggtacttctgtactcaaatgctgcttgatttttatatttatacccaagaattactgatttcaggtaagaacagagggcttgagagaagaatttgctcatcactgcctgccatgaatgggcatagctctgtgaacagttattgtatttttttttcctcaggtatatagaatactttatcaaaaccaaaactcactgtttctccaagtgagttccttggaatactaatagatgctataaaaatgtcatctaggtgtggtggctcacatctgtaataccagcactttggaaggccgaagcaggaggattgcttgaggccaggagtttgagacccaaagccctatctcttaaaaaaaatataggtggatgcagtggtgcatgcctgcctatactcccagctactcagtataggctgaggcgggaggatttcttgagtccagagttcaaggctgcagtgaactgtgattgcaccactgcactccggcctgggtgactggtcaaataagtttgggaaatgctaagggttcctttattgcaggatttctcacagcttttgatgtgttggacatgggttagtgtcacttctttcttttttctttaactatgggtctcttggtcacaagcatctcataggattaatataaatgttctaaaagccatttattatgaagttaaccacacttaataaactagaacaccagtttatgagtgatgcttgtcttcacagtagtgcagatcctattaaagatgtttagagaacaggttcttaggtgatctaaaccagaaaggcctttttcatatatcttgataatattaatataatgttgaattttgtcttgtattatattatgatgttttgaattttaaagtttactatttgcattcttcccacctaattaatttttttaatttgagaccttatgacagaaaaccatcagcattgcccacatattactcaaaacacaagaatttcatttattcccatagcacctggaatctatgctggcatttagwcaagcctaatgcctagtgtaccactagagtgagattctctgtccactcttaactatttctagagcctatttttctatggtttcacatcttatgacttatataaaattggtactacttggcctttgtggaaggattttaagtcaaggtaaaccttgaattgaggttagattaaaagtggtagaacttacttagggagcaataacttttaatagtcatagtttcttttcggttcctggtgtgtgtgtgcagaaagaaagaagtctgatgattctctggttcatgggagttgacttttatgccctgaaagtgaggctttgcttctgtatcctcacactggggaacagcagtggttaagaggctccaccagtattactcatgtggtcacaatcaagttgcttaacttcatgtcttgctttcttcatccataaaatgaagttaatagtactatttctcagggttattgtgaggactaaaggccataacatatatttcataataggggatctgtaagttgtagttactgttatccttaaaactataggccattagtgcatatgtttaataggcttgaagctgtgccattatttgacaagttaaactcttggttgcatcatccatattctcaatgtttttctttaggtatttgcatttgccatctatagtatataggcttctatctggcaaagttttcacttttaatggtatctttaacaatatttttcaaaagctttgagcatcactcatatttcaaaaatagtaaggtcatgttaaacttttaaattaaatcgtttcttcctagactatttcaagatttgtaatacctggttaaaattgtttagcaaacacaatttttctttctatgaatgttaattaaaaattaaatttgactctctttagttgaaattagtcattttgtatctgtgcatgaattacattttccttgattcttatagtaccttagtataaataaatttagtaagagtttaaaaagaagtttccttggttgaggtacatacaaacaatatgggaaattgaacacctattgactttattatttttgccatagataaatctctactgtcgaaagcagtagttaatgagacatttattttattttatgggtctctgaaacatgcttctctattaatcaatttgcttgcaattttgtttgaagattaaagattctttagaaggcattgtctacatattattacttatggataccagatgaaaatctaaataaaattaatttaagatctcttatattagttctgtcctacacatataccaaagaatgtggaatggctgaataaggaaaattaaattttaagtttacacaattttaaagtcaataatgctttcaaataaattatctatacataatattgaaaaggaatagctcttagaatatctaaaataaaaatagatgattgagtgggatatttcacatgagttggtggtttataaaactttgagaaagtatgttaaagaataaattgtgtaagtaatagcgaactagactcagtatttaattttatgcttagctgctcaaaatttcatggtttgagttgagaattcttaagtcaaataatttatttgaaggatactgtagagcatttgaaatactgtgaaggtgtgactagaaatctgtttttcccattttaaaaaaaaaacaaattgttattctagactataaaatatagaaagtcataatagatggatactcttctctgtaaatatattttcccctgatacttaactgtaccatgttattctaaattattcctggtaaatgcttacaactcttccaagtgtctggaaactcatcaagcttcttttaatcatgtccctcaaatattcggcttgtaatttactaatattcatgccctgtttagattgtaaacagagaaactacaaagttgtaacagaaaagtaatatattgagctgaatcatgccttacttttgtaagttgagcttgtttctctggcaacaagatgttagataataaatcatatatctaaaaccatataactacagaagtggggagctgaaagttcagaagtatcatctgactgtgttgatggcatctttacctcaattaataaggtgtggcaaygttcactcaaggacagaaattcaatctgtggtggatccaaggggattcaaaatatttcttttaatccaaccaaaacatattgctttaatggcattagttggtattagttgcatgtggcaaaaatttcatgcactattaatcctagcactacactgcaacactagaattatgtgtccttggccttaaataaattattcggttgtatgattgagaagagaaaaaccaattattttagaggccagtcctgaattattgccttaataaaggttcaatttcaaaaaaatgggaagttgctcagtccagttgaaaaacaaggtgggaagagtaacagcaagtgagtctttaattttgtcaacatctgatgctactgttaacacaaaaagttgctttgaaaaaaattcaactaaataagttgccttcgtggtttagtaattccagatatacacaatcgtctgtttattttcccaaagatcaaactgtgttcatctatatatttgcatacgtaacatattaaagttttctcatctaacatgacactgtaagcatggccatgattctaaatatttttaatatttatcagttgtatagctgaataataatgcattgattggaaatcatattaactacttactatttacttttgagtagacaatttctgttttatttttgctattataggtaaatctgaagcagatatctcttcttcatttggcgtttttattctttggtaatgcctcaaattgtaatcctagcagtgagattacagatccaaatagatctaattcaatccattatcacaggtttcttcctcatttcctcttctttcatgtatatctgtttttgtatagtggcaattttgattccttactgcattaatgtattcacttctttgtcatagtctacacaaaataattctagaataaaaatactgttgctactaatacaagtccactagagaaaatccaacgtttctttgcaattatctttattccttattgtatgcttcactaagaatatatactccaagattattaaaattattttctatagagttatattattaatttgctatacacttagatttatatatttatagttacgttcagttttagagattaaaatgctctattgcttttatcaattttacatttggaaagtataaaatattcctttgcctcarcattcaaaattatataaagaagaatgctcagggaagtcactctcatccatatccttccaccctattcctacccaccttctggttttccttaccatgtttctgtttacaaaaataaggaaacacacacacaaacccatacctagctacccagtcctctcatctcatttaataaaaagtccatctttccccagtgaattgagacaccagttttttcaaaatatatrtaaattgcctcagtctttcttacacaaaatgtaacattctatctatgtgcttttataggttgcctgttttacttaatataacgtcaatacctcttcatatgggtcatgggaatctttttcattcttttgtacagctgcatattgctccactatatggaggttctgtagttttttcagtcttctgtgaatgagcatttaggttgtttccattattttttattatgcataaggctacaattttttttttaaatgccttcctttacatatgcaaaagttcagtttcaggataaattcctagatttgtttgttttgctaacatcttcatagactttttctttgtttagattttaccattttctaccccccttgcagtgtattacagaatctttattcacacagtctcaccacaaagtgtattgttaagcttgttatttttgccactttgacaggaaatgtgatyaatacattttaacttacctttttcttacctatgcatgaaactaagcctcctttcacatgtttaaggaccatgcatgtatatacatacatatatttctaaaacatatataaatatgtatttatacacacatatatgtcttaataaatatatgtcatatgttttaatatgtcataatatatgtcttaatatacataaatatgtcttagtcactttggacttctataacaaattataaatatgtcttagtcactttgggcttctgtaacaaattaccatagactggtggctgaaataaaaacattacccamagttctggaggctgggtagtccaagggcaaggtgccagcaaatctcatgtctgctgagggcccacttcttggtttgcagttggctgcattctcattgagtcctcacataggggaaagcagagagagggagagttgactctctagtctctttttccaaagacactaatcccattttgagggctccaccctcatggcctaatcacttcccaaagtccctacctccaacgccctatcacgttggggtttaagcgtccatatatgaattttgaagggagacaaacattcacttaatagcacaatgctcatttgcataatttgcactttttttttttcatctggtatttcgtcctttttttctccccttggtttttttgagctctttatatatcaggagaattagctctctatcgtaccctagaggtgcaaaaatgttctcccggtttattttttcccttttgattttgcttttggtgtttttttgttgctgttgttgatgttgtttctgccttgtaagtttttgtttttatttttatctagtcaatttatcaatattttatcttattgcttttggcatttgagtcacagttagtaagtctttattcatgcctagtttataaagaaaattcacctatagcttytttttttttttctagtatgacttcgtgattttccatttagatcttggagcatcttggaggttttttttgtttgtttgtcatgaggtatgaacccaattttatttttctaacttaccgttcttttgtcccaacactatttttttcagaccatcttttgccctatcctggtatctaggtgttccaataacatttatttaaaagtccaattgtatatctctttttatttgcaatccagttgtgccaacaccacttatttaaaagtctatcttttgtactacttatcaaaaagtccaacttttgtctaggtgagttaaaatacttacctttttcatatataatgtttccttccatgtgtacctggatctatttctggaatattttttactatttcattgttcagtgtgtctattaatgcttactgaaatactttaaattcaagttctataagggaaaagtggattcttattctagaataacaaaacaattagaaattggcattttttaccaacycattatatcaaatattactctcaatactattctctgctttccaacaaccacctcccaagaaaaaactatttttccctaagacaatttttgtttgtttcatatattttatgtaggtagagaatgccattttctagttttcaaaactttattttttttactttattttttcaaattcctagaaaatgacaaaatcattactagttaaacaattagcaatatcttgtagatttacccacaaagtcccgaaaataaaaataagaaaaaaaaccttttggttattctgccttataaactttcatttttagaaatccatgccatcatataagttgtttgttctataatttctgagctcattttatgtaaaaataactcctgtgcattattcatgttgacaggccctttaaatagccataaagcctgtgggaacrgattaatgctgcatctgccctgtgctttttaagtctatcatttttatggaatggaaatcttgcataatgtcagaagttttctgacattgtcaactgcttgtggtggcatagggaagtaccttagctgcactatgtgggtgacaatgtcatatttcctgattggatttttatctgaggagggtgagaactgtcagtttcacttcctcttagaaagatattttaagttgaataarttttcctttaagtgacttgtcacaggtggcaactgtctgagcctgtgtattctattctttgtgccagaattttcttaccactgattaccaggcacataatcactcttgccatttatgacctttgggaaatgaaaattaaaatgttattagtccatgtgggtagcagtggaattggtctgatgtaatgtttttaaattgtttttattttttgaaataaatgatttttacatctactaaaaagtaaattacaactattaaaggttatcttattaaaaagtatttccccttctccatttcttctgttcccttcccctgaggcaaggattcatagtactgcagtttcttgttttcgtttcccagaaaacctgtaaatgatgacatgctatcaaatgctatttaaacttagcaatttgttgcagaaattatgccgtgtcagcacaaatacaagtcctcattctttttctagaggttgtagagtattatttcattttatagatgtgccataatttatgtacttagtcatttgttaataggcattttattgtttycggttttttgctgcctcraacaatgctttgatgtgtatatatatgtatatataaaatatcatctttgggcacaatacaggtatattcgaatttcctrttggtgaaattgctaagtccaaatatatgtgcatttttaattatgaaatgcattgccaaatggctcagcgaagagattatataaattaatcaattacacttccaccaacaacaatcaagattacctgtttcttcatactcttgccaacaccatgtttgattgaatttttttgatctttgaaatgttatagatgaaaaattgggagctctttattacttaaatttgaatttcttctactgtgagtggagaggaaacttttcatattgtgttgtttgtatttctaaccatatcctttgcccattttccaatatatagttcttctcactgtttcgtaagatattttgatatattaagagctatcatatactggaaatatgatctccagcttttaattttaatttgaccttgtagaattattgccttccagaattatgttttgtagtcaaatttattagtccctttttaaaaactgtacttccaaacagagcaccgcttggaataactattctaaaataataaagattattttgtgatttcttccagtgtttttatgattttaatttttatggttgtatctttgagctatctggaccttattttatgacagtgacaaaggaatctttattagtcaggattaaagtagtccatgataacaaacaactcccaaatgtcagtggaataacacatcaaaaatacatctcttgctcaaaccatctgctgaaggtctgcaaaaacattccaagatagctatcctcagtgatctagggatgtttctgtcttgagctcaaccatctcagcaagaggccttgcatttgctgtggcaggagaaaacagctagagaatcaaagaggattcctcaatgcctcagcctagaagtgacatgcatcccttctgcttattgaccatgtccaagtcacatggcccagcccaattcaaggaggctgggacatacagattccagtatgcccaggggtgaaaggagaaccagtgattagtgagctcataatgtttaccataatatctattttatgttactctagatggctgccaggtcatctaacattacttattgcataacctatttttttctcattgatttggaatgctatcttggttatacactgaaagcttctgtatctttccattttcccctgagatcattgacttttctatatatttttagactagtaataaaatgttttaattattgtggctttacaatatatattacttggtatagtcctgctttatcaagttttatttacatttatattaattttcatttgaatttcagaatcaatttatattgttctcctaaaaaccatgtgtattttttattggtatttctttaagtgatgagattaatgttataacactttatgtctttagcatactacttttatgcaagcagaaaatatgtcttcatttatattcaggttgtcttttgtattccttagtaatgttttaaggtctttatcatatagatcttacagttaaagttaagcttccgctgagtgttacatcactttgatgttttaagtggagctttyatttacatttctaaccaccttttattaaataaaaggaaactaatttttgacataatattatgtatccatgtacttcaccgaatcttttaaaaaatagtttycaggccgggcgtggtggctcatgtctgtaatcccagcactttgggaggccgaggcaggcggatcacaaggtcgggagatggagaccakcctggctaacatggtgaaatcccgtccctactaaaaatacaaaaaaaaaaaaaaaaattagccaggcgtggtggtgggcgcctgtagtcctagctactcgggaggctgaggcaggagaatggagtgaacctgggaggcggagcttgcagtcagccgagatcgtgccactgcactccagcctgggcaacagagcaagactccatctcaaaaaaataaaaaaaaaatttaaaaaaagttttcatttgatttttttcattttaactcatactctctgtaacaattacagtgtcacctccttatttctaaattttatatctatttttgtctttgaatttaagtttatgtattttgatgacttggtaaaattctcatccctttgcagttgggcaaaaattaatcagtgttgtatatgatatcattttattagattctaaactctttgtgagttagaactatttaattaaataaaaatagttgacatctcttataggaaaatcamtgtgtgaagtcccaaatgatataaaaaaagaaataaaacatagttcttatgctcatgattcttacctttgaaaccctccctcctcagccccacaaagccaggcacagtggctcatgactgtaatcctaaggctttgaggggctgaggatgggaggattacttgagcccaggagttcaaggcttccatgagctatgatcgcaccacagcactcctgtctgggtcaatgaagcaagactgtgtctcaaaaaccaaccaaacaaaaaacaacagggagtgtccaaaggctgtaatacaaggtcaaatgtagtaaatgatgtaattgggaatcrtaagaagtgtttggaaatattagattttaatttgcccagtggtgccgtaggttggaatggagggaatgcaggaagatgggcaaggcttcacagagaaggaagcatttaagtgatatgttgatgttcagaaacaagatagcatgtgagcagggtgtagtgacacgtacctgtagtcccagctacttggaagcctgaagcaggaggatcacttgagcccaggaagttgaggcttcagtgagctctgatagtgccactgcaagacagattgtggattgcagaaatggccattgcattcctcaggggaaaatctatactcatttttaaagcttaatttttttcagcatctagaataggtgcacccatgaacattcagtatcttcaggagactaaccatatgggaatggtttactagtaactcatttgtacttgagtatccattatattggaaactaggaccatttctttctcattaattgagagtcatgatttgtctataatgtcctttatgatgcagaatttatctgatactttgagttaaatcaggcttgctttttggctcataagtatttatgtatagacagaaattgtggcttttatctatttttattaagtaaaattgtgactgattttatagcaattaagatgaatttttctttgcagacaaattttattgaaggaatattgacaatcaactttcattgaaagcartgggttttgtgatttcatggaataaatgctctgttctaagagttaactgacctatgtttttgtttcagggttttggctaaatagctgcacatctgtagcacaaagccatttttcctcagtttcctattgtgtagaaaaaacatttgggatcacaaaattcctaggttccttccattctgaaaatttttacactaattccaactttgccttgaatgtctaatgatttgcatttctctatgtaaagcacatctcctggcaccgaactgaaaatgagattagaaaacacctagtagagaggataaaaggtacaagtcctaagcttattttgcattccccttcttccttttttctcccctgagaagcaggatgtcaagctccttggaaaactaatatttcaaaggaaatatcaatttgcaactgaagtatgggattgaatgatttcattgtctcaaaatgatatggtggtgagggtaacattctataatttaaatattcaaagttttgaaaatgtacagattcttttagtaattcttccccagaaatactagtatttactagtagtattttttaaaagcaagtcttctttgcaagatataatcagtattgaatccataaaacagaatattttggaagtatggctttaacaccatggcataattatagctgattatgaccagagttttgaattcaagtaacattaacacaccacaattattgaagttgtatgtatccagattagcaaaatgagcaatatttttctctcaacccttaattcctacatgttagtcctatttcctctgatattttcaggagtcctctttgctttcagtaggtattcaaatgatgactctttcagttctccatatagaagacagaaattagtcttattctcaagctctaacaaaccttcccaaaacccagtgacataaaacaataaacatttgttattgctaatgagtttgcaggtcagctgagtggttctgggttcatgtatgtgtctgtggtcagctgtgggttgatgaagtggctctgctgatttgggctggggtctctcacatgtttcgaggtcatctggctctagactagtctagagttgtccctactcatctccgcgtgttttgttcagctctcccttaaaatcagcactcttctggtttctccaccctggggatatcctcacagtgaaagcagaacagtaagagacagagtggaaacacacaaggcctcttgaggcctagacttggaacaggcactccatcaattaygccacatgctttcgcccaaagcaagtctcaaggtcaagccagttttcccccgatttagcagtagggaaatagaaggagctacagtcatgttgcaaaaggatgtggatacagggaaggtgaagaattgtggccacttttgcaatcaatctaccccactttccttctgagaagctggttgtttccagtgaaatcaaagccagctgaaacctggacaatcaagtagccaaaaaccttccctgttagacttcagcatattgaatttggcttgtaccaatttacagagccagttgttaaacacagctattaaactacataaacttcaatctaaatacattatattgaaaaaagatgatcatgttaatactgtcacttcctactttttattattatccatgttctcaaagttatttataatcattatatccaaatggtaggaatgctatataatgatgctactgacatctctgcccaaatctgtgctcagtgacaccatgttgatagattgaaattggccatgagagtatttacacaagataaattgacaaacactactaattagggctttttttcttcctttttttttttgatagctgcttgttaacatttaccagcccatcattgcctgtatgtgtgatggaggatttgaaggcccaagtcaagtcattcctgcattttatagcatgagttacagatttactttattgacttttatgtgttctatggctttgatggaagaaggaaaatatgtgsatagagtaattgaagaaacgaaattgcttaaagctacattttaaaatcagtaatgaccatagtgataaaagctgtttctctctttctttagtaaactttactggatgtaatgaaaacaaatttattcaacttactagtgtcagtgtacaagaataaccttaaggaaaaatggaagaacatgcaggtaatgttttaaattacagcttcagtcattaaaatatggcatatgcattcaggcaaaaattgtcttgtgttaagtgttttcaacacataataatttcaagatgaaattattgtgaattgaaaagcaacaaaaggaaagtgaggtycactatcttctatctccttgctaatggaggccagaacttatttagttttgtgagtcagatgagttgaaatttgccttccagtattccaaggcagcaaaaggtcattccatctacataagagcctgtcgagcagagagcccttttcataaagaaaattcattgaagaagcactagaaaatgaatataatgcaaagagtaaggctgttcaaattctattattcagttttaccagtattacagtaaattcccagaaaaaacaagaattatagtgattttatgtgagggatcaacttacctgggctctttctggctttttaaaatccgtttattgggggtattttaatgaattgttagaatgtggtattggacagtgggaacttataatraatatttgagatgtggtgtttcagagtaggaaaaatgagactgctaagtaagtaaagaatcaggattctatttataagcccctgacaatccaaagaagattgttttaactttcagtgtaacttctgaggctacacagcccattgcctcctgatattttaactgttacacataaccaagggaggaaagctagaatgaatcatgtgatactaaaatgagacatgcatagcttaatttaacaaatggataaatttgaaaataaaattttttttaatgtgagcaaataagaaatctttcatacagaatagtcccaagtaacttatgtggttaatgcacccttgataggctggaaaaaaactccccagcctttaaatcacagataacgagtatcttccaaagagtacaatatggaaaaagggaaaaagagtaactttctcagtggagaaacctgacaaacactctgtattagtccattttcacattgctgataaagacacacccaaaacttggaacaaaaagaggtttaattggacttacagttctacatggctggggaggcctcagaattatgcaggaggcaaaaggaacttcttacatggtggcggcaagagaaaaatgaggaagaagcaaaagcggaaacccctgataaactcgtcagatctcttaagacttattcgctatcacgagaatagcatgggaaagacaggcccccatgattcagtgatcttcccttgggtcccttccacaatatgtgggaattctgagagatacaaatcaggttgagatttgggtggggacacagccaaaccaaatcacactccctcagccggtgatcaggtcaacattttcagtattaagtcatgttgctggtttgtaaccttggtgtgatgtaataatgacattatctgctggtcttcttccccagaaccgaaaattccagtctaatcatgagaaaatcatcagacaaatccagattaagggatattttgcaaaayacctgagcaggattccttaaaacagtcaaggttttcaaaaacaaggaaagtctgagaaaactcgtggtataggggaacgtaagaaggcatgatgagtaaatgcaatgtggtatcctaaatgggatcctggaacaaggaaaggacactaggtcaaaactaaggaaatatgaatagaatatggacattagttttttaaaaatatcaatattggttgattgactgtgacaaatatatcatactaatgtaagatattaacaacagcagaaacagtttcccctgttgtagaaggtatagataggagtattctgtctatwctctttgcaacttttctgtaaatctatttatagacatctaaaatagttgctgtagtagggcatggtggtgtgaacctatagtcccagctaatcatgaagctgaggtgggaagattaccgggggccaggagttcaaggctgcagtacatgaggatcacacctgtgaatagccactgcaccactccagcagcctgggcaagaccccttcttaaaaaaaggaaaaaagaaagaaaaggaaagaaagaaagaaaaaggaaaaatgaaataggtactgtaaaactgttctgaattggaagttttttttaaaaaaaaaaatcagattatggcgacataaatattagacatcccttagcaaattctctgatattttaaatcagatgcatgggacatactgtaaatttgtagatagctgaatgcaacacatatttaatacaatgattcttaactctggatagctttacacctttaagcatattagcatttttgtctgagtagctgaaatcacactgtaaaaaaagtcaactgtgttagggtctatttctagctgtgccactgcccagctgtggcatctgaaacaaattacttcatctcacattcggcagcctttctgcccacgccacaaatatagtgctgtgtgttcaggacacttaagaagtcatgtaacagtaataatttttttttattgctaatagctatgtaatcttatcaaggtctatttgaataaagggctctacaatccaaaatatagttgatttactatcaaataaatttaattttcagtattttacatggtattcaacattgtaatttaaacatttcgtttagaaacaagtagcatttctgtgggttagagactgatttggagagaccacatccacattcacttaccatgtgttcccaactaaattagctgaagatgcaaaaacccagtggacataaagtcagggctaagggagagaaagtgtgtattatctaggctttacctgggtaaggaaagggcttttctgtgatggcatgcaactgcctatgacattctttctacaagtagggtcktgatggaattaaagaccataactcgaacttgctatgctacaagccttttctatgggggactatattcccattccacataaacaacattagcaatcaggggtctgcagatattttcttgaatgaaatttgacatctctgaggaccgacaaggatactgctcatatggaatgtatattattwttattattattattattatwgktattattaattttgagatggagtttcgctcttgtggctcaggctgaagtgcaatggcatggtcttggctcactgcaacctctgcctcccaggttcaagtaattctccttcctcagcctcccaactaactgggattacaggcgcccaccaccacgcctggctaatttttgtatttttagtagagatcgggtttcaccatgttggccaggctggtcccaaactcctgacctcaggtgatccacccacctcagcctcccaaagtgctgagattacaggcatgagccactgcacccagctggattgtatattctgttaagagtggggatcaataataggagacaataaacaagcaaataaataatattatttaagaaattgatatgaactatgaagaaaactaaagcagagtcacaggaaagaagatgctgggggatgaggtccccccattgaatctgatttaatacacttttatttgggtggtgcagataatgagttgagtctgaggaaaatgatcataaatccattttcctgatagctaaaaaaaaattagaactaataaaaactgtaattttttataaataaattcacactgtgtatgctttttttctctctgggttggwtcactcaacattatatgcatatattgttgggtgttactgtagattgtccattttctttgctgtgtagagttttattgtatgaatataccaaatgtatttatccattatacaattgacagtcttttgtatagttctcggtttggtgctatgacaaagagtgttgctttcaacatcctaacacatgagtctgacacaaacacctatgggtggaattgctgagtcctagagtgtgcttatattcaatagagcaaagtattttctcaaagtagttgccctaatctacattcctattaagagtacaagagagatcttgttctccacatcctcaccaaaagttgattagtgatccttttattcatttatgtctttctagtgagtgttccatggtaacacctaataaacgatccttttattattaaattaaatttatataatttatttttattgaatttgatgtgcgtattatgcccagttataagtcctgatgcatgaaccacacttgacaygtgagcctctactcataggcccatgcaacctgcttttttttatttttaagttaatttgtaatttttaattgtaatgggttgaatagcagtccccaaaaagatatgtccatgtcctaattctcagaacctatgaatgacaccttatttggaaaaaggctccttgcagatataattaagtatyttgagaggaaaagatcatcctgaattacccaggtgtgtcctaaatccagtgacaagtgtccttgtaagagacatactaggaagatttgacacagacagaggaggaggaggcaatgtgaagatggaggcakaggttagagcaatgccaaggaatgcctggaaccaccagaggctgaaagaggcagggacctgaatctcccgtagcagcgtgacactgatgacactttaattktggacttttgatctccaaaactttgagagtcaatgtctgttcttttaaaccaccaagtatgtggcaatttgttatggcagcctcaggaatctaatacattgaaagagacaatttatcacatcatctaaaactgcaccagtgtgctaaccagcagccaaatttaaaatgtagctggtccacactggatgtactgtaagtgcaaaatacacagtgaattttgaagtcttagtatgaaaaaagggatgcaaaatatatcatgaatacctttgcatgttattaataggttgaaatgataatatattggaaatattgagttaaatacatcttagtgttaaaattaatttcacccatgcctctttacctttttaaaaaatgtgactactggaacattttaaaatatatgtataactcacatattctattagatagtgctacctaaacaagagtgggaacatttagaggtctgtctataagaattacagcctaactgttgtcagtacatcataaattcattcttttagtctttgttcacccaatgaaagagtagacttttattgggcttctgttttcaagttctgttgcacagattggggtataaatatagagatcctkcattccatttgtgtaaactattggggtctatacagagaccccaatagcagaagagcatgtggatctgctacctgacaaacagaggcattttcctgcataaccctttcaaataggagacaatttcctggccgggcacggtggctcactcctgaagtcccagcgctttgggaggccaaggccagtggatcacctgtggtcaggagtttgagaccagcctgaccaacatgatgaaaccccatctctactaaatacaaaaaattagccaggtgtggtggcgcatgcctgtaattccagcttcttgagagactgaggcaggagaatcgcttgagcccaggaggcagaggttgcagtgagctgagattgcaccattgcactccaacctgggcaacaacagcaaagactccgtctcaraaaaaagaaaaaaaaagaagacaatttcctcagtaaagaaattgacgcttataaataataaaattatggatcagcttaccctagttattgcatgtggaggaatacattgtaaggtattattagttattgctacagtaaagctgcataacaaaacccatcaarcacaatagtttacaacaacatgcatttattttattgttcaggtacatatatgctggtgagttatgctgtgtgctggctgagtttggatccagatagccaggatccagttagccaaaaccagtcacatggtctaaccccaaatcagtgggcagagatgtacacaacyccctacttgaccccactgtggggttccagagggtgggactgaggatttgagaacaattatcacatccactacacaagaaaacatcattttcctcttctatctgactgtcatttcaatagcaggttcacattcattgattatctaagatgtgatcaaattatgcagtaagagaagcaggaagtcagagatgagtaactagctaggccctgtcttagaggattttatggtctaatagaggacacaggtccattatttgacctccttgtgcttcctcatccataaagcagatagcactactgcttgctttacatggttatcctgaagattcatatgaagggcaactcatcaagattataagattataaagatatagctgttgtctgtatctgtctatctagttgtccatctagttatttgrtttggccttgatttttaaaaactagctgcagctatattgatatgtgctttggaaataaaacaacatggaggaaacacagcatgttaacgatgcctatatttgggttttggcataatgaagaatttgtttttctttttatatgtttcagtatttcctaaaatttctttcatgatcatctgtgaccaaaaaaaaaaaaaaaccaatatacattttaaaagataatttacccagcgaattggtttaactggggaattctagctccaaaatttgttttatttgctaaagactttgaccaaattgtgtagataattatgcaaacattaatgtttactttgttttcatagctaccaccttggaattttctagaaaatgttttatttttaatatacatttatggatttgatttctaataatttgcattatttttattttaatattacatatgtttaaactataaacaaggaagtcagacatgtttttcttgcctcagccttactgttatttagaattgtcaagtattaatgtttccctttcgttgacaaagatggggtgtgctgccacaggaaacccttgttatatggaggctcttccagstttatttaaattgtgaacatttgtacttaataacacgaacaatgagcagtctggatttttctttttcaagttgtcagtgcaagtaaaggcattttaaaatccgaatctgcttccaccagcagttttgataattaaagtacacaaaatgtatcaaacatttgagataggccaagtattccgttgaatttgttacagatcttgaagtggactcratcactacttgctacttttcagagaacctttccaggtatactagctaggtatgaatatcagaaggctattaccactgtttgaccacaaaggtaaagaacatccaatagacaactaaattctagatctttctttatttgcggtatgggaaattttttaacatattctgaatcttttattttttgcaactttcactgtctcagattagactttaaaactcaagagctagaataattggtctagcaccatctctggtgtcttctatggatgcgttgcctacagtatattctgtcatcatctgtggttttctaaactgaattgcatttaatttcaatcaagcaattcatgctgtatttgaacttcaggcatatctttattttccagaaagcctgtttatcatatggccactcctgacttcctgaaactctaacagattaactgagaagaaaacaagtattatatttctaaggcattttcagctagtggaaaagataaatgactatatgagtcaataaaaaagtataattttcattgaaaggtagattggaagagcactatcaagacmaaaaaaaaagaatctgtttttaatgaaaatgaagagatctgttttctcaatcgtcatactaaaaaatgagtggtgtctgcacatatttttatttgggataataaaattgaacaagattattgctaagccagcatactaaggaaagaggacatataagccatatcaaatttaatgtaattgccccacactatcttctacaagaaacaaaaacaaaaaacaaacaaacaaaaacttggaaataagatttgtgaagtgcacattgtcttgatgacccatggaatttcaaccagctcttttaaaagaagtttacctataagatgccttagacacaccctccctttctgaatcctgtatgaatgcgtaagagaagaaaaaatgccacaaacagcatgggatgttggaaagaattggggaatgtgagaaatagaaaggaaagattaaaacaatcaaaaatcaaagaaatgtaaagtattacttgagaacatttctctgatgtttaatctaatattctatccaaagctttctgcactgctagaaatgttctgtatctgtgttgtctgtatagtagccattagccacatgtagctgtggagcattggaaatgtgacttttgtaactgaggaaatgaatttctagttttatttcattttaagtgtaaatagccacatgtggctagtggctgccttatgggaaagcacatgttcacagctctacctctcaaagtatgtttgggagtttattagaaatatagcatcttggctcccacccagacctactgactcagaatatgcattttaacaagatctccaggcaagtggtttgctcctgaaagttccagaggccctgccctagagcaatgttcacttgctaattaaccacccattcagaaacactgagaattctttattgttatcatgggtgagtgaatattagcagtgtgttcattttatccacagaggagtccttgatgcaatagggtgagtcataatagtgcttgaactgcttactttaaatcttttcccaaatgtgaacaaaacttaccctgctgattgatctgttgattttcccattcatgaaacaaacagagtccttacatggcaggtggaagggcattaaggtttactcagcatctctagttgcagctggatrtgtaccttatttctctgtagtaaaagaagtcttgacacctgaattaaaaaattatcattaaaaagtttaaaggaaggaaacattataagtgttcgaactagaaaatgatgttgacaatttattgcatttggcccctttccataggtcttaatttggaatcctgcaaaagctgactctgagaaaagcacttgtatacaggtggattatttgaaagtgatcccaggtaccatagtgagtggagtagggggagtgaagcagagaaaggagaaaggtcattaaagtgtacttggatgagtgggccactgatacgaacaactggggttcaacccctcttggggccatctgagaggctgggcatgtaagggaggaagacatcagcatgtgtgggaactgtgcacctaagctgcaggagtcaccttagatggtggacrtggtgtaggacaccaacagggtcttgtacaccataataggaattgcttatgtaatgggatcctacccttcatgtggggcagaaaaatatcaatgtctgctggggaatgaaaaccaagatccagggcaacaccatgaatctggtaaaagtctgctagtggtcagtttgccttaggtaggttgttgctcttggccacagggtgtaaaggaggctttggacttagtgatcccagaggttattccctgctctcatgccagtattcttctgcagctttcctcatcaatgtttatatatttctttcttttttctgaaacttgctctttcactctgtctctcccctagggaacactaaaaatagcctgtaggttraggaatctccaaaacacaggtgtgatttgtttgaaattctgtttgactcatgtgtgttgagttacttctaaattcaaggtattgtgactacttgaatgatattttttagaaacaaaataatgagaaaacttggtctgacaagggagatttttctgatctttgtatgcatttatttatgattatctgaagcgtgatgtaaaataacttatgtatatacatagcacagtgagttctggatggagagaagactaattatttatagaaaaagtctttttaatgtaaaaatattacattgaattagatttagttacatatgatcaaattgtcatttctaaataaaacaaaattctgaaggctgtccttgaaaatcaaagagatgtgtcacactagctgcggggggtgcaaaggtatgctcactaacattaagtaatttactgtccctttggaaggtaatatatattcccctaaacaggaaaagtaagtttrcaagggagcatggtttatgtacagtcacaggagtagggcttgtaaaagattctgtagatattgaggaggaggtatgtgtgagacagagcatgggatttaacatgtatagtaatgacctgcttggagatggaaggatttgagccaagttttgaaatgtgagggttttgtttagagactctttcaggaaaatgaagcaaacagagctgagcatcatcctggtagcctgactgaagagtacttggcaaattagagaagatatagttgcaaatggcagggaagaatgtgaatgctacgcatagtgcttttgggaaatagtccttgatggtgtctcttttacagttgaagagacagaatacacacacacacacacacacacacacacacacacacacacagagtcgcttcagctgtaaacacatatatatgtagttttaaatacatatatgtgtatacacacacacacacacacacacacaymyatatatatatatatatatwttttttttttttttttttttttttttttgagatggagtctcactctgtcgcccaggctggagtgcagtggcgcaatctcggctcaccacaagctccgcctcccaggttcacgccattcttctgcttcagcctcctgagtagctgggactacaggcgcccaccaccatgcccagctaattttttgtatttttagtggagacagggtttcaccatgatacacttatatattttttgtctctggtgtgtgtatatattatgtatacacacacatatataacatacgcacccacatttataacacacacatatatatgtatataacaaatcaaatttgatcttagcactaggactctgttgtaccaataattcagggttttttttttttagttctaggtaaaaacagtgtcattgatttactatcagtgaattcatgcaaattcatatatttgcattggtcgrgtgccttgtactacaactacaatgttgaatagaacatgttctctcttttaggggagctcaagatacaggcaaacaaatgactacacttcagagccatgtcataataaaagtgcccatgaaatgatatacaatctaattctaatcagattctccaattgacttgctattttattcctgttctcaatggactcccatgtactttgtaaggagacagaatgtctgagcagagaatctttagagagaaaatcgtcaaataccatcttggataccaaatgtccatcttgtacttgtgaataataattcagtctagcaggatgtcctcttgcaaactgaaatgagcctacagtcccatctgtgggaaaacaagaggactcctaagtgttacacacaggatgttgctgatcttgggtcacctggctagcacagggcagctgtctgcagtcctttacctctggctggatttcctccttcaacttctaaaagtccaaggcttgaggacagttccctggtgaagatcaccagcatcttctgtgggccaactgaattgctgaggtgggaagtagtaaaagtcagagttagggtctagtttgtcctccctctctctcattttgtgtccagctttctttcccaactgccaaccttgatttacagttcagttaagtcccaaaagtagatgcaacagcaacaatcttcagtggacttcaacagttccctcagttttgtaagagtgaattgctctgaaaatccccgattctgtgtcactctaagtggctctgcctccctgatcatgtgtcagctgcattcaatcctagcaccagcccaaccttcaggccacctccaccatcactcactgggcgatgtgttctgtgcttgaatatcttcagaacatgcagatttgtcctaaacaggcctaggaaatgaatatacaattatacataaatttttattttatcgaaatttgttgtgagtaaaatggcagtcccttatctactgatggagtaccttctaaaagctttccttcttattctttatcaaattattcatttaatataaattacttatatatttttatgtattttatgtattttttcagagatgatcatttgggttttgaaaaattatattgtaataaaaaatcaaaatatttacatttatatgaggataattcctttgtccatgaatttatggacttatttaatggtagtctaattttcttaaagcactaaactctagaggcatgggttggctgaaacacacagatgactttgttgactctaacccaactatcctagagtaagattggttctactgggtgaaatgatccctcttctccaatgcttctgataccccatttcattgtctgcctacacagaggggagagggcaacagctgaggtttcttacagtcycaagagaaccatttttaaaactcagtctatataaaatatttcctggatgttttcaccaaagctcattaatgtaattttcacatcattattgcagctaatgatcatgtaagcgttcctgatcatgtggaaaattaaagatgttaaattaaaatattgacactgatgttagtaagtaatgattgtttataagatgtctggatttaaaagctttgtttacttaatttgttaaaaatggaagtttacttgtctttggtgtagaaaattaaacatgtgactctgaactttgtagagtgcttaacagcttttataatacttttataggggatttacatttgttatgggaatagtctttttactgactctgcttatattttcagaaatgtgtctttagccactagccgaggacagaccaataaacagcatccaaaaatgttaatgattatakatggttccagaayttacaatggtttgtgttaygattttttttaattttacmgtggctggaaagtgawacacattcaataaaaactgtatttcaaatacccatacaatgattctacttttcactttcagcacagtattcaataagttgcgagagatattcacatttcactataaaataggctttgtgttagataattctccccaactgtaggctaatgtaagtgttctgagcatgtttaaggtgggccagactaagatacgatgctcagaagattaggtwtaataaatgcattttgatttataatattttcaacttacaatgggtttatcggaacatagccccaacataagtagagaagcatttttattatagtgattttacatggaggcaatggcaggaaatggaaccagctgttcaaaagcatactttgtttgtaacttaaatgtttatacatccaatcttcttayaaagtttgaatttttttaarmtaactatactagacttaatgttgtggtrggtttgtgactgtccttgattttagtcctcaaatatctatagcagcagcagtttgtatctgaaattattacaaggggatttgcctattagaaatatgcctaagttccattattcawtaaggtcacagcagcaattctgattaatggagctgattcttgatagctgtgaggatacttccaatacatattataacttttacaacagagaaagcccttaatttccttacctgtaaaatctgagtaataattcctgccctatgaattgtaatgaaaatgagagaagctcccaaaatgatctagatgagacaatcaggtggagataagaccaagatgctaggaagtcagctagccactttctcacatctagcaaactgctcctacctactatccttgcaagaggcagaactcagatttgtcatttttaaatattcartgaaccactgggcttattcaggattatttgaaactataaatacatatattttttaaaattcttggattcaaggggtacgtgtacaggtttgttacatggatgtgttgcatgatggtgacgtttaggtttctaataatcccatggcccagatagtgaacacagagcccaatagataatttgcctaccttaactccccaccctcttttggaatccccagtatttactgttgccatctttgtgttcatctttacccaatgtttagctcccactcataagagagaacacgtagtgtttagttttctgtgaaaccataaatattaaatgtaagagtaacaagagtctactgaatagctacagcagcattccttaatgttatctttttgaataaatacaattttgaaagcttcagccctgcacatcaggtcaatgcacttaagtagctaaacaagaatgtcataatttggtgcaagactgcacttcaggtattccaagtatatctgtgagagtagcagaaaggtccaaatcagaagagaaaatttgccatcttcattcagaatttcttaatcttactggaagtacataaaatctgtttttgttttaaataccctgatggaatagaccaatttggcagtctgaaaaagaactaaaaaagcccagctgtccaacaaagtcatgtctctaggaagagacacactgagggaaggatgtaactgagagaaataagacataggcytcagatttcctagttgggccaatgagaagagtgaacagcatcattatgtggagaaagtgaattatagaacctgatcgttatttgtgagctcattgatgtaatgaatttgcttacacagtttatatgtgacaaagttttgtatgtacccacttctccttgtccttaggcaataaattgccaagagtgtacagacttggccttcttgccgagaaaatttgtggaaactgccttttcagaaagaagcaaaaattagtacaaaacattgggactattttttttgttttgccttgtttaatttctttttttaagacagtcaaacccctkagggtgcacccttggaataacagaagtttaggataggaaagagtctctatggtcagcttgccctattgaaggagcacccaagaccatcagatggtctgcagagaaagtgtttatgatgtaatatcaatacatttgtgaaacctcatatgtcataatgctctcttgaagagtgacaattcatattatcatgttaaagactttaagtcctacattaaagaaaacactttaagtttaacccagtggttcccaaacttttttggccaaagatccctttaatccctaaaacctttgcatacttgtaaatgtttatttaatccaagcctgaatttgtctttagtaacttcctgcttaacatatggtccttagacgaacggcatcagcatcaccaagggcttattagaaatgccagttctcaggtccagtcttatatctatcaaatcagaatctgcattttaacaagattctcaggtaaaatgaatatgcatgctgaagtttgagaagcacaggctcagtattccttctgactcaccatcttcacttcgttgaagttaaagacctgctgaggaaatgtcttatgcacagcatttaagcaatattacaactacaggcaagttgtacctgcaaatagtatttgcacatgctgcctctctagtttctgtgatgctgggagatgtctttcagaggcctgagtgagtctttacaacctgctcaatttgttttgtgaattatgagtgatgaaattctagattacaaattgcagacaaagaagtctgtgccttttcccaggcatagcgtcagctggtgaagtttatagagccrgatgtatttagtagaaatcagagcgtgactaacacttcaagaagaagatttgcagatgcacaaaaaagagcagagaagtccagaattgcagcttggctttcaaatatgattattggttttttctgacaggtgaaacatttataaggaatcaaaatgctactcattatgcaaaatgcctgcagaaatatctctatcagaagcaactaaaacgtatacagttgacccagacggagaacaagggccccttctcaggtattagaaatggtctatatattgataggggttacatgggtctatgcatctgtcaaactcagcaaattatttaaggtctgtatgtgatttcactgtctatgaattatacctcaataaaaacgtataacgtttatcttatgaaatttgagtgcagctgatattagatacagcaatgtgggctgtcaagaatactttaatggagatgtgcatttggaaataaatgcccttcacctggtatatggagatatttttatgggagggaatagccattgagtaggctgggttccagtgacttcatggtcatgccagtcagcgttaccagcaatccagatggcagagggggctgtagcatagactctgaattattgattctgggttcaaatctgagcctagttcccagtgacccagcacatgtgatttgacctttctgtgccttagyttccctatttataaatggcaatgataaaaatatttccttcacaggaacgtttggaagaccaaatgatttaatatttgtgaagaacttagtatagttctggcacasagcaaacactatatacatatttatcagataaacaaagtgactccaataagctagctgcaaccaccgcaactgtcatctacaacttaaccagttttatttttttacagcacttatccytctttaagatgatcttattttgaataatttatttgcatgtcattgtcagttgcccacccacctacttcataagccccaagacataagggactgatctgttttgttcttccctgtactcctagaacagtgcctgacacacaatagatcataacacactgaatgaatgaataaaggaatgatgtttaaagcaaaacaggttcttaaagaagtgagtcctatgatattaatgttccaccaaaatcatttccttaattactggttaaattgttatgtgcctatcctgtgtgctgagtggtacgtaaacagcttactggggatgaggtatctggattgatatgaccaaggaaatttcttgagtgagaaggagccaataattggaaaacccctgattacctaatgcttgtagcatgtcccaggatctgaagaattttttatatatcaataktttgaataaaattcgtatttgtcctcagagagacaaaaacttctgcttttaagaatactcagaagctaaactaagacattcattataccatctaattgtgctagattgacattttttccttcaggataataaatcaagtaagattaagcaatttatactatgactgggaggaaactcaaattaacaacagactagttctgccccttaaatttggcagatgctctatttccattaatctctgcacctggcttcaaatttcatgaggcagggtcctaatcacactcatctatgcatcgctcagagcttcctagagtgtcttgtatttaatacacacaataaatagatgagcaagctaaatgaattgaatttgaaagtgtaaatacatgcacaagagcttgagaccaaggatttaaagtaaggctttgtgttttaccaagactgccctctggaagaacagaggggtcacccacacaatctggaaattaggctcactccttccattttacaattccttattggccttggtaggcctacaggttattctcaaaaacctgacacacacacagaaacactcccacacccctcctcccccaccacacacagtgtagtgatggatttacttcaaggaccatgagttacgagataagccacacagagcagagcaagagtgtacaatactgaaaaatatgttgtggtgaagattcatgtttgagtcataggacgggaatccagatgtttatttttaggggtctcagataacatatctttacatttgaaaggcaacagggtatttgtttggttacactataagyatgtattattttgttgagactaaattacttttttttatttctatgatgcagcactcttttagtatggagaggctcatttggcaattccctcacctttttagtagaaatgaattttgatacaagaccaaatgagtgtctctttcttttcactaactcccatgacctgcattctgagttgttgttgttttttaacttgagatacatgagtcctctgtgctgcattctgtcatccccaatatcatttctacagaatgaattgagcaaagatggcctagcattcgtatttagcaagcaaatactatgtgtttagcaagtcttccaccaaaatacttagaaagatcatgttaacagtagagggtggtgactgcaagttgtccaggttcttggcgttttgcacaaagaattggacaaaacgtctagcagagcaaagaaagaatgaaggaacaaagaaggaaagcagggatttattgaaaacaaaagtacactccacagtgtgggaatggactcgagccacaagcagcagctcaggggcccaaatacagaatcttcttgggttcaaataccccctagaagtttcccattggccacttcgtgctcacctcatgtaactgaagcagtagcctgcaatcggtctgattggttgcagaaaacagccaaccagaggctgaagtgragttacaaaggtcacactcccrtgcaaacatctgattggttgctttttgcaaccaatgacctgcattctgaggtgttttttttttttttttaacttaagatacatgaatcctctgggctgcgttctgtccttggctgctttttgcaaccaatcagaggctagggtgaagttacaaagttgccaaggaagactggacctgcaatcagtctgatttattgcagacagccaacttcccatctgccgcatagaaaaggtcaacttaggcgtggaaagttagggttttcctttcaatttagttcyaggaaattggcatgaaacastcttaggttccctgcctccaggccctattctcctgcctcaatcatgttatctatggcagtgcttctaaaactataaagtgcatccacatccctgkatgtgccagtgtggattcaccaggtctagggggcacctgagattctgtatctcaaactgggccctgggtgttgctatagaccacactctgagtagcaaagttctaaagggaaatatatttatcacccttccacaaacggattctatttaaaaaaagaaaaaagaaagaaaagaaaaaaatcatgttatcttccttaaaacatagtttcatattctttgcctctaaattaggtgactgtaaactccctaggcaatgaggagattcccagctatggtggtctaagtgcaaaacaattttttccacaccatcagcagcaatgtccacgctcattaaggctgtatttctggattttcctttgcaatgggcttccatgttagatcttcactacatccaatttcagaaaaaaaaaaaagttttgagaaaagttctccatgtgagagcacttctgtgctgtttttgaaacttccttctcatttttctggtatcttccagcaggcaatggggaaacctgcttaagctcacccctctttcactttgagctttatggtgacacttttctggcacatatgtcagcagagcccactttttagctgagttgaaaggaacatgggaagcactgcttcatttctgcctggaaaagccagggacacgatgaaatgtgattttgtttcctgaaacgtggaaggatggttggcgaaaaatgaaacatagcacagccatcgctcttcactaagggccaactccttgagaaatgtgctactttaactctcagtagtttctggacaaggcctaaaatcaatcataatcctaaaagaaraaaaagttctatttcttttccagtggtatttcagagaataggaactctgttacaatttgatttgcactctgttcgcagaaaaccgaccacgcgcactggttttgcttattggtatgtttggatacacacgtgcgtgcacctgctcagaccacaaaattgaagctcagaatggaaaacagaggtttccattgaggtttcagctaaaataaatttaaatttaagcctttctttgccagtttgtgcttcaaaacttcagaaagtgaggagatgcaggtcaaagggcacagagcagcagatatgtaggatgagcaagtctagaaatctcatttacaacatgaggactgtagttagtaaaactgtatggtattggggttctttgttaaataagtaggttttagctgctcttgtcacagactcacaaagtaaccatgtgagatgatagatatgttaatttgctttaaagtagcaatgattttactgtctgtgtatctcataacatcgtgtcrtaaacctcaaatatatacaataaaatatatttaaaaatacatataggctgagtttttcaggacatagaaaagaaatatgaactggatgagaatgagaaactcacataaaatggaagaagattaccattattattattactttgagacagagtctcgttgtgtcacccaggctggagtgcagtgtcgtgatctcagctcactgcagcctcctgagctcaagggattctctgacctcagcctctcaagtaactgggattacagrcacctgctaccacatctgggtaatcttgtatttttggtagagatggggtttcaccatgttggacgggctggtctcgaactgctgacctcaggtgatctgcccgtctcagcctcccaaagtgctgagattacacgcatgagccactgtgcccagccagaaaaagattattatatcaagatggttttataataatgaagaatagaaatctggacatactcagatttgtagcatagactgatggacagtcctgtttgctctcccaagcagaaaatctaaaaggaaacctggcttctaagggtttggagattcaaaccttgaattctgattctctaattacaagtggacttcagtgagttaaaaatacagacatcagctggaacttgaatggagggtaggggctttgctgggagttgcctggtgagggaaatattttaaaaagactttgagtaaaactgttgtaagaccaacaggttcgtatgcccatttgcacagtaacaaaycatttgcagcagagaaagagtttaatcattgcaagtgcagatcagggagataagaggaaaccctcaaatccatctccctgaaggagttctgggctgggatttttaaagggattatgaagagtgaggggctggaaatttgggattcttgattggttggagtaaggaggatraaatcatcaggttttggaaaatgaattatttggtaagtcagcttctcttggagccctatagaccagctggcgtcagtagttttactggtatgcaggacctgaaagaatatcttaaaggaaaaactgaatgtttcataatgttcaagttgttatctgtacagcagttgagggraactatatcttgtgtaacagggtctatgtgattctagaacaatacacaaacatctatgaggaagcaggtcagaggaagctgacctaataatttgtgctgaatgtgtggcaagtttggtttattttcttcccccacaaccttcttccctgattaattttataaagtttatagggatggtttcaaaacaaaggaaaacagatacaaccaggttgggtccaaatgattcaggacattctcagcaacaacagcccccatgacttgagtctctctaataaaaaaagaaaagaaaaaatctgaggacaactgtaagggtagtcagggttttcattttttttttttctgtgacagagtctcactctgttgcccaggctggaatccagtggtgcaatctcggctcactgcaacctctgtctcccgggttcaagcgattcycctgcctcagcctctcgagtagctgggactacaggtgtgtgccaccacactcagctaatttttgaatttttagtagagatgtggttttgccatgttggccaggctggtctccaactcctgacctcaggtgatccacccaccttggcctcccaaagtgttgggattataggcatgagccaccatgcccagccaactgtaagggtttttatagatgtgtttacataaaagaaaatagcacagggaaaaagtgtgcagtgtcaataaatgggacaggattattcactcctggtttgtattccccatcccaagagaacgacsatttcactgcaaaggcattttaagagccatgtagaggaattgtggccgattgaataggaagttctacctggttcaaatgagytcacatctctcggggaagctggtgactgtggacccaggtagtccaggtcatctttgagaaatgatggagaacgtagtgtcagaggtgaggggattctgtggcctccatctagcattctgcttggcatctcctacaaaaacttctcagaaatatgagaaatacaggggaaaatgtttgaatgctatcccatggcagttaatatggaatctgttgtggtttgtggattagttgtgtgattcaggtgccattggaggtttctggaagagaagggccttttaaaagcctctgagaggccagtattatccccagaaagaatgagaggaggtttatkgtatgcacgcaagcaatatctatgaatccctttacttgcttgtatcttaccctcttctgccctaggaacaggctcgtgggagaagtgacccaactacaccttcctgccagtctcgagcattttaggtgttaaccaccaaagtggctgacacatgtacttactcacttggttttaatttgcagagtaggaacaatggacttagatttttttaaacttctctaactctttaatcactgaatgaaataactcatgttggaaagacaaagaatttcctggtagaccttttgaacaagagctcatagatttcagtgccattggtagccaatgtgataccatggcattgttgtctattgtgttttttaggttgtgacctatttgtgggttatgaattcaattttgtggattgggacctgcaatttaaaaaaaagatgaaggaaatagaacataatagagtcaagcgccatgcaatacaaaatgtcagaggtatcccaactaacaagggtgaatgatggtttgtaaaacttcagttacgtatgtatacgtgcatgtatgagtgttctgagtgataatataaaatgcattttttactgaggagcatgatcagaacaatatcaaaccattgaccaacatcaacatatttctattagraagatatttaaatgaagtttgtatagtaaaaggaagaaagaacactaaaatatttgcaaatctaccctgcacagtcactttaatcttttcagcttctaattgagatagatgctctatattaccctgtttattaataaaccctcaaagatctaaaaaggtgaattaactctcaggggctttaacagataaattaacttgaacctgcctagttgtctgtttcagagccagaattcgaacatggattcattttagccgcagtaagcacctgtgttagtcagaattcagkgtgggtaacagaagggcaggccagattggagagagctggaaacatattccaggtagagacaatggtgcctgatgaagcctragggtctgaatgctggagtaaagccaggggttatttacactgtgactgggtgtgaatctacagatagatctgaaactagaagataagcccatgaaggaaatgggaaaatgtgccctgattttgagttacattagcaaaaaaaatcaaagctgagtccaagatggaagaacatctacataattagagaggacagaagtgatcacgaagacctaggggacagggagaggcctcaggtaatgcaaaatctgtacataatgattgaggtcaggagaacagatgctcttcccgggtcagttttaaggctgaaatgtttcaggaaaactgggaacaaagcatggttggaaatagcaggctaagctgatgcatcaggagactgcagatctcagtgttaccttgcctgggaacaggatgggccccaagtatggctgagaatgcaagtctcatgggtatatgtttaatgaacctagttgggagatgttaggaggaagactggttctgatgtgaaagtttccttccaaagaataggccaacctaactgcagcagtgctgattatgatggaaatttcctattttgattcttcatcaaaagaaagaagagccggtaccatggttcttgcctgtaatcccagcactttgggaggccaaggtgggaggatcacttgaggccaggagtttgataccagcccctataggaaacataacaagaccccatctctactaaaaattaaaaaattagcctggcatggtggctatgtgtctttagtcctagctactcaggaggctgaggcaggaggctctcttgagcccagaagtaggagacagcagtgagctatgatcacaccacttgcgctctagcctgggtgacagagcaagaccatgtctcaaaaaaaagaagaaaaaggagaaattaaaaagtttttccttatggtttatctttagtagtttgacgtattaaagaggtttatattttattattatatatgcattaatatataatcagatattaattaaatatgtattagtatattatacattaacaaacttacattgtcatcttcttcaactaattctaagcctcaaacgaagtgtaaaagaaaactgaagcatcaaaaaattagtcagcttcaggcactatcccaaatgttgaagttttccatgtaaataaataaaacctctaaaattaacaagaggctattttcactgttgcctgttggacacaagccttaattatgacagtgatctgaatagccaagttacactgtaaggctgtttccctgaatggaaacaccaaccttttttgcttttttgaaaaagaagcagaaacagaagcagaaggagagggagagggaaaagaattctttcggacaaaatgtatcaaatgtttgacttcactccagaggcaatttttaaataccaaaaattgtttcacatctattcccaataaggtttgccaccaaaggagtttgctctaaatttgtgactggatgtttggttttcagaggtttcaggatttcagaatcatggtaagggattrtagacatgtatttggtatgtgcaatattgggggacttgaatattaagtctgattgggaacatctctgggtttctgtatgtgtacacattctacacaatagtgtaaagttttctagaaaatttagtgtcagcaaaaattacgctggggtctgagtttttatgtgagaatcttataaagatcaaaatattagctaaaatttaaaatttgagttgaaagggcttgaatgctgtattagtctgcttgggctgccataataaaatgctgtagattaggtggcttaaacaacaaacatttcagtttggaaggctgggaagtccactatctgggtgctggcaaggtaggtttcagaacattccttcttttggcttgtcggcaaccaccatgtcactgtgtgctcagatgacctcttctttgtatgtggtggtgggggtgggagctgggaggtctctctaatatctctgttgtgggatttttccttagttcagctgaagacaggggtccttatcacatggccacgaaaaatctggcttgcagacaatctgaagcgtgaggagggccgggtttattgggtgaaagagggaaacagggacgctccgcaaggccagaatccctgctacagcgcttcctgcctgaagattgratcccaggttccacccaggaataggaggggccaggcttcccccgctgcaaacagcaccaactcccgtggctccatgccagtgcgcaatcctcccagtgtgcaggctggttggagtttttccaaggacctcttcccacctggctgtctcatctcattttgtaaggacataaatccaatcctatcctatcctattctatccgagccccacccttatgaccttatttaaccttaattacttctttctagaccctatctccaactactactgctttaacatgtgaatctgggagtgggggagaaaattctatccttagcagatgctaaaactcaggacttgaaactgctttaccaaatgattatgtgctgtggtctgaagcagtattattttttaacccagtgtttttcattcccatgtttttttcttttctaagaaattattttcttcaggatcaaagcgacagaaacttagaagtggcatttgaagttgccaacattaaacctttgatcagtccggcctagtcaccagccaaacaaggaggagagagattgttgctcatccatctaaattcacagctcaaaggtgcagaaatccagctggagtagaaaacatttcctgtactgagttaaatttaactgaactccatgcctggatgatttctgccagtggcgcccgtgggattgtgtgaccccctctggctttgctatctgcaggtttcttgatcacacgtggtatccatttatcagtcctggctggagccagtttcccagagcaaacagatkcaggatgatccgcactatcagcagaggttcaccaaagttctaattagaccaggaaggtttattaatacaattagctttagggaggacagttacaacaggaagcaaattccttgcagcatccggtcctctcttagccatgttagttgattaagaggaaagcctcagacttcaaaatcaagagcaaaattgaaaatgtctgggaatttaactttccagtaactgtaaagttttaaccgtgaactttctattaactgtaaagtataatttaactttctaataactgtagaacaagaaaggattctagaaaaatcttgggaaaaattattaatgaggggcctgagggcttaagtttggggagartgggcttsttttgatttgcaatgtggaagctgcttttgctcatgctttctgaagrtcttccataaagaggggaactgcgaattgcaaagtaaagcccctgctgwggagtgaatttgcttatgtcacactctatctgagtgacccttaggaagttccctaatctcccatgcctgttttctgggttgtaaatgcaagtaataaaagtaactgcctcataggtttgttgcaagtattaaataagaaaatttataacggacataaaagggagttggcatagagttaatgttcagtaaatgacgagtgtatccttctcctcttcctcctcctcctcctcatcctcctcctcctcctcctcatggacaattggtttcatccatctgataatgaaacactgtgaattgcccccaggagtgctttaaatgatgtctacttgtacatagatgctcaaaatttttgaattctatcagtatgacatctagaagagtcatgggtagcaccaagggataagctctttctctggaagaatagtacatttctttctattaaaaaaacatgaattagtcaacccattatgtgtttgtttttgcccttattaccagaaaactacaagatgattttcaatcacagtgaggattagtttctgtgactaacatgtttctttctttctcattcttatgagtttgatttcccattcttaagcaaaaaagcacaataggtgtgattgtgtgtaccatttttttgaatgaggcaggaagatagttgacagttggttaattcatgtattcattctagttagttttgtgtctgcacttccttctggaatttaaacatttttgaanatacggtctctgttctattttttatttttcattcctataaagttttattgaatgcctatatgtgtccaacataccagatcctaaggtatgtttcacataagtcagattggtctctgtccttaatggtgttatcatatagcagaggacaaaatcataaaataataataatatatgaaagatatgtaagcatgtaaggtcaagagggtggaaatttcttctgtcttattcactgctttattgctactcctaagggagtgcctaaaacagattagatgtccaattagtatttattctatcaattactgtcccaggcattttacacatattagaaatatgagaactaatgtttattgagcaattcatatctgtataccaaacattctactggtatttcaacaccgtgaactagaaacaattmctaaggttatgaaataggagttaacactgaagtctagagaggttatgcaatttgcttatggtcacacagctaataagagctagatagaggtctcctctagagctcatgmgcttaaccagtacctccatccatgacactgtcttaccctaatactggaggagttgaggaataggcttccccacatcgtggataataaagctaaaattttctaaggcagggcctggttaatggagggcacatgcaagctgacactctcaggactccaaagtgtacacacttttcactataccacacagcctctcatgcacgtagacaatcacacacatacaaacwttctaacaaaagtttgtaggaattgtgctgggaccatgctgtatagctgtagtccatggtgtataacatgcctgcagtagaatatctattgaaatgaatagagctacaaggttaatccattggagaaggaatttggtgtgatacttacaagctccccagtggcatgaatgtgtcactcttcacaacactgcctagttcttgtgtagatacactataagcattaagacaatttatccttactgtacaagactatggagtgtagatgtggtagacctaattctgagatggccttcagaatcccatccgttggtgtccatgccctgcccattaagtgtgggcaaaacctaaggtttgcttctacccrgtagaatatgacaaaggtgaagggattttgcagctataattaaagtgtcatgtcagttgattttgagtaaatcaaaagggagattatcctgggtgagcctgacttaattaggtgaaagcccttaaaaaaggaactgggcccttctggaggcaatagactgttcttgaagacttgctgaagttagtggctcttttggagaagcctacatatcaaggaaatatgacarcctccggaactgcaagcagcctctggtatccaaggccccaacaaaaagccagagccctcagtcacagagctcaagaaattgaattctaccgtcaacctgaatgagcttggaagtggattattccccaatcaagcctccagactttaacccaatctggctgatcccttagttacagtcttatgagacattgacaggagagtgggtttagacgttaatatcccatttccgttaccagatatactgcaaagacagagatcattttttcaaggaagttgtgactaagcaccatttgaaatatcactattgtggttttgactgaccccagatgaaaagatgaactctcctaagatttcaggcatctttaaggatagattgtaatgatgccaggtgattcctagatgagatacactaaaattcctctccacacaaggaaaataacagtgtgttctctacttctcttggaagttccatcattaaggatattgaatatgaccaggcacagtggctcacgcctgtaatcccagcactttgggaggctgaggcaggtggatcagttgaggccaggagttcgagaccagcctggccatgacgaaacctgtctctactaaaaacacaaaaaagttagccaggcatggttaattagccctgctacttgagaggctgaggcacaagaatcaagaatcactttaacctggaaggcagaggttgcactgagatcgcgccacygaactccagtctgggtgacagagtgagaccctgtcaaaaaaaaaaaaaaaaagaatattgarcatatgtttacataaattaattattttgagcaatgactatttctgcttcagaaaatctggacttcttaagttgtgttcaagaaaaaaaaaacaagacaacaaacacttcaggtttatccttttatgttgtgactatgtgggaagagattgttaatttaaaaaatctgttaacaccaaactctcttttttctcttttcctcttttttttctctcttctctgtctctcctcattttataggttttggtgtctatttattttttctccatgtattgccaccctttgctctaggcttacatacttttaactacaaatccaggaaggatccctgattccacctgttccagtgaaaaccctgatgtagctttcattagaccaacatagaatatgtgccaacacttgacctagccaccgtagccatggaattttatttatttatttatttattattttctgaaacagagtctcactctgttgcccaggctggagtgcaggggtaygatctttgctcactgcaacctccacctcccggtttcaagtgattctcctgcttcagcctcccaagtagctgagatcacaggcgtgtgccaccacacccagctaatttttgtatttttagtagagatgagctttcaccatattggccaggctggtctcaaactcctaacctcaagtgatccacccaccttggcctcctaaagtgccgggattacaggcatgagccaccgagcctggtccgtaaccatggattttaatgatctgttcagccaggcctggaatgcacgccttcccctgtagccaggagtaaaataagcctatcagaaccatgcaggctggagttacattttcaaagaggaaaatggataaaaacgttccattactgagacaacctcagatattttcctcagagtggaaatcaggaaaccaacttagagtcatctcaagattagagggaatttgggctagaaggagaatattctaaagctactatttactaaaatattacctaatagtacaggaatagacaactgtatcaatggagtagaagagattagaaagtgttcaaacaagcataactcatttagaatggatgcatgaaatgctatttcattgtagcactattgttttagaaatggttttattaaactatacacaaatatatgaacacaaatccattacagtactgagtagtggaatcactatttctcaaataactagtcatccagtacagtagactgacatcttactgtttttaccatctatttgttctctctggtatggtgtttatttctaccattatttgtacttatatgaacatttttgggctgagatggctatcaaaaatgtgcaccagagtggcaaagaaaaattccctattcaatataaaaataccacttttactggggctctgggaaccttcaagacagtgagcaaggaagtattaggtaaaattaccaattatgtagctaattagatatgaggggaaatccttgaaaacttagtaggccacatacatatcactgcagcctctaaagattgacaagtagagggaaataaattgccaataaatgatactgagaatatatgtccaaacagactatgccattataaggtaatcactccctgaaacataaaaaaagtctattttatgaattttatatacttatagtttattttattatttgtagaacttttaaaatttatatcttcatatatgartttcatttttattttgtgtgttctatcttatatatttgtagataatttcataaatgtttatttttgctagttaagcatctgatataaatgacatttccaattaatagtgaaatggtgtttccaggaaagatattggaacaatgaatatccgtatataaaagtaattttggcaacctacttcacaccatataagcaaataatttccatattatatacatacctaaatattgagggaaaaccaaaattgctagaatatacataatatactttttataactgtagagtgggagaaaacatttttagacatagcgcaaaacccagaagcaaagtaaaacactggtaggttatctgcttaacactgttaaacttctaatgggcaaaagacaaagcagacaaaggtaaagacaagttacaggctgggagaaaacagttacaagatatatcagaaaaagggaaacatataccatctctaacatactcttacatggctcttacaacccaataagaaagtgaagttctcaggtatctgtgaatgcaagccacagttgtctcttagccacaatgtctagggtgcgtcaggattcagacgactgcagttcctggccaagtaccccctagctttgctgaatgacatgcctctttatggcttatggacagcaaccattgggttcaggtcttygccccatttcctgacccaaggggccacaaaatcctttgtcctcaccccaggccacaagaagagcatctcctcagaaagtggccactggttatttcacctggccccaagacgatgcaaggcacccactctgctttttttgtgatgagatggagcatgactggccttgcacatgaccttcagtcactgcctctttgctctttggttgttgactttgtcggcagggaattcagagggaaggagagtcagcgacgtgctctcgtaaggtcatcttagaagaccactctctccaattattttaagcagctctttagagctttctacattgtraagttctttatcctacctgtgtatccctagggctttacagagtggagattcagtaaatattttgacaagagtgagcaaatgatttaacagtcgatggagtgcaaattgccaacaacttactgtagcgtttccatccacagcattcagggtcagtggctaaaatacttgtcgtaaaggtgccaagcctccaggcatctagcagggcattagcacaccgaagcatttattagactcaggaatatactctttattggctcatttcaaacaatacctaaaaaagaaacctctttttttaaagccttcaaaagatggcaggatgtattttttcctaagacccataaaacaggtaacataaactgttactatttcataagaaaaacttaggtacagaaatactcaaacacttatccaagggagctggaatttgtgtcaaattttcttgaggaattacatggctcgtactatttagaccatgttctaaacaagcatttatcgctctttgaagttgtgtcgtatttagaaatttagattcatagtaattagatatttagatagattatactggaatatttgggyggcatatggacagcaggtctgtaaataaaatttaaatcttcattactatattttctacattctgccttatgcttgatttaagcttttttcccttcttttcactggttagatttttttttcatttattttttcttctargtcgttgacctttttataggcatagaaaatgccttgtaccgtgcaccaaagttcttaaaattttaaaagctttctttgactaagtcatcccttgccctcttttgaagctattctgacctctattttctattttattttaattaatcatatcttaggatttgtaggcttatatgtggatgcatgtatattatcttgttaagggtacataaggcagttatacaaaagattatgttggcttcaaagaatgttaaacaaaaggaatgagaagattcctgaataatatagttatgcatactcagagcttctttcataagggcatttgaaatgtatgctgatyacctcaaggtcgccatgaaatgggaagatttaaactagtggtgtttggacagaaacaacttttaccttgaaagccagcaatcaatgactgaaaaatgtatatctaaggctggaaaatcatttcagtattattaagtattctgatgacaaaaaaggttcaaacatttgtgactcccatagctagtattgatatgggtgatgggaaataaggatgtatttattttatttggactttagtcatgtttttattgtctgtaaaaatgacttgactgttayagctagaacattgaagaaagaagggaagcaggtcaaatgggtccccagtgattccctgtggcacctggactttctccaggaattgattgttacatattattccatcaaacaccttttaaccagtccagttcttgtctatggatccagacaattcagtcttcccagggcttacccatgtttccatatatccagaaagtttgtatattatggctagaaaagcaattaaaccactttggaagggttgggggaagggagggttagggagagacttgttaaaggatacaaaattatagctagataggaggaataaattctagtattgtatagctttgcaggaagactaaagttaacaatcatatggtatatagtatcagatagctagaaggaggatatttaatgttccccacacaaagaaatgataaatgtttttgattttatatatatatatatatgrtaattaccgtgatctgatcactatatgttatatggatcgaaacatcactatgtactccatgaatatatacaattattatgtgtcaatttaagaaattaaattaaaaagagaaattaacccagcctcaccattttacagcagagggacttgaggtggaaaaaattcaagaaactttactctcgtcattcaacggagtgatcttttgaaaaaggtagcattacaagaaatccagtatatacccacaaatacgtggccacatttcttgacaatgttccaattattattgatatctacaattagaattaaatcgttgtttctaaccagtaatattccaagtaaagtagtaayattgtttattcattggcattaggcatctatggttagctctacagaattatagttgaaatctatgtgaaaatatcaatttttacacttaccgaccataataggatacttacagaagagcttgataccagactgtcagccaaagattttctgaatttggtatgaattttctaaaggtggagtgatttgcttcaagagaaaattgctttgagtgcattttgcagtcaagaactttgacaccttgcaatttactagttgcaaagataatctgatcacaaagtaagaaatctgatcgttgtaattccaatttatatcaataagaaataataaataatctttattttggaggtttgctaagtgactgaaagtttatctaaatacagacggttttgcatgaacgctagggactgaatgaaacactgtttgcctaccaattaaccaggcaggtgtgaaacataagcagtgaccgaccataacagacgatctctcagatattgatcactcttttaacagaaaaattcctatgggcagatagaggagggggagagggcagcattctcttgagattgtcttagggaaggatgatcatgaaactctttatatctgaaaaaaattttaaatccttttaaatatcaatccaggaggattagctaagcagcaataaagcaccttataactgttacatagttaattcaaagaagcattgtatcaagataaataaatatagaaaacaaggaatccattttcaagaaacatactttgttctagtyctgacttcagatttaaaacacacacacatacgcagaagacacactgaatatgattgaatctagaatatagaaataaaataattgaatatattccatttgttaatgtgtgcatgtgttttcaagacatggctcaatgattctgtagttttttccttatttttattttgagaattttctagaaaaaatatgtcttaaatacttaatttttacttcttggttatcttagtccatttgtactgctacagcagaatacatgagatgataatttctaaagaacaggaatttattttctcacagttctgaatactgagatgttcaaggggccggcaggtttcgttgtctgtgagggtggctctctgcttccaagatggttcctctagaggagggaacactttgtcctggcatggtgggatgtgggctcaaaccctgtatgaagcctcttttataaaggccttaatctcatctttgagagaggagccctcataacctaatcagctcttaaaggttctacctcttaatactatcacaatggccattaagtttcagcatctgaattttagaggggacatactgaggcaataacaaacattatgtttttgagaaggtcccattttttyttaatttaaagctcagtccaatgaatatctgtaacaaagggttagtgaaatcccagtccaaaattatcatcttttgaaggtaattcagatggacatttcttgagttatcaaaatgtataatattatctattcaaatcttttctgttttattaattaaactcaggagattaaagtaccttgccatgacattgaaactagtaaaacagccaaatatgaaaaccaagcatgctgggaaaatcctaataatgatggaatggctaccaagtctttgttattcccttggatagtagcacaccttggaaagacttagcaaagcccagatttcaggaaagtagaaaaattgcatttaatgctttgattataaaattatcttgtgagtttcttgtttttttttttgtttttttttttgagatggagtctcgtcctgttgcccaggctggagtgcagtggcacgatctcagctcactgcaatatctgcatcctgggttcaagcgattctcctgcctcaccttctcgagtagctgggaccacaggtgtgcgtcaccacacccagctaatatttttgtatttttagtagagatggggtttcaccatattggtcagactggtcttgaactcctgacctcgtgatctgcccgccttggcctcctgaagtgctgggattacaggcgtgagccacagcacctggccatctcgtgagttttaatgcaactggcagttgactgtgggtcctaaccatgggctctgtttttctcaaatgtaaaattattggccgatgtggaagaccatccatcctgtagggtgaggccctgctttttataaggtaatggaagagtatgctattcaatatcaagttaaaaataacttttaccagtgtggaaaagaaatgagcagggaaacctattgaccattaggcttagttttctgtttggtgccccaacttcactccatctgctatcttttggatctccagggttttctttcctactccttaccccagaaagctgcattattctggctccctgagcaactgacttcagtctgagtttcaccagtgggaggtgctgtcacgctattggagggcagaagaagagcagcatgaaatggttatttggttattccctattcccttctgcttctgcatcacatttctggcaatggctgaatatctccctaactacagctcccaacaggcaacctctctttcatggttccagctcttaccagttacaataattctatttctatcacaaccccttcttccacccctaccccaattcttccagtccaggggtcacaatagcaccccacagtggctatttcctgggtttaccaacttcttttgttggttcttccagcctgcttacacctccgacttttttcctcattaaagtctcttcacttaatttatctgatttgaatttgtctctttactgagatcttgaccaatacctgattttttttttgtactttaagttctagggtacatgtgcacaatgtgcaggtttgttacatatgtatacatgtgccatgttggtgtgctgcacccattaactcgtcatttacattaggtatatcccctaatgctatccctcccacctccccccaccacatgacaggccgcggtgtgtgatgttccccaccctgtctccaagttttctcattgttcaattcccacctatgagtgagaacatgcagtgtttggttttttgtccttgcgatagtttgctgacaatgatggtttctagaaaccatagcttcatccatgtccctacaaaggacatgaactcatccttttttatggctgcatagtattccatggtgtatatgtgccacattttcttaatccagtctatcattgttggacatttgggttggttccaagtctttgcaattgtgaatagtgccgcaataaacatacgtgtgcatgtgtctttatagcagcatgatttatagtcctttgggtatatacccagtaatgggatgcctgggtcaaatggtatttctagttctagatccttgaggaatagccacactgtcttccacaatggttgaactagtttacagtcccaccaacaatgtaaaagtgttcctgtttctccacatcctctccagtacctgttgtttcctgactttttaatgatcaccattctaactagtgtgagatggtatctcattgtggttttgatttgcatttctctgatggccagtgatgatgagcattttttcatgtgtctgttggctgcataaatgtcttcttttgagaagtgtctgtttatatcctttgcctactttttgatgaggtttttttttttcttgtaaatttgtttgagttctttgtagattctggatattagccctttgtcagataagtagattgcaaaaattttctcccattctgtaggttgtctgttcactctgatgatagtttctgttgctgtgcagaagttctttagtttaattagatcccatttgtcaattttggcttttgttgccattgcttttggtgttttagacatgaagtccttgcccatgcctatgtcctaaatggtattgcctaggttttcttctagggtttttatggttttaggtctgacatttaagtctttgatccatcttgaattgatttttgtataagttgtaaggaagggatccagtttcagctgtctacatatggctagcaggttttcccagcaccgtttattaaatagggaatcttttccccatttcttgtttttgtcaggtttgtcaaagatcagatggttgtaaatgtgtggtattatttctgagggctctgttctgttccattggtctatatctctgttttggtaccagtaccatgctgttttggttactgtagccttgtagtatagtttgaagtcaggtagcatgatgcctccagctttgttcttttgrcttaggattgacttggcaatgcgggctcttttttggttccatatgaactttaaagtagttttttccaattctgtgaagaaagtcattggtagctttatggggatggcattgaatctataaattaccttgagcagtatggccattttcatggtattgattcttcctatccatgagcatggaatgttcttccatttgtttgtgtcctcttttatttcgttgagcagtggtttstagttctccttgaagaggtccttcacatcccttgtaagttggattcctaggtattttattctctttgaagcaattgtgaatgggagttcactcatgatttggctctctgtttgtctgttattggtgtataagaatgcttgtgatttttgcacgttgattttgtatcctgagactttgctgaagttgcttaccgaaaaaagtccaggaccagacggattcacagccgaattctaccagaggtacaaggaggagctggtcccattccttctgaaattattccaatcaacagaaaaagagggaatcctccctaactcattttatgaggccagcatcatcctgataccaaagcctggcagagacacagcaaaaaaaagagaattttagaccactatccctgatgaacatcgatgcaaaaatcctcaataaaatgctggcaaaccgaatccagcagcacatcaaaaagcttatacaccatgatcaagtgggcttcatccctgggatgcaaggctggttcaacatatgcaaatcaataaacgtaatccagcatataaacagaaccaaagacaaaaaccacatgaytatctcaatagatgcaraaaagccctttgacacmattcaacarccctttgttttaaaaactctcaataaattaggtattgatgggaygtatctcaaaataataagagctatttatgacaaacccacagccaatatcatactgaatgggcaaaaactgaaagcattccctttgaaaactggcacaagacagggatgccctctctcaccactcctattcaacatagtgttggaagttctggccagggctatcaggcaggagaaagaaataaagggtattcaattaggaaaagagggagtcaaatcgtccctgtttgcagatgacaattgtatatttcgaaaacccaatcgtctcagaccaatacctgatttttaagcctaaggttaggaacacataggaaaaatcaaggtgagtattaaaaattagtagraggagaccgtttagtgtactactcagattagtagctctttgtacagtcatcctcaataaatgggtgcttctgatgacttacttttttttctttctttctgataaattgttcttattaaggaattctattaagtcatcatggaagatgttatcttctaattttacttgatgcacaatttggaaatataattagtttactgaataatatcatcaaggttcaaagaggactcggtgatctggaattctagatacgtagaatagaaattctgaaattgcatgcaaatcttaagtatgtgtgtataaatatacatatactgagtgatttgctttgcaacatggtgatttggctgtttagaaatattaatgatatttgaacatcattaaatgaagtcaaaggccagctataccctgcaacagtcagaccacatatggtgacatgctgccacttaggggcactatgataaacaggtaaacaaccaagagagctgtgtggcaactagtttcaagctcagggttttaagagctagatttaggggcctgggttttactcacatcttcctccggtgctagctgtgaaatttggacaagcagcatatcttttgctcatctctgaaatgggagacctaagaccatgggaatactcattaagtgaatgtacatgaagtgatgcctgacacattccaaaaactctccagacaatacctagaatactactaataattaccagtgtgtaattggtctggaaaccacatgttgtgagtaacagtctagggaactgggaacaattcagtttatggacaaacatactgagggatagagtaggccgctttcaaaatgtgaaagattgtccaagaggagagaaaattgttctaggaaggcaggagactctcagtgaaaggtacagaggaatataatttggtccagtagcagaaatacctttctaactcctagagctgtccaacaaggaaataggctgataagcaatgtccttttgagccattagtcaacaaaggctggataatcactatgcggaatatgattttagcaggaactcctgcaataagggctgaagtgggggagggcaaggacaggggaaaaggtcacaacatgacccttaatttccctttrcactctacaatttcagactctatgtgtgtgttggacagaatatcaggaaaatggctgccacctttgtttgcattcatgttgtcctctttcaaatcaggcccttggcaaaggtcctgagacacattgtccaaacttgctattgacaatcctacatatattttcctgttcagatgctttggcctgccagaggctcactgggtgtcatacaatagtcttctgtgtcaccagccttgcagatttcttcaagaaactgtttgttgagtaggcgcttactagctggaacaaatccctttgcaaaggtgtaccttccttttcttgaacagaatgaaaaatgtgttgagcaggaaaagaaacttcacagtatttgtgtttttcttttggccctttctgctaggtatcctcactctaattgagcaggctctggaaacytgaaacgcacatcagtcttgtgcctttttctgtttcttccactagcagttgataattatagcttttcgtagatactcagcacattccatgtttttgatgggagcagagcctttgtatggcaaaattgctgatatacttttaactaaatctgtagatgtgttatgtttagaaggcagcggaagaagcctgagctggcagaataattgctgtgttagggcgccactgaagacaaatagtgtgcccaagattgtgaaaatcctttcttataaaaactttttccaacaccagggttccttttgggacagaaataacaatatctgttctttctgagaaaacttggagagaatgtcaatgtgatatctcagggataattcatttttgaaaaaggagartcctttctactgaatactttttataagggacatttttagctttggaactgcatttctcttccctgtctggatgttagctgtttgtatgagtggtgaggacaaaaagtaaaggattgcatcccacaaaaaccaacctcaatagtttaaggtcacacagatggctttgaggtaagaaaggaaattacatctcctgaaaggcaatgcacaggctattgaataggatgaacttggaggtctcttctagtcctgagattttatgattccatgatcacagaaactactagtgaatgtgatacttcatatctcatccattggctatttcaaatggcaactaaagtgagaagggaaatcatttattcttaaatgcaaattcaaactaacagaaattggatatatttcttggtgttcatgagcattgccagtagtaaaatatatgtttagagataagaaaataaaaacaacttatacttattgaatgcttatgacataccaggtcctatatcaagcattttatatgcatcatagattctattattgtcaacatcttatggaggaggtaactgaggattgtagatattctgaagcagtgtcgtgaagctgacactaaacactcttggctaccatagcatcctgcttctctgtagcagacgctggtgattcatcacaccacatttctttggcactctggatttcagcacaagtgctgtagacagttaattgcctrtcgctagtgtcccgcttccttcaagtgcatgtgggaaagaaggagagggaagagaatctgaaagaccgttcagcaggcaggtgcaactcagaattaagagagaataatatactctacctaaggacagscctcaaccagtggaatgatggggatggtttccgggtaaactccgaccctcattgtcccgaaggagaacacttccggggcacatactacaatcgtttcttagagtgtccctaacaggggtgagccccccactcaatacacagtggtaagaaactcattcctgcgttcttctaatacatcttccttccctatctcattgtctatgctcctcatttctgcatcctaggatcagctcccaaataaacttcctgccctcaagtccttgaccaaagtgctgttttggggaggagtcaaagtaagattttttaaagaacacacacgttactgctatgtagttacaggcataatcttactaatggactataatgtccatcataccatggggttgatggtcataaaacctaggcgtatttgggaatatttctgtgacattaaatctctaactatataatagaagctaatggtagtatattgaaatttgttctttggaattcaattattcaataaaataagagaaatctctaccacacattagcatgaccccgttgaagtcttcagaaagcctaatgatttagcatgactatttcaagatcatttttcctaggcttcctcccatcctactcctggaagtgctctgctattaatttcctttgtggtcttagataagtctcagactgcaggtgaaatgattaaattctcatttctcttgaaaaatttcacacgaagtctcttttcatctatttcaatacctgatatttaatttgaatggagtataacaactacattgatatagggaaagttttattgaatgaacaaagccatcacataaatttttctttcatttttttttttgtcagtctctgaaattagtgaataggtagagacatccatcagttggatcattcttaggtaacattttgtttataagaacagggcagtgctggaatgtggatttacccacaattctcacgtgagatttctaccattgtactgctgttttcttcttgtctctgatttttttcaatctctgctcctcaaacatccaggtagctttgatcagtgcttcaagcagagtactggagtaagtaatatatttttctataaccttgtaatgaaagcatgatctcttcttaaggactctgtacttagcgaggcatctatcggtgattgtatactttgtagattttatttgggtggttctaccatcctccatttattacatatgacaaactcagtaagattaggctaagaagaactggttcctagaagctaatgttaccctggacagttaacaaaatttttgtgaaagtactgtagagttagaaaacacaccaaatagtacaattctccacactggatttcttcaatttactgttaagttgtaaaaagtaggcttgtacctgatgaaaacatttggcaaatttgtatgcagtaccagtgaaaaatatgcacaaattggcaaaataaggcaagattctaactgctgtccatgttcaagaactataacagtagtggggtgaatgctaaatctttacaataatatatagattgtacatttgtttttcatggattataagacatttttcatttttcagccacacggtattgattcatcacttccatattcagctatgmctatatatgtccatgtcacaaagttattttcccattaaaaatttactctgtccttgcaataagaaacacaaaagagttagttcaaaggaaaaaataacaatttgcatttggataaaaatggtaaatagatttatttttgactcatcctgtgaatccttttcagattgccttctttattttttattttttgagacagagtctcactctgtcacccaggctgaagtgcagtggcacgatcttggctcactgcaacctctgcctcctgggttcaagcgattctcatgcctccgcctactgagtagctgggaccacaggtgggcgtcaccacacccagctaatttttttgtatttttagtaggtatggggtttcaccatgttggacaggctggtctcaaactcttgacctcaagtgacccacccacctcggcctcccaaagtgctgggattaygggtgtgagccactgcacccggcccagattgccttcttcagrtaagtattttaaacctcttatgagctgtttccttccttcatcccttcgtttcctcctttttcctcccctcctaggactctctttctcttttcatttgcctctattttccttcattcttttcttcctttgttcattccttcctcccttctttcttccatctccctcttcttctttcttccatctccctcttcttctttcttccctctcttccttttttcctccttatttcttgctttccttctttatttcactcatctaaaaaaaacctgtagtatagatctttgaggaaattattttagttttgacattcattgcacagttgtctgtaacccagttagggaattctttcctatttttaaaatgaaaatagctgagagatttgtgaggaaaatttgaaacaatgttgattctgaatgtttttaaaaatttctaatatttatraaacaactgtatctcagatgagcttcaatttgcaaggcatcattccattttcatttttaattctctgttccaatgcctctgctaagaaataagcattttctcataggaagagattattccttttaactttttttcaattttaatttttattcagcctcttacctttttgctaaaaccaaaagttcaaaagaaaggtgatcaggrcactcccaggaattttttagccatgtgagaatatatggtgaaatgattcaagtagatgcaacatggtctactggaaaagcactgagattttgaggagaaaacttagctctgccattagttaattgtcatcaaggtcttcctatgaaaattgtagttcaattttcaaacatttattgtttttctccaaagtgctaggcatatgcttttgtgctggagatgaaagatgaataacatgtaggtgctgtttttgaagaacatcactgaagagagagtgagctaaaacaaataatgatttgtgtgctagaatagagccaggttgtacagaaaggttctattaatagcgctcagtgatccctgcaaaagaagcatttgattctgtccaaagagatgagtacagaaaaagccaaagagaagaaatgatatttgatttgggattttgaaggatgaataggatttaaccagatgaatacattggaggaaagatattctggtaggaacactgtgagtaaacaactgtaggactttgggagggattgtgagtagagtgtgcaagayggaaagtacgttggcattataatgattcatcatcaacaacaccatgtttgcttgcctggttgaatgtccctgartacaccagctgacatggatgccagaattccagctatgagaatttctcctctatttattttaaacgtaggtacaaatcagttctctttgaaccctgcctgactttgcatcatggtttcttctccttatctacttctttgtgaatgtgataactcaactttggaattgtaactttgtttctggcatcgcatccttcctaacatgctcattccaaaaactactctttcactgcactacttaggcaagaggcccccggccatgagtctcagagttctcctcctcatatcaccaaagtgtcccatgggttccagtggaaggtgagcaataacagtatctcctgcagccacctcacagaactgttgtgaaggatagagatgataacagatggaccatgtattcactttggaggtaaatagacttggatttaaatcctgagtctgactgagtaagccaagtcaagttatttaacttctatggtcctcgatattctcagtttcctatgatggggctaatagtacctacttggtagaattattgtgagaattttcattcaatgaatgtggactgaacacttgctatatgtgggctactattctagggcctggggatgtaaaagagaaacaagtccttgcctccttgaattcagactgtaaataaacaattaactacataatataatatcagaaagagtttggtggctggaagaatagcaaagggtaaggggagagagagagaggaacagagtgagagtagtgatattgcagagggtgttcaaggaaagcatcttacctgcatgaaataaagggataaaccatgtagaaatctggaagaagagtatttcaggcagatggaagagcatatacaaaacctctgttatggactaagttgtatccctctaaaaggcatgtgctgaagccctcacccacagtgtaactgtatttgaaaataaggcctctaaagaagtaattaaggttaaatgaggtcataagggtgggctctgatcccatggactgatgtccttttaagaagaggaagacatcagagctcactcactctgtgcacacacagaggaaaggccatgtgaggagacaggggaaggtggccgtctacacgtcaggaagggaggcctcaccagtaaccacccctgaaggcaccttggtcttggtcttctcacctccagaattgtgaggaaataaattcctgttgtttaagccatccagtctgtggtgttttgttatggcagcccgagctcactaataatacaggctctgaggctgaaatgtcccaggcatgtgactgcagcagagtcagtgatgggaggcagtgctgggaaatgccttggagaagtagccaggatccaggacacctttgccatgatgaggagtcaggacttgatgccaagggagatggctgtctttgaagcatgtgcttcaaggagtaaaatgacatgtgtttttaaaagatcaaactggctgctatgtggggaattgactctgggccagagaccatggtcttgagagcagttaggtagacaacaggagcccctagtggagttggtgagaagtggttgggatacattttggagatgaagctgactgaatttggtaatggattggatgacgaatggaaagaaacgagtcaggatgactcactggttattgggctgagcatccgagtgagtgatggtgtttttgtggagactgccactcttacgtctgtaatgctattctgcagacaccagtgtggctcactctctcccgtcttgcatgtctttcctaaatgtcaccttctgattcagaccttccctgggcagccttttaaaaattgcattgtttctctgtttccctgtcatgcctttcttttctctatagtatttatccccatctaacatattatatattttacttaccaattttattttcttctaaaatgtatatttcatgcatttttatctgttttgttcactgctttttagttcacatgtcttgaacgtggtctggtatacaacaggtgatccatatttcttgaatataaggatggatgaatgaatgaatgaatgggtgaaacctggggaagaggaatcaagaactttgttaaaatgagtactagttggccgggcatggtggctcacatctgtaatcctagcactttgggaagccgaggtgggcagatcaaggtcaggagttcaagacaagcctgaccaacatggaggaacaccgtctctactaaaaatacaaaattagctgggcgtggtggcacacacctgtaatcccagctacttgggaggctgagggatgagaatggcttgaacctgggaggtggaggttgcgatgagccgagattrtgccattgcactccagcctgggcaacaggggagaaactccatcacaaaaaaaaaaaaaaaatactggtcaattggaagtatctggaaggtaattgctataccattaaatgagatatatataacaattattattacaagtattcttcctcttttttttttttttttttttttttggagacggagtctcgctctgtcacccaggctagagtgcagtcttgcaatctcggctcactgcaagctccgcctcctgggttcacgccattctcctgcctcagcctcccgagtagctgggactaccggcacccgccaccacgcccggctaattttttgtatttttagtagagacagggtttcaccatgttaagtattcttcctcttctaagtgtgctgcacccacctcttagtagactttggttgggattatctgaragtagtcttttttagttctgtggctgtgtgagcacatggttgggaraatgtgaggaggatgtggccatgaccaactttatccttttgtagccactcactccccagcgtcacacaaatggatgcttacgcagatttcctatwtcctccataggctcctatctttgtgctgagtattaattcccatctgtgttcaaggacggtaatcaggcaggggcagtaatcaaaatgatgtgtacagcaaaatcaaagctttcgcatcataatcaaaaccatgcagtaaattataggaatacgtgttctggtttaatcaatgactgatcttgcttggatgcttgatacagagaaaatcaaagatttggtttcaaattagccaaggggaacatattatgaatgatctcatataacttagcatgctatcacagtgattattttttaaataataagattttgctgtaggtctcaccacactactattttagcatacaacgactaagaaaaattctttagtatttgtccttacatagtgtcttgaagaatgacctgccctccaaaagcttgttacaggagagatgatataggcatgagcaaaaaatggtgaatgtgcttgtacccagcagtgttaagtaaattccgatctttgctgtgaattgcgagtgaaaagtttggggtgagtattttatttttcattgagaagtgaaataattgttagtttgtttagtagcactggtttttgggaattttttttcttttttgtctttacacattgcagagtagcagtaaagaaataggttggtcttttaaagggwgtatttcctgcttttaataaacacaagttttatgagaaaaataaataaatttcaatataaaattaagatgtacagaatatagatttagcacatataaaaaaggaaacaaaaatcattttaccttcactttagcctgggctgatttaacaaaacaccataaactgggtagatttttaacatcagaaattaatttctcatagttctagaggctgagaagtccaagatcaaggtgctggcagatttggtgtctggtgagagcccactacctcacagatagccttcttctcactgtaactcacatgggagaagtggccagagagctccctgggacctcttttataagggcactaatgccattcaggagggagggcatcaccctcaggacctcatgacttccccaaggctccatgtctgaacatcatcaccttgggggttaggatttcaacatatgaattttggattgggacataaagagtctactgcaaatttcttcatgtcagtcacattttaaccaaaatcatcttacatggacttctctagaggtagttatattttttaaccaactgcacttttatatgataacatatttttatatgccacctgcaaaagggctacctaatgaggccacctattttttgtaagtgtaagagactcagctggaagcaagttcaagtgtgaagcactgtcccctctctacctgggacatggtgcatacaaatgggagtaacatgagctttrcaggggtcatcttggcctcctgtcccacctccaccacttaccagtcatcattcattattgttattccatgaacaatgccacccacaaacccagagtgactctcagttcattgcttgtcttcacccagcgtaatgccagttgtgtgtccttaacatctttctcatctccttattttgtcctcacttctctccccactgccaatgtttaggcctgcagcaacgatttcctaaattgcccaccttccatccagcttccatcacactgctagagtaacacttcagaaaatccaagttcaatcctattaaaatcttattttaatcartcgtctatttaattatttttattattgcccattactaggatagagaattccaagtttgtcaagtaatgaactgcatgatattcctggtctctttattcaaagtcatctcctacttatacccctaatgtgtgcgcgcrcacacacacacacacacacacacacacacacgtacacaccatcttgccttccaggcaccctcagccacctttactactcctggcatgctgtctcctgcacaagtctcattgcctttaccctctgtggaatttccctctctgtgctcttaccagatcactttataaagttatttttaaatatgcttgtgaaaataaatgaagatcacatgaacaagaacagaggtgatttatttagagtttgcaagagaatcaaccactatcarttgcatttggcacagacttaaaggaacacagaaagataggaaacctttagagtgaaacaaagagcaggttccaggtacgctgtggcatgaggaagstggagttgagctaactagaygtgaacatctgatgtggttggtttgggaagcagatcttgcttcctcyggttgattctgagttgaaaggagggagccaagaatagggaagctggcagtcattgactgtatcgtgactgttggggccagttgctgtagaggttgtggtttggcttccagctggttgctgcagaggtggtgctcagaattctgttgtcatatattgtctggccattgtccgtttgtatatttcatctctcatgatcaatcaatattttttgaatgagtacatgaatatttcatctcagtaagtgatcattccctcctcatccatcttaatsataaaattctaatgtcctaggttctttatctttcaacaaattatgtttccctttcttaatgggtagaaaaaggaagcttccccataggcctaaatgtgctgatttcaagagaaagcatacttctttgcaacaagaaattgcccaggccttcactcttaaccactatgctacatcaacgtccttagatgaaacagagacttgggggcatatatttcccaatttttcaaaatccatttttatcgcatattcaatttggcctgcttaccttatttacattacctgyctgggatgaaagacatttgaggttrtcattctggactcttaagtaagttcttcctttaaagtaaagaagctgaccttccaagctaatttatcccacttaacaagagtaataataacacaccacccactccagaaaggaaatcatgcagatgaatgaaataatgtttgtacagagcttgacactccataaaatactctaataacatggtgtctacactttgaaatgttcaaatcctatttcaatagaattaaaagccatgaagaataaaatgtgaattgcttgtcagacttttacatagaggtgcagggtgatactgatgccattagacaatttaaaagctgggttttagcaaagtttctgaggaatctgattggtttgtgggggagaaagtgatggtggtacttattcatatccatttttgtagaaaaacaataggttataacatgaaccgagaaacacttacgcagctaaatttacagaaatctgtctactcatctccgaggaaaagttttggctaagcaagttaattttgtcgttagacatttgcatagtaattgtattgagtctgaatgtgcatctgcatggaaagcatgttttttcaatcctgttctttggacatggattaatatagatcctggcgagtccttaaataataaattattgaagttgaatgcttaattactttacatttagatcttttataaccagatgcttgaacccctagtctgccatgtattgctgctgcctttattggtgttaccaggtaatagtcacctgagtttttcacatggtcttggtttgagggtagtctactaaagaatgcccacatatagtgtttcaaatattattaaagagtgataattaaatgtgcctgatgtataaaaagcatgtgaggtcatttaaactaacacttttattgtgattgttgtgaaggttatsaaaaacttgatcatgtatattatctaaagggattgttacaaacctcaagtgacttcaggtcattgaaaccattgcatgtggtgaccagctacagaggccatgacatttttcccttgcctattgtatccaaggttattttgcaaatcaccgctttgcatggtacaaccttcggagtttctagaaattgcctggagtgataaaccagagtatattcaacaataggatttmctagaattagtgggagaggtgtaattaagttactgtgtaatatatttcccccaaatgataaatatcaatatgtgaacactgaatatgtgctcctatgaagccaccttaagtggcagtttttagctcagaaattgtgaaccaatgttttgtccacctgaaccagtttgggtggatggaaaagacttaagggcagatttcagaacttgtttttctttgttaattcaaaaatgattctactaaactctagatgagatcaagtggtgatagagatatcagctgagtgagttctgttttctggaactttcttgaatctttattagtaattcatagcatttttctagatttcatggctgcagtttcatattgacatcatccagtatcactctaaagggactctaaaactacccttcctggcattcatctaagagctgggaagccatccgcttatacctggcttagaatatcatttttagagacatgaccacaagcctgctgacattcaagagcatggcttaagtgcatcccactcagagctttgtgaattcttcttgtaaattatgatgcctattcaagatttagtgggaatactccctcttctcaagcatttatcaaaacacaaggtgaatgcattatccacattaactgctgttcaaaaattctgtccaaaagttttgtttcaatataggcaaagtttctgtgtgatgcctggcatatggccaaccatataggatggccatgatctttattactgatttcttagtgtttattttgaatgtaaagttctttatgtttttcctaaaagttcctcactgtttccctcactcacccactagcccacatattcacatattttacttggttgtgactatttgaagaaagcccttaaagcttttttctaaagccccccatttaagattttcaagtacataggaaccactggggactcttactaccattctgattctgtaggctggggcctgagggtcttcattgctaactagctcctaggtgataggaacagtgctgagagcacactttgagtggcaagtctccaaagcagtgctgtctaatagaactttctgtgatgatggaaatgcttcatatctgtgccatccaaatgagtggccacttgcccgatgtggttaatgagtatttgaaatgtggccagtgcaactcaggaactaaaatttaattttatttagtttaattaatctaaatttaaatagatacctaccttatttgactatgctaggggacttaattaaagtctttatagctccttggctttccccagtcttgagaaaaagaatctgaaagtcgagggctctttcttatctccaattttccagaatcttgcatagggccaagaatattatgtatgcatagtaaatgacattcctattaagaggtctagtctgcagttttgggggcagactcatagaactgtcaaataataaaaagatttgactttgaagctataagacatggtgggtaggtggctcagcctctaccacttacaggataatttctgacaagtcacttaatccctctaagcatcaatttcctcatctcaaaatagcaaycatgattatggtaatgtaatacctatctcacagagttgctgtgttatgcacataaaattcctggcaaattatttttttcaagtgatacttgctctgcaaatgctagtttttgtggttatttcagcatgaatttcttttttcccctaattagttatatttcagtaaaacaatagaggaaggtaccctgtgtggacatagttgcaatccaattgagaggttaaataataacacaaaactacatgcagttttgtatcatttctcatgtggagaaagtagtttcgacggtcaaggaggagggcttcagcatgttactttgattctttgcattttatattattttatgtggaagcaaacaatatttttggcctgggattttgtgttgtttgatttaattccctcataaaaatgtgtcataaatgctttgctaattgtgattgaaatttcataactctatctcatcttaaaaatatcccattccaatttgctgaatacataatttccccttgtttaaagttatataatggacatattttctctttgtttttcttgagtatatttgctttgaaatagcttttttgtttttcataccctctgtttatatatatgtatatatgtaaatatatgtgtatatatataaacgtatatatgtatttacacacacacatatgtatacacacatatattaatcaaaagcattgcctacttcaagaaaataagaaaaatcacaaggggtaacatttcgcaagtgtgcaaagcactattctaaacaccttacatatataaacacgttgagttgtcactgaggctgagtaaacctttaagctcttttactgtctgctgtggtgttgagttctgaaaatattgatagtcctcttatcactggtaatgacatgacgtgccatccaatgacctttgtacaatcatgatttatgtataggttgaactaggggcatcgccatttaagaacgattaagacaaatcaaggcatttctgaaagagaacagattgattttstttcttaaagtatttatagcttgtaaggcagctgtctgcttttgtatattcttaaacaagcatcatagaccttattcaataatttaagtgttttctttagaactgttttgcagcaaaccgaacttcccatttgcattgatcagtgttttcaccttcattctagattacattttaaagtaaaccaaccaatttggataaatgtaaacgcaatcacttgttaacaatcttctgagactgaatcggtgctgggtatttctgagtttctatggaaggaaaatagttcaaagttcagattggctgtctcaccacctaagctccatgccttgccccttgctttcctccacaataaggcttagacgcaaaacacttcgttttcctgatcaccactcaggcatgagagaccaggtgatctatggctggccaataggccaacaacaagtagggagaacctcctttcatgagtagaaaggcaaagcattgtgaagggagcacctttctatattattccaacctcgaataaatgagaatttatttatttattttattccagtttgttcatttatttcttatacgctctaagaggcaactcagtatgttgattatttttttcagattcatgcccattcatcttcttaaagtagagtttctacagatgctccaggatcagtctgacctagtacagagcagtgtgtgtgtgtgtgtgtgtgtgtgtgtgtgtgtgtgtgtctgtgtatgtgtgtgtgctcctgcatgcttttaattatatattgaagatatgctaaaatatttataatgcctctcaaagattcaaagaataataataaaataagcagctttccctaccttagagaccttctgtgtacccttcccttatcccttcattttcttccctaccaacataaccactgatctgaattttgcatttacttttctcattcttctcttacagtcatactacataccaggcagctctaaagatatattgtttaattttacatgttttggacttctttaaaaaaakaatcatactgaacaaaaatggaatcatattgcatgtattcttatgaaacttcatttttcatccaataatgctacttgaaatgtatttatgttgatgtagttactacagccatttttcactgctctatatttgtctcacttttgccaggtttaatttttttctattttatcctttgaactagcttgaaattatatacttcactcttttttctaatctcttggttactccagaaattttggcttgtatacgtaactttaatcaaaatctttatgattctcttgaatgataaaatatgttcagcattttagcttcagctatttagtctggtatttaattacaccttcctaaaccacacacattagacatttttactacaatcaatgcttatagaaattcactcacatatttatcagcattttttttatttacctctccttcatgcatctctgactttgcatttgggattattttccttctgactgtagttggttctgtaggaaatcctcccgggagtattgttaaatattttccatttgtttgaatgaaaaatggccttttgaaatcttttgtattaaaagttggatgcactgggttttcagttcccggttgacagttgtttcttcttggcacattggcagcagtttctcctatagtctaatattcactgttgctgttgacaagtcatggcaattgttattcctctgaagtaatctcttcctctggttgcttttaatattttcatgttgtattgggtgttctgaaatttcactaagtctccaggtatatgtctttctaagtttcctcctcaggatttgttgtgcttcctaaatctgaggtttgaggtaatcagttctctagcatttatagcccattgctactttgcctccctcccattcattctgttttccttttctcaatagacttttccactctgtcgtgccctccaacaactttcttatgattccaacctagctgtctcactgtgctgccttctaaatcactttttcataactatcttctaggtcaataatttttccttcagctgtgtctaatctgctgataaaacatctgtaaggaacatgactgtgctgcacccaagcaggcataggccaaggtaaacaacctggatgactcagcaggtttgtggtacaagtgcatagtcccatgtcttatataatcatagctgtgtagagataacatagaaaagttcaccgccatagccataacatagagaagctcaccacctagctctcagccactattgtttgtgtaatgtataaaagtaacactgaccctgtgaggcagctgctgaataaagccatgtctcatctacctgctgtttctcaagtgttcttccagctccctgccccacatccacccactcccctcagccctcagctggggttggaacttgaccccaagcatgacaacatccattggtttttaattttaattaccatatttttaattcctagatattctttttgctttattttaaaattgatttggtcattttttaatagttacttcttccttaatcatattatcatcttcttatttatttcctgaaatgtgttagacattcttagataattcctatatctattagaattatgggttgaagttgtttgttatttgtgctcttcttattcatgttgacttgttattttatatattatatattttcatggaactttcttttaagtgttgtctgagacctgggttcacgtcaaggatgatttttgtttgcttcaagtagctgtccacagaggtagaggtgggaaatcaaccagtggccaataaattcattccccaactccctacaaaagtagtatgatgcaagccataaactcaaataccgaccaggttgtgggtatgaaatctctttggagattttttttttccttcacttagtgctcaattcatcaggcaatttcccttcttgttttctgaaagaatttattgccagttacagcttatgctgctgttccaattgtataagggatctctagtgagactccccacattgcaaagtccttagactttttctctgattgctccaactcacacatttgaaatcatacaaatggaagctcatggttgccaagactcagcagatatcttcagggtgaaacctggagtcagtgttaatgtctcttcagagtctttagtttgttttcatccttttccagcagaagagccctacaaaagaagacatttatgcagccaaaaaacacatgaaaaaatgctcaycatcactggccatcagagaaatgcaaatcaaaaccacaatgagataccatctcacacyagttagaatggcaatcattaaaaagtcaggaaacaacaggtgctggagaggatgtggagaaacaggaacacttttacaytgttggtgggactgtaaactagttcaaccrttgtggaagwcagtgtggcgattcctcarggatctagaactagaaataccatttgacccagscatcccattactgggtatatacccaaaggactataaatcatgctgctataaagacacatgcacacgtatgtttattgcggcaytattcacaatwgcaaagacttggaaccaacccaaatgtccaacaatgatagactggattaagaaaatgtggcacatatacaccatggaatactatgcagccataaaaaakgatgagttcatgtcctttgtrgggacatggatgcaattggaaatcatcattctcagtaaactatcacaagaacaaaaaaccaaacaccacatattctcgctcataggtgggaattgaacaatgagaacacatggacacaggaaggggaatatcacactctggggactgttgtggggtgggggaggggggagggatagcattgggagatatacctaatgctagatgacgagttagtgggtgcagcgcaccagcatggcacatgtatacatatgtaactaacctgcacattgtgcacatgtaccctaaaacttaaagtgtaataataattaaaaaaaaacaaaagagctgtacagggaatctaggctggcatagtgtgagaaacaaaacacacatggcagctctttttgccatccacaacaaaatactaacaattgagcctataatcagctaaatccaaaggcaacataatgttcttccccatcttttacttgtgcagttgtgttttggatccagattaaagaccttaaatttagtactattaagtttattgtttgtaggtttgactgagctccgtaaaattttttggatcttaattctatcacttaacagtcacaattttccccaatttcatgtcatgcatacatttggccatcacaacttgaatgtttttactacactgttgtaaaaatgttgacccagatcagattaaagcctcaatatcccctctaggtagagactcgtgtatgatgtggcattgactaggtctgctgttaggaatactttctctttcttttcttttgttttatttttgagatctccctctgtcaccaaggctggaatgcagtggtgcaatctcagctcactgtaacttctgcctccttgattcaagcgattctcatgactcagcctcccaagtagctgggattataggcatgtgccaccatgcccaactaattttttgtatttttagtagagatggggtttcactatgttggccaggctggtctcaaactcctggcctcaagtgatctgcctgtcttggcctcacaaagtgctgggattacaggcatgagccaccatgcctgtccatatttctttatcttcaagaacatattttgccaaatgccttcctgaagtcaacacacattgtatttatgatttttttagccagagaagaattaaatcagttaacatgaatttgacttataaatccacctgtgtgttaatcaaagggctccatggatagccacacccagtcatcatttatcatctccatttattcctcactggggtcatttgaagattctgactcagaattacatccttgataccttgctaacagtcaagttaagctattatggaattgtgcctattttcatgaatatttgggcagcctcttttcctaaagcttataataaaggcctctatgaactaccatgaactccatggacagtaggtatacagtgttatatttgagttccttcccttttcaccagatgtccaggtaatctgtactttatttctataatgacatagcatccatccttttctccttttatcttttgagcattttccagggtgctttcatcatcttggttttggatttttatcagaacatgtgtccttgaacttgcacacaagaaagactttcagtgattgacacatccaaggcttcttatttagttgttcttcaactcaaccacattgtctaatagaaaccagccaggctctgctgtctgcaccattaggatgattatgaaaagaatttaactagcattttcctatttatctttcaaatatataagcttctacttagcaatatgaaataacaaaccactgctacaggaaaaatgtggataaatctcacagagattgtgtggaacaaataaaacaaatgaagtcatgtgcaaaagactacttactctgttgttctgtttataggaaattcaagaacaagcaaaactaataaatggtcctgtaagtcagaatagagttttcccctgggactgggaaatattgactggaagaagcgtgagggagccttatagaggctctatatgttctatattttgatctaggtagtagttataagtctgtttacatatataaatattcataaagttgtacatttaatacgtgtgcattttactatatgtatgttataccttaataaagaagaaaaactcatttaggttacaagtgagaatcagttttagtgcagtacttatatgagtatggactctggagtcttggatatataatcagttgattacaatcaacatctgaatgattttggaaactaagtttcctcatctgtaaaatggatgattttctgtgataactgtacatttttactttttgtataaggcataatggagtgatgtgtgtaagtcacttaccatcatacctgccacaatacatgcaagttttagtataatatcgtcctgattcaaaacatttcctgctttttaaaacatcctgctgtttagacagatgactgacattattcaatacatcaaatggtatgttttcattagttatctatttgtgacttgcttagtaattataatggcaactgccatttatgtaactctttatgtttaaaagctaatttatatacattatctaatttaattattcacaacagtgctataaaaatgatattaattttatcctcatcttgccaacctagagcctgagatgcagagacctgaagtaacttacccaaatgacatagtcaggaaatattagagagagtcataactcagtcatttatctttccctcttcaaacggaagggtacattagagtcacctacagagctagttacaagttccaccccccgtagtgtctgattcagcaggtttgaggtgggtcctgagattgctgcatttcccaggcgatgctgacactaccgtcctatggaccacactttgagtagcaaagctttgcagatgaagaaagcgtaagcatcagacctgagttctgccttcaaagagcttgcatttcttttttcaggaaacaggactgaagtatgaaataatagaagcctccctaaggtggtttatatcctgagaacaccctctttgctggaaagaaagtttcatagtagaagagaacttaagaatactcagattatatataggagaacaaagtatgcttagatacgctaattttaatggtgttcaatgacttatatgccaaaatgttaaaatggtgggaggcccctaaattaatatcctaattcaagtatcctagtcgtgttattctcacaaattgtcatttcattatgtcaagtaatattttagggtgttttaaccatcgttatttaggtctttgattgatgtgaaaattagtctcagtgctgtaaccacaggtttttgtcagtgtaaccctactgagttccagcttcttttttaaaaaaaagtacatatgtgtacccacaaccgttgttactaattgaaatacttgaagaaaagagagaaaacagtgaccaaaattcttataaaaatcaaaagctttccattttttccagctttgctttgtttcacagcagccatttatcagagttttaacaagtaacaagtaaccagtcacctattttttaagtgacagcattattaagatataattcacacaccatacaattcactcatataaagtgtacaattctgtaggtttcagcgtattcgtagagttatgcaaccatcactacaatgtaattttagaacattttgttacttccaaaagaaaccctgtccccattaatagtcattcctcatttctcaattcactctgccctttgcaaccgctaatttactttctgtctccatggatttgtctcttccagacatttcatagaaatggaatcacaaaatatgtggtcttttgtgaccagcttctttcatatagcctagcgtttttgagatccatccgtgtaaaatggatcagttttttattccattttatggtcaaataatattcaattgaatgaatatgccacattttatctacccattcatcagttgatggacatttcagccacttccacactttggctgtatgagtaagaacacatttatgtacaagcttttgtgaggacatatgttttcatgtatctttggtatatacccaggagtagaattcctgggacatatggaaactatgtttaaaccataaggaactgacagttttcctaaagagttgaatcattttacaattccactagcagtgtatgatgattccacgttctccacattctcaccagctcttgctaatatttatctttttgtttacagtagtgggtgtgaaatggtatcttgttgtggttttgatgtgcatttccctaatcctagtgatgctgagcttcttgcatgtgcatttgcttactttgttttctttttccatcctttgagacaaggtctcactcttagtccaggctggagtgcagtggtgcgatcacagctcactgcagccttgacttcccaagatcaagtgatcctcccacctcagcctcccaagtagctgggactacaaagcacaaactctttagttttttagaaatggggtctcgccatattgcccagactggtcattcatttatctcttttggagaaatgtgtattcagattatttgcccattttttaatttttttttctttttaaaatttaattgtaaaatttgaatmacttttttgtgctcttctttgttttggtcttgttttgtttgatttggtcttgttttgttccttaaccttttggtgactagtgagtagctattggtagaaagtgggtaattactaaacaaattgcaatgagaaaaaaaagaattaaatagtgtggaacacttgcaaatatgataactaagttttaccaattatgaacaggttaatatttggtttactgtttggaaaataataatgtacaatttacacattggttctaatacagtatttaatctgtatctttgtgtcatatttaataccaccattttccaaattgttccatggaatgtaataggttttatatcaaaaaggggtctgtggcttaataagtctggagaaccataggctcaataaacgggatggagtgttttaactcaagggcttccttgaacctttaatatgtaaatagacattgtaagtgttcaaagcaaggactgtacatgaaaataaaaccctttactttccctaatcatttcttttgggacttgtgttctgtggaacacactcggggaagcattgctttaaggatgttaatttttcttaaagaaagtatattgccctggagagctcagattgtgacaactggacaggtacaaagactggatgaaacagcagcaattgttaagttacgtgttacaaactcagaattaatatgggaaggatcctgacattttatgaaattaaaactaatattaattgaacagaaatagaaaaaaacctgggaagacttgagacagtttgtgattcctctcagctagctggcatgtttattttgtattacagtgcataattgaccccctgctaggtgaattggattttgcagactcgccttgttatgtatttcaaagagctctaaatttaatacatgctgctcctcagggttcaagctttgaatcaccctccttttcctgtgttttagctgggtaagtttctctcttttcaagaacagcaactttttcaatgcagacagtttaattataaagatcttctcatttcggtaatgttttagtgaatctcatatttcctcataaatttagggagaatgcagctatttctaaaaataggaattaatagttgagttgttactggcttttttattgtcctttccagaattacaaaaaaaatagtctttggcagttcacattgcttcaggttgaaagtatgcaaaatttttaaactattccatattcgtaataagtgaaaaaataattatttttgatttctcccctaaggtactagcaatgtgtccattaggaaatttagctcttatttttggtgaagtagcagaatttttgtttcaaggcaaattcagcatagatacttgattgtaaagatattattgtttgcaaatctttgtggagttttttgggggccaaattgaagcattaactcaaaagaatggcccttttcttttattgttatgttcttttcattttatttatttgctttcatacattttctaattaattttatgtttttaccaataccagccccatcactggggttctggtgaccacttaattttactgtgaagtagaagccagatgatggataagtcaagccccaatataataaagccaccttaactagttaaactgatattatagagcttagctctgactccagatatacatatataccattactttatagaacaactctctctggaatagccgtgttctctttaagccaggtatgatggtgcatgcctgtagtccagctactggggaggctgaggtgggaggattacttgagcctaggagttcaaggccaacctgggcaacactgmaaaactttgtctcaaaaaaaaaaaagttatcttcgtcattgagatgttgcattgatcacccaagtatggtgaagaattgaagagtagccaattagagtgctcgattatgaaaatatgatgcaagatagggaccaggaaggtcaccacagttcttcctggggctagttgctatgaaagataaacccccacatctcagtagcttaacactattgaagtttacattgttgtttacaaaatgctctttctggtggactgtttcccttcaagccatgattcacatggccrgcattcttccatcttgtaaacccatcatctacaaacagagacatccaacttaccctgctaggctgcatcaagccagaaggagaaagagtatggacggtcaccagtggaaggtttctgtgaatgtgactctagctctaactctgtgagctagaagtcagtcatatcaccaaacctcatcccaagggacactggggcatgtaatccaaccacatatgctcaagaagatgaaatggattttggtgaacatgcagtgatcttgacatacactgctgaatatttgcttttttatatttacagtgttgaaattaatctgactaatgaattggagttagttatctccaaaggaaaaaaaaattacacatgcacgcacacattaattatacattagtcttaggctaataattaatatatccacatgttaagtaatttctttaataagttctcttcaaattagttcaaagatgtctttgrcattcctagaaggcacattttattgatctgttctcaatttacaaaacaaataactgactctttatatctcctgaatctcctttgaacattaaactgagtagcaaagcatcacacatagcaagaaaattgattttgacartccagccttgttagttatcatttcaacaggtgccattagtatcaagaccgaggtgcctgccacagctctagtgcaataatgtgaagtaaatatccatccaagcaccctggcctcttctccaaaatagaaaatgacatcatgtaattggttttgtctgaactgctcagtgagtgaaaatgtgtttcagaagagttaaggcatgatgtcattattcctgaagtggattcttgcaaaggctgggcactcagcagcctgagtcttaaaaccagcagcagtacaaaaacctgatgcagaaccttaaccccatttatataatatggtgaattttttctcaaatgggaatatggtgcattatctttaaaaacaagaagtgatcacatgctccagaacaccactgatgcctctaagaaatcttattgaattaagacagttaattaattgtctgcaatagtcttgactcttgcctgtctctcacttgagcatgtgttgtaaattaggcaggaatatcattagggcatccagttcgttcccatgccccagtggcaaagaggggcaggacatgaagatgattttatttatttaacaaatactgatcacctgctatgtgccttgtaatgatcttagtgctgggtatatagccatgaataaaatgagattcctctttttatacataataagcaaataaaaatacaacccaatggcaggtagagtttcatgctaggaagaaagataaagcaaaatgacatgctagagggtgatgcgggagtggcatggactggaagatgggctgtcagagtatgacatttgagcagaggctgaaatgctctgagggagaaaatcataaatcatgtggatatttgttggggaaatgattataggtgtagggaacagcaggggcaaagtccttggatcggagtgtgcttggcaagtttaaagatgagcaaacatgaatgaggggtagagtggcagggattatggtggaggagaggcagaaggagcagaacatgcaacatgctggatgctgctgtaggccctcataagggactgactattgagccataaagccactcgatttcaggcttggcattcatgctctagcaccagaagtgtaatgctgggtggtctatgggctctgcatttaggctggggactaagatgtgacatttctggaccttggatgattgtcaaaggatgggaggttggttctgggttcagagaatggggaagtacattgcccattaagaattttaagagatctaagtgtgaccacaattgatgattttattatcttcacttcagtgataaaattcttcaccctcctcattccataatattctgctgctttcacctgaagttcgccaggtatgattaaacattgagtaattcagaccaaagcttccagatatctagtaacaatatacactagtcaaaaaacaagatcacacacacagacacacacacacacacacacacagacacacacacacactctttagtatatttggcaaggagaaatcattgagtgcatgaatttataatgggattgtatattttcaatcaaagatcttacatgaaaaatgttcaatcattaagataagggagacatttatgttatgtggtacccaagatatgccagtaaggttttttaaaatacactttattcatttgttcaaaagccattttgggtggtggaggcttactctgtgctactgaagacataatgaagatcaggagataccctggcagccgagagcagtggtgcatgcctgtaatcccagctactcaggaggttgaggtggcaggattgcttgagcctgtgggttggagaccaacctgggcaacacagcaagaccctgtctcaaaaaaataagtgggaaaaaaagacagagatgtccttgcaacaaaccagaaagtgaggtataactattctaattttacaaacaaggtaactgaggcacagaggagttcagcctgtgttcggagtcacacagctggtaacatgaagttgaaacacaaatgtaacttttttctacaccttgtctttttaaaaccaacaacatctttcagacacttgcacactttttttcagataattggtgtatgtaaaggatttcacttcacatggactatttggtagatatataacatcttagatatagccaatatcttgtataggaacaatgtttgtatgaagtaaagaaaaacaataggataatcaatgcaaggtagaaagtgatagcacacttctgtgattaatactaggataactggtaaagagtatatgctattttgtattactatttccataacttccaatcatgcacatggctgcttctctacaactctacaaagacagtatctaacacactgtcatacaccactgcttcctatcttgttaaaatgccaattctgacgcaggtctggtgtgggacctgagattctgcatttctaacagactccagggatgcagatgtcattgctctgtgctcttaaatgtggagtttaaggctattacagtcatttccggcaccaaccaaaacactgtgtcttggcccccacggctactggtggtcacttttgcaagaatgtttcctgggagacctagtagagcagcttacaggagttcacaaagacacaaaatgatggtaggaaggaataaagaggagaagtaaaagtgttgcaatggattctgtacctcaatcctgaagaaaccacagatcagtcacttccttcttgttcaagtgtgtcaagtgtgtcaagtgtgtcagcctgatttggcacagctgacttgatgaagcatgatctcacacagcaaagctgttgatcaccttgaagaatatgtactttgctccttggtgtaacctaaattttacctcgctaaaacaaaacaaaaagaatctaatattctactcatattattcattctggctggatgctaaagttaatttccttaagtgcttcagatactatattaaaactatccttttatcaaatattttaatataaagcttttgaaaacatgcaagagaatttcttcattagagccttctccaattttaatgagcacacaaatcaccttaaaatcttattaaaaatataaattttgactcagtgagtctgggatagggattgaaattttccttttcttaaaagatcttagagaaggtggatacagcatccttggagcactctgaatagacgggccttggaatatcttatcttcacttgtattaggatggcttttttgtgtgtgtgatgttcaaaatgatgaggaagctatatgtttacatatcaccagaagcttaaaatgatggaaaggaggctcccaccccatcatataggccattgatcaaagattctgcagtcacactatttccttaccatgatggattattcaaacaccagctgtaggaaaaggatttttttcaggaaactgatggtccattgtagtttttctgaaatcaggctgtacttgaggattactcagcgggttccaaagagtacagacatttaagatccaccccagaccaactaaatcagaatctctgggcatgaatctaatgagtagtctctagaccagcagcacctgcaagcttatgagccatacagaatcgcaggcccctccagatctactgaagtacagcttgaaaagatccccaagcaattccaacgcatgttcaattttgagagatgytgctaactgggaggcaaagctgtagagttgccgcagcaacttaattgtaaggtattaaaagtctcctttcctatctaatcgtttggatgtctgccaggtattaggaccaaaggaagacgggcagacataagaacccatccaatggtggttacattgattatatccttcctgaggcatctgaaatagtataaaataataaggagagaacaccaaaaatgtatcaacttccatgtaactagtgtgtattagcccatttttgctttgttgtaaaagaatatctgaaatttagaaatttagtaatttagaaagaaaagaggtttatttagttcgtggttctgcaggctgtacaagcttggcaccagcatctggtgaagcctcaggaagctttcactcatggcagaaggcgaatagggagcaggtgtgtcacatagcaagagaggaagcaaaggagtggggaggatgtgccaggctcatttaaagaaccagctctcrcatgaactaattgtgcaagaactcactcatcaccagggcgatggcgccaagacagtcatgaaagatttgcacccataatccaagcagctcccactaggccccatctccaatactgggaataacatttcggcttaacgtttggatgggacacacatccaaaccacatcttagtgctttacatagactgttccatctatctctcctctttgtcatgggttttggttgactttctcccagaaagtcctccctgcttgtttctggctttaaatctattgagtaaaatttatctgaaggaaatttaatcaataattcaaaacaggaayagattattcatagggagagctgtgctcacagttttgttaatttgcagtggtagcattctttatcactggctgaaactcaagtaaaggagtgaaagatcaagtatttgttgagaaactattttgtgcctagcatcatgctaaggattatggtgacaaccgcaaaaggttagtttcatggcacttgttggagatgcatgtatttaacttgcaaatagtatacacaactcgtgtgttattaagttatgaaatattgaaaaagcataacatgggagtttaataatggaacacagacagactgagcagaaaaaaaaaattagtgaagggaggtgtcattttgaatttaggcttcacagagccaacagaacttgagtagatttaagatgtggacattccattgagagaaaacagcttcaacaaaagcaaaatatataaatatacatatataaataacacacagatgacaggaaacaaataataatgagagcttacccttaaacatgcagcactattttatgttttgcatttttaattttgggcatagaatttcatgtatgttggggaaactgtagaaattcttcttattctaattaaggaaggtagctttgaaaacaagcatattttaaatagttaaaattttcattattttttcctcaaaattatagattgtggtgcttttttgtaatttttgctaacttcaaaatgtaaagttaaaggttttatgaaatatcaattctgaaaaaaattttctgctactaatgatctaaaaactgctatgttaagcaggctcttttcatagattaaaaatgctcaaaattactttgatgtaaacttcattcattatacatgtaaaaagcttggtttacatggcttataagtcagttttacagtctggctgttaagcctaattctttagataattactatgtgaaattttcgttgtcattaattcttcattgtggcaaactggcatgagtattctctattatggagtaataatattaataagaagtgcacatattcaaaataatgtagaattatatgcactataatttacatatttgtttaatgtcttattttttattatcaactttgcttgtttatttgttttatgtcacctgctgtagaatgctaattggtaacaaattatagcattatagaataggtgcaagccatcaaagtgtacatttttatgtaaatattttatttttattatagaatgagtaacctaaagataaatgcagtgcattctcagcaataagataatgctgaaatacatttcagaagatacaatatttttaaacctgacaggaaattataaaacattagcttacatgaaataagtttcattctatatgagctttaatactgcaagatctatgtctattaactgacaatggaaagttttgtgaggaaaatggttgtatgctatatctttgcttccactaacaggaaacattacagagtcacaattcttaatagaccgcaggctcctttacaacttagccatctatattactcacttttatgtccctagcattggtgatagatggtgttatttattcacaattcttttgctttccatctttgccatgagtgtaagtggagttgacaatctactgcattgacttggccctgtgacttgctttagctagtcaaatgttagtggatgtaatgactttacatgtgcttgtgtggtatgactccttctcttgcatttctgccctttactatgagaaaaatatcttttaggtagttgacgatttcgaaatgaaaaggatatgaagatcagaacccaacctgtagcataacacaaatctatatgcacaaagcacgttccatgcagtcatgtcttagttctgggatttctaggtatgggatttccttgagctgagcactacatgtaatagtgatggtgaactatctaggtatcggtttctaaaggttttctcagtagtgggacagtagctgagaaataaaggagaaattggctaggccaggagacttctccatctctagggtcgccaggtaatagttcagattacttcagagatttaaaggtgcagcattagaacatggttttccaggttagcagggtcaggcagttaccagaagattctgcaagcatgacttggtgcctgagtgggtggcgagccaggggtccctgtccaatccccaagctgaacagagaataaaatccggattatgattaagctcatatccaccaccacaaaatggagagaaaaacaacmgatttggttaacacccagtgttcaaggaatgagaaaagggataggaagcaaacttgaagcattgaaaaaatatgtcaggtcctgaaactggggggaggagaagtgggaaggagatgttctgaagagcgtcactgagaaaggcatatttatacctgaataagttctctccaatctgcctgcaatttttagctagtttgcctagtgtagccagattacagcctttgggtgtgttctgtgtcaccaatgaggagggctctgtaactgttgatgattgccatagaagggtgggtttcctgtcaagtcctccaggtactatccagatgctcccccaggatctgacagaggctggactaagggagccttctgaagaatagagtagcacacagcttgagaactgcagtgtggactgaacttgaagctcagctacatggtgttataagcagacttacaaaactacctctcagtttgggcaactgaaactgaaagtttactattgaatatagacaaattttggccaggcgctgtggctcatgcccagcactttgggaggctgaggcgggctgatcacctgagctcaggagttggagacaagcctggccaatatggcgaaacctggtctttaccaaaaatacaaaaattagctgggcgtggtggtgcgtacctgtagtcccacgtactggggaggctggggccagagaataagttgaatcggggaggcaaaggttgcagtgagccaagagcgcacsactgcactccagcttggagtagacagagcaagacttaatccccctaccccccaccctcccaaaaaagaaaaagaaacatgtaaaatacattttcatttaaaaagttaaattgtagtatattcacttttagtaataaattttttataatatgtcattaccaggcagacaaaaaaaacttcagatattttctttcaaagtgccttgagtgccttctgatagaactgctaacgagcaaaactagtactagttaaatagcactaatttgataatactaattattgtgaattgtttggatgacttctgatacatatattttactttgaaggggctttttctaggaatattgatatttaatacctgttatatcttctatttgtaaatgattattaagttggctacttgctctgcagagtattaggaatttcagtttttactggttggtggttgcatgtagttttgccaaacagaatgcttaataaacattttaagcttgttctgccttggctgtatattttagttcattttttgtaaattttctcaaaattaattgtaggctagcttacctataatagtccttaattaccattttgggggggaattcttttgtatagtaattgttctcccccaactagagtttatgtgccttctctgtccttctctgtccytcacctgaataatataatgctgaccatcatggagtaagcactgaacttataaatcatttgaattggttttttgatctgaaattcacagctgatgaaagcagttgaaagtcgatgttttctgtgagtcatgattttttttttccccaagctggagttgaaatctacttgaatatctctctcctatgacaaaggcaaaattaagtatcatgataamtttcaggattmgaataaaataatcacttaatagtgatgtgaattttcatgaacattcgcagcttgaagaattattttagtatgccatgtatttatagtttaataaaacatatgtttctctatagttcaatttattttgtgcttgaaggaattttttttttttttttttttttttttttttgagagggagtctcgctctgtygccaggctggagtgaagtggcgtgatctcggctcactgcaacctctgcctctcgggttcaagccattctcctacctcagcctcccaagtaactgagattacaggcacataccagcacgtccaactaatttttgtatttttagtagagacggggtttcaccacgttgggcaggatggtctagatctcttgatcttgtgatccactcacctcggcctcccaaagtggtgggattataggygtgagccaccgtgcccagccagaaattatttttaaaactgtggttttgtattcccaggataaaatgtgtatcttttgtacagcttcacaaattagtatgtccmtttacctatagcagtgcataaaaggatatttctttaaagatctatttgtataacattctayagtcccctctttattgaaagtactaatagcaatatttctaaaattatttaattttccagtgaatgccaaagagtcccaattatgggaaaatgtgttccattttggaaaatgctacatgcagttctcattttcactcagaaaaataaaaggcaatttaattacaaaggacgcaattttatagattggaaaaatatagaaatccagactgcttgccaagtggagtgagactgtgtgtaataaagtagattttgaaaacttatgctcaaaacacaatcaaaaagtcacagaatgtgagggtattatggatggcaaagagatatttggcaaatgtaagcagggcaggcagtccttcattttttttttttaacctctttttctaaatgccctctgctgaagtgggatagttatttaggggtaaggaaatgatggtgggaaaaaatgtgggagacatttttctctccamgtgcctgaaatcttgacattgttctctcgatcgatggaaataatcaaaaaggagaaggccatagccctggttaattaaccagctcactatttaagagcacaattctccaaaacagccatttatttctatctaataaacattaatctcaaataaataaaaacatattctctctctaattctattgtaagcaccttaagacaaaacctgagtcttctgttttgtcctaacaatggtgcaatgtgccctctagagaagacccttcctaagtgtgattgrctgggatgggcttagctgttctacctttttctaaaggtggcactcccacataccttataaatgcaggtctagtttcatcattccattaatcacatgctgacatatcagcttcaattatttaaatcaaatatttacagttaacattagttatatgaagtyggtcctcagaaatcactgtatggaacacacttttatagttgacattgtttaacaatgtccttctaaatgttggccaagtaatttgcctgaagagcccttctctgcctgaagccataagtacttgaacagacagttttttggggagatcttcctagttaaaaatattgagctaatatctaaacttatagataacttygggacatttgatttgagttaaggttagaacaatgctgcgtaattctggccacatatataattaatttaaattcttctagattaaaaaaaatsttgcagaatgctacagagctgcaaatgaagactagtatcctgttaaaaccatttgatctttaaactggcttgcttcatttcataatggatcgaagacaatggacacaaagtatataggcagtaaaataatgataaaataartgttggtactctaaaatagaaataaattagaaaattaagaacaaggaaaacaaaacacaaatgcacacacatagcagctaagctggctcatacctcagggcctttggacctgttgttccctattcttggacccgttgcttccttagatctttggttttgttttactttttgagaaggaattttgctcttgttgcycaggctagaccataatggcacgatcttggctcaccacaacctcagcctcacgggttcaaacaattcttctgcctcagcctcccgagtagctgggatcayaggcatgcgccaccatgcccagctaattttgtatttttagtagagacagggtttctccatgttggtcaggctggtctcgaactcccaacctcaagtgatctgcccaccttggcctcccaaagtgctgggattataggcatgagccactrcacccggccaccttctcagatcttttgctagctgctgctkcttcttcttctttttttttttttttaaatggagtctccctctgtcgtccaggctggaatgcagtggtgtgatcttggcttacagcaacctccacctcctgggttcaagtgttctcctgcctcagcctcccaagtagctgggactacaggcgccccctcaccatgcccagataattttttcatttttartagagacagggtttcaccgtgttggtcaggctgttctcgaactcctgacctcaagtgatcctcccgaagtgctgggattacaggcatgagccaccggcctgctagcttcttctttcttgtcatgtgtctcttttgagatatcactcttccagagatgctctccttgaccaccttgtctgaactatccttatagtccccttgtgtcatctccttttgctttcttttcttcagatcatttatcaaaatcaagttgtttcttgttcacttccatgtgtaagtattgttgtctgtctaccccaattcaaatagaaactccaggagagtttgctcactgctatatcccccagttgtgcatgtgggtaccaggtgacactttctaagtagtttaaagtgagtacatgttcttaggaacttgctatgtggcctgaagctttctagaactcaaaatgaagagagagaaattagaaaggcagatgcttaccactgctccccagggaataataatttgaaaaccagcacttaattataatagacttgtattgccaggaaccccatccagtgggtactgagctggtacagtgagaaaactgtcaaacagaactttgtacaggagatactcttattgtggtccaaatctggagggttctattagatgaagttcatccaaacatagaacttagattaagggagtagmtgtatactccacagccaatccttcacaaaactcatttgtctccattgggttttttataagctctggaaaacaaacaaacaaaagagatatttaataagttatctatttttttccagagtttcccttgttctcgtgctgatgattaactttaactcttcaaatcaattgtaagctgcctaaaggcagaaaagataatgtatttaaatatgtcttcttattcttaggacagaagaaggtccctatacatggcagatgttcattaaggatcagggtttastgatgttaatgctattatataggttcattagtcatataaaagttcattatgtgccaggcactttcaaggcaagttctgagaaacaacattaatgactgggcacagaatctcagactagaggacctcatctggtgaacttgggcatgaatgagcacagcaaattagtggcagagcctagggcttattctgctaataggagcaattctaatgttggcatgcactcacacagggaaatgtgtgatatatgtttccatcacatagggaaagcattaaaaatctacatgcttggactttactcctaaatcagagatttggggtctacagaggtgttgaaaccctccctcaatcttggagggtgtattagtctgttctcacgctgctataaacaactgcctgagactaggtaatttataaaggaaagcagtttaattgactcacagttccacagggctggagaggcctcaggaaacttacaatcgtggtggaaggggaagtaaacacatccttcttcacatgataacaggaaggagaagaatgagtggggggaaaagccccttataaaaccatcagacctcaatgaacttactatcatgagaacagcagcatggtggtaaccgcccccatgatccarttacctccacggggtccctcccatgacacatggggattatgggaactacaatctagatgagatttgggtggggacatagccaaaccatatcagagggatacactgagatacaaggggataaagcagataaaaaggcaaactctagtcaattgaatttctcatatatctttcattctaacccgttcagatgtactaatttgtcacatgccatggttacttttccctytttagactttcaagttggaaaaagcttttttcagattcagaaagataaaatatcagccatgtattaaatgcattaaatgtttttctctcagctgcttttattccaaaatattttttttttttttttttttttttttagacggagtctcgctctgtcgcccaggccggactgcggactgcagtggcgcaatctcggctcactgcaagctccgcttcccgggttcacgccattctcctgcctcagcctcccgagtagctgggactacaggcgcccgccaccgcgcccggctaattttttgtatttttagtagagacggggtttcaccttgttagccaggatggtctcgatctcctgacctcatgatccacccgcctcggcctcccaaagtgctgggattacaggcgtgagccaccgcgcccggcctccaaaatattttcttaagggtcactgacaatcttgcaaggatgtaaatgacaagctgtatttgtttgttgacattatctatcaaagaggcttctaaacacttttgtgtttctgatgtgaataaaggaaatacaacattgaataataatccaggcaggttgcaggtggcataaggcttcagaactccaccatagaaatgaacgtgattggaaatgcagcaatcaacattttgacagaaaagtgaatgtttcaactgctttatgttcacaaattgtttctattttctttttgtattacaaaatgtaagcagtgtgagtttgtgtgtatatgtgtgtgtctatgtgtgtaaattcaaaggtttatcctgtaataagatagaatcagagatagactccttgctattctcaggttattttttccttgttcacatttttttacacttgagtaaaatacttctgcaagacatattggaatagttttgtgactaaatcctagaatttgcaaaatagtgaatcacaatataatgtttcctttggatactattttggccatacttggttggctttctggaagtatgaagtggaggtttcccagtgacacctgtagcagtgcttctcagggacatagaaagacaccaaattctcttatactgggattcatccaggtgaccagcatttgctttgcaacaatcatctgtggtgattgctcaagtgtagaagggttttcaagaactccatcatggagttttgtagtggcagattagctgtcctctacttctcctggagtggctgggattcttcaacaccaaaagaggcattgagtctttcttaattggcttcagtcagagagggtggggatatgtgaaacttctcagtctgatctgttcttcagctcctcagaaaagttctacagctactccagatctgtttcgataaaggggcggtggtgcaatgaaattattcataacagcccactttagaggtctgcctgaaaaaggtggagtatttttaatagtagatgtgttgagtgtcttatccatatcctttttaccgaggctggtgcacccagcccttgagatgccgagtacattatgttgcattcctcccaggggtggcacacaggcaatgactgactcgtatgagggtgtaaacgtgcagctcccttgcctctaggtgggatgtgggatctatgccagcactgtccaggataaagtcattaaatctagaaagtttacatggattcaatgaattcctctattcgaagtcttactatgtttaatagcaaaacaaaatagttacctaatgcagttcaatacattttgatatgttgttatgatgaagaaacatgaaaattctaaaaatgcccatttgttgattacagagcaattaagttttaaatgattcaagtgagtctaggaatgtaaatcttaaccattgcagaagtgaattaaacatgtttagagaaatcacaattagtcaaaaaaggtaaggtagattattctaccttaccacagggctcaacagggaactccacagggatcaagctcatctagatgccaaatctttgccagctccttcctctgccccatcctacatctctcactcccttacaggtttcccctaaatgcattcccttaataaatcatgggacrattattttcatctcagcctctgcttctgggaaacccagctaacaatatcgaatatggaaacatcaaacccctgaatataaccagggctgcctcttacttaaagactcatgcgtgaaatgacctgaagtgcttagaataatctaccttaccttttttgactaattgagatttctctaaacatgtttaattcacttctgcaatggttaagatttacattcctagactcattsgaatcatttaaaacttaattgctctgtaatcaacaaatgggcatttttagaattttcatgtttcttcatcataacatcatatcaaagtgtattgaactgcattaggtaactattttgttttgctattaaacatagtaagacttcaaatagaggaattcattgaatccacttaaattttctagatttaatgactttatcctggacagtgctggcatagagataaacatttaattgatagcttattttatgaaaaatataacatggcaaaggtttacagttctgtttaatctcagcagtggcatgttaagaagacaaacggagattaggaaacattttttctaaataaaatacctcattttatgtggtactgataagcagtatttacaacatgaaataaattattcctcgtatacttattgaataccttaaaagtatgtgctaggagctgggaacccagagtaaaatataggtcttgttcctaagaggatacgtctattatggggagatgaaaggggggttaggggcaagcacagacttgtaaataatctatgagtaaacgtctatacaccagatttgcctagaggatggtgtatttgcgtggcaggayattgggtacagctttagcagtgaaaagagcaaagtgcaaagagaacctagaagaatgcaccactgggagctgactattattattttcattaaaggtgagtattgcataactaaaatatttcagctcaatgacctagttaaataaatcgttgtaataaataaaaatgtcttcctgtctttatgtaactgctcattttgtgaaaagcataacttggctgcacaccttttttccgccttcttctgataaattcttggagtccaaaaggtatctttcatttagtagatttttcaaaatgtttatattcatagcaagttctggtttgggtcaagcaggtggtagaaatcataactgcctccagaaatcaggagggcccacgcagtacaggacttggcaggccctggtggcctaaggtcagccagagtgcagatgcaatgcagcaactatagtaccagcattattctagaaagttcttacttcttggaagtactgacttgtaagtaaaagagcattttaacttgatcatattcactctggagtcttctacatctgaatctaaaggggaactgtattcttcctgcaaatttgggattctctaaataaagttccagggcaccagaggttccactgggttagacctttgatttattttaatgaagagcccttcttctttgttgatgtctgacagcacattcacagtgatccagtcattttkggggtaagatagaaggaatccaggtagaatacaatataaaaatgtctcaaactaggcaagagaagagtctagtcctgtggtaggtcatatttgtcaaaatatttgctaccctcttagctgttcatcctcactgagcctctctcttcaaaagattatccttcatatcccaacactgtgaggcttgagcacgtgctttgctttgaacaatgaaatacaagggaagcaatgtaatccatttctgagccaaaaaaattaagagccattgagtgattctgccaggcagtctcctgggtcatctccagaatctggagtgcagagccacagtgacccataatggacattgtgtaagcaagaaataagtatttgttattcataaatyaccagtgttttgggcttgttactgcaacattgacccattggtagaaacaactcagcttctggttaatagggtattattttaaaatccgctatgaacattcatgtatagtaagtctttgtggatggacacaggctttctatttctcatagataaattttgtaagcaaatggcaaactgtttacaaagtggttctatgatttcactgtcccactagcagtgtatgagactttcagttgctccactttcttactaacactttgtatgacagcatctttttaattttagtcattctaatacatgggtagtgatattgcagtatggttttaatttgtatttccctaatgactaatgatgtgaaacaccttttctagtgcttatttgccatcccagtttcttatttggtaaagcgtctgtttatgctgattttaggagaatagtttcttttcttattttcagattttgagagttgttggctcatatatataggcatatatatatatatawgtacacatatctatatgtacacatatatatgtgtacatatatattarcatatatgtgtgtgtgtttttcttaatacaaatcctttctttagatatatgatttttcaaatattttctccaagtctgtggcatgtcttttcattcttataacaccgtctttcaaacagcataartattttacttttataaaatctagttatcaatttgttcttttatggattttggtgtttgtgtcatatatatatataaatatttgcctaactcaaatattttatcctcttttttaataatttattttttagtttaggttttatgcttaggtcttataaaaaatattgagtcattccatctatgagcatggtatatctcttcatttacttagtttttaaatttctttcagtattgctttttagttttcagtgtataaatctttcatatttcttgcacttaggaaggcattcagctccttgatctatgagtttaaatttattctcaccaaatttgaacgtttttcagacattacgttctcaaatatttttctgcctctccccctctttcaaggactctaatgacttttacattagaccacttttctgggaacaagttccagactggaaaagtggtctaaygtaaacgttgtctaatgttccactgggaacaagtactgtgtgtagtgctgaccattgttaccccgaaatcttgaaatcttgtgggtagtctttcctcaaccttgggaagtcagtactcaagtgaatactcactgggatcctgtacagatcttcagagttattgctctctgaagctgttttccaatattcttttctgtgaactcaaattgccttaatcttcctggattctcagcaatatctcctcaactcagaatccctgggttctcctttcctgtaccaaggattgccaattctcacaagacaataagttgggttacgataggactcatctcatttgtttacctgcaccccaaggatcactgtcctttgttacctgacattctgtgtcttaaaaacggttgttttgtatgttttggctgttttttgtttgttcttttttttgtttttttgttttggttgttgtttcaggttgttgaggataattcttatccctgttaatccattttgacagtaagtagaaataacaaaattcacttataaattagtatatatattcttggttcaaggagtaatgggctaaagtaattttctccaaattgtgttatttgtcttggccacatcattaactagcaaacctactcagttttaataaatggttgctttgccaaccattttttttttttcaaccagcccctctctgttttaaaaagaaaattaagctacccactttctgtttacttacatagaattccactatttaggcttttgaaaatagcccttctgacttgtaaataacttatttgactctgtgtgtgagtcactcacttttatgtagcttgcattgttaactgcatcttccaaattgaattctggtaatgctgataaactgttcaaataggtcttttgtatgtttgcatcagagaaagttttatgggtatgtttggtataattaagtgctttttctctgtgtgtgtgtgtttgtgtgtgtgtgttttaaataacatggcataatgctaaataatccaagcaggaataatttgtttttattaagtcagattgccttctgtacatatgttggggagtaatttagtaggttatagtttcagtgtaataaaaaatggtggggttggggctggtggaaatgatgcctttcttctgtgcctaagtgataatgtaaacataagtcaggaactaagagtatctgtctgggaatatataataggatcaaacctaagcacaaatattcccagaggtagatttttcttatgctgatttagttatgaactggtaaatttgttttcatgactcaatttctacaaagcaaactttattatatatatatatgtgtgtgtgtgtgtgtgtgtgtgtgcatttttaatgtatgttcatttttttctgttgattttttaaattatgttcattacataagttcctaactgatagcattctcatcgtaaacaggtcaaactgttcagataaaataaaattcccttatatcaccttcttatctccagctgatttctttcccagaaggtaatcactgaaatgagcttggtgtgggcacctctcaatggggaccccaagatccccttctgtaacatacctgccacttttgaggtttgaatactcatgggctgctctccccttttcaaatgcctatccctgcaccatgattttctgttttagtcagtcctatatgtcatctatctttcactgatttctctcatttctggtcatcaagggcacccctttttattctatcatttggctgaaaaagtggcaaacatgaacactgacttaaaaaaaatactccaaaaataatttgagtttagagcaaaagcaaatctatcattggttaaaattttttgtgtaggttgtataacaaatttaattttcatgaatttctaaggttgtgattttacatcatttgattttagctaatagtttaattttatggtaggtttcattagaggagataaaaggctttggtttgcttcgtgtctctggaaaatttattaaatctccatagttttcagaacctagcaaatggtaagcttgtttccattctaactttatgagatgctttgtttcttgtaaagtgaattttgagagtgctgtgtgctttagcatcactggaagctgaacctcaggtagtagcccttaccttggtgtatgagagtctgcatgagtgctgtgtgctatagcatcactggaagctgaacctcaggtagtagcccttaccttggtgtacgagagtctgcatgagtgctgtgtgctatagcatcactggaagctgaacctcaggtagtagcccttaccttggtgtacgagagtctgcatgagtgctgtgtgctatagcatcactggaagccgaacctcaggtagtagcccttaccttggtgtatgagagtctgcatgagtgctgtgtgctatagcatcactggaagccgaacctcaggtagtagtccttaccttggtgtatgagagtctgcatgagtgctgtgtgctatagcatcactggaagctgaacctcaggtagtagcccttaccttggtgtatgagagtctgcatgagtgctgtgtgctttagcatcattggaaggtgaacctcaggtagcagtccttaccttggtgtatgagagtctgcatttccaccttcgaagattctgaaaaggaattaaaaagtagtgtcttgaatattggataaacttaagattacaagaaaacattctggaacatgactttcctcccgcttttgaagtttttcacttctttttctctagatctttttatagatgttcagaggcattttaggttgaattattatgtgtttaaggaattctaagataataattaccgggaaattaactcaaattacataatcatgtattcgagataagatacgttgtattgttgtggtaggcaaaaatgccatgacccagcagaatattttaaaattagcaatgtattttaaatacttgaacgctctctttcatttcagaagctagcctgcacttaagtcagaaaacaaaagctaactgccacagtgaatgaaatactttaggaagagaggagagaaaaacaggcttttctcattctgtaattctgagtgttctttaaatgtgtcagaatatttgctttgtccattttctgtgtcaatttctacttctttcttcttgctcagaaagtttcataatgctccctctaacataattaagtcatttatctttcctccctctcttgctgtttacttccttgcttccttccttctctaccacttctagtttacatagtaagggacttctttggcttttgggtagtaatttaagctccaaatttcagtttcatgttatgtaaaacacaaatgatacttaccgtatttcacatggttgttatgttgaggactgagccgcattatgtgagaaggctaaacatcatgtccttaatactgaatataygttcttttccccttttccccttttctttcttctttgctgtcccactctgagactcctttcttccaactctgagatgtagttttaaatcttttatgaaaaaaaaaaaccttatggagaaagggagaagaggtggattcatgagcaggaggagaatgataactgaacttttggcatcagcatttactatggctagtcaccattttaagcctgtcactaaatgaagttatattcatttagtctcattacaattctatgaaagtgctatcattatgtctattttatacttaaggaagcaaagtcttagattaaggcaagatcacatagccagtaagtaatggggtcaaaatgcagaccttaacattttggcttcagactctgtactttgagttcagccggtgtttgtggactttgccttaccttcctttcttttttttttttttttttgagacggagtctcgctgtgtcgcccaggatggggtgcagtggtgccatctcggctcactgaaagctccacctcccgggttcacgccattctcctgcctcagcttcctgagtagctgggactacaggcgcccgccaccatggccggctaattttttgtatttttagtagagacggggtttcaccctgttagccaagatagtctggatctcctgacctcgtgatccgcctgccttggccttccgaagtgctgggattacaggcgtgagccaccgcgcctggccgatttaccttccttacttaaccaatcatgccactagcttgcactggcctcaatacccaacgtttttcctaccttagggaccttttcctaccgtggggcctttgtattctctattccatcctttctgcaatttttccagatctttccagctcagcaaaattgccatctctccacattgccttcttcactctattcaaagtaacgaagggtacttcccccaaagcaactgatgttcccgtggcttgctttattaatcacaataggacatgatcttctacattaggttttcctccatgttttctggcagcctctgaaggatatgagccataacagagcatagacattgcttttttctttgtagcttaatctccagtgcctagtatcattcccagcatataatatgtttaatgtgaactgaatgagaaaactaaatgagaggcttaattttatacagcagtgaaggtatgtcccagacttataatttaaggagaacttactctctagaaatgtggagtagctggacgtggtggctcaagcctgtaatccaagcacttcgggaggccgaggtgggtggatgacttgagcccagaagttcgagaccagcctcggcaacatggcaagaccccatctctgcaaaaaaaaaaaaaaaaaaaatacaaaaattagccaggcaggggatgcgcctgtagtcccagctactcaggagactgaggtgggaggatcacttgagcctgggagatggaggctgcattaagcagtgatcgcgccactgcgccccagagagagagggagatgcagggtaattgatttgtacctttactttgaaatgtttaataattagtgattttctcagtcctctctttttctcatgggcccctttagtaaatgctgatggacaagattcacaggccatactttaaagccattgatggaggtagattttcttcccagggtgcttttttggcatggagttggctaagaatgtccttaaaggccatcatacataggtggaaagtagaaatcagttcaaagaaagactggcagagcagatcataagtcaatacatgaatcaagttggcctgtatcctaccaagtacaatcttttgtttagtggtgtatctactaccacactctcaaactcctaatgatactttaaaattaaccttcatgctcatttttataataatgttgaaggtcaggcaagagataatatcctcactttacaggtggaggaactgagtcaaagaagtacaggacttgtataaagaaaagctagtctatatgatgtctctaaatcctgggtctgaactactttaacgatattaaaagcttgcttgacataaaattttaagactgttacgattagagtgaatgtcagtgatatatgtgtctaaggaatttgataaatatacatgagatgctctaatgaattcaattgcttggaagtgaaggggaaaatgcacaaatttttacttaggctcatgcttttcatgtagaaacaaacattgaaatttggaagtgaaaaatctacctcttatcttgggtatatatgctgcctatatatatgcatatagtaagatgtttaagtttttaaaattaactgcattgttgartatttgaaatacacatctgwtatttgttattgaactttaaaatgatatatgaggatttaggtaaatactgtctgtctaaaattaattttggaaagtaactcataagatgatattttcaatacagttttgccagcaattattaaatatgtttcgagaagaaaattgctattcaaattacccatctcatccttggcactttctaaaaaccagacaaatattttttagtttgtgaaggctgctcataacagttacaagctaattaattataaaagatttagccatgcatttgaccataaaatagattggttgtggctgctggattatagttttagatgattttatgatccatgtattgccttgacttactgatgatttaaatgattgtgtgtgggtgatttaaaaagcaataagattaataaaatatttattttgggtaaaggtacagaatatgttttgaataaataaagtatggaaaaggtatctaaattcctcatacatttttaaaatcagttaataaatagtaaacatgcaagaagctcattaactatagaaatttagcctattaattagggagtgttcatttttaaccactatgttcattttctagtctagtacataatatttttcacaagtcttcagaacctcatttttccttttatataataatgactctccaaatatctttttgtttcttggtcattatttatcttttaataagacaataaaaccaataataaaagtgtattcctatagccaatagccaagaatcaaaatatgcctttatgggtttttcttttcttttctttttgagatagagtcttgctctgttgccaggctggagtgcagtggcacgatctcagctcactgcaatcgctgcctcccaggataaagtgattcacctgccctagcctcccaagtaactggaattacaggcacgtgccaccacgcccgggtaattttttgtatttcagtaagatggagtttcaccatgttggccaagatggtctcgatctcctgacctcatgatctgcctgcctcggcctcccaaagttctgggattacaggcgtgagccaccacgcccgaccacctttatgttattttatttaaccttcaaataattatataaaattgatattatttctttactccaccaatgcttattgggcaactaacaactatgaacccttctgagaatttggggtacagtggcaaaataaagttgtcaaagggccctgtccccttggggatcacaatctcaaggcggcggggaacatccggaaataagatagttatagttggtgatgcattaccagagacrtgtgatgccataatagtgactaacccaaggacagtgagttagcttttgttgcataaattacccccaaaatttagtggcttaagacaactctttgtttaggctcatgtttcggctatttgaaatttggggtaggcccagctagctgtttctgctgatgtacgtcagactaagttcagttagaggaacttataggagagctgtgaacttccagatgagtcgaagacaggctgagggtatcctcaactgagatggcttatttctgtgtcacatggtggtggtagggatcccaagtacagcacgggtcattagtaaagcagacgttctggccttcatttcattcttttgagtgtatgctgtataaaaattgaccaaattatccacaaatcttcctgtaccacttgtcaaggttgaaaacccaagaaaaaataagattctttctmtcactggagtgatattactgagcttttcagagtctattctcatgccaagatgtatgtttgttaaattttgagccggatgtggttttcattcagaaagtatttgatgatgacttctcaagcaaggaataactataatagcttatgtgcttttgggatattttaggtaagggtgaaaataataattctgagaaacatacaagtattgcttttttcttcacattccctaattttcttcttttgtacattccacggaacaatgccttctcatatattcacctgacgtgttgaacatcaatataggattgaatgaagcaaaaccttatgtatgagttacactggagaaaatcaaataactatatatttttttctggcattagaaagtcagaaagatatacagaattagtgccaatgactgtatcagttgttcaatgaagagaagataaagaggtcatatagcagagaattgtatttgtatactcttgtctataaaatttagaacattttggttgttgtttaaatttatataagcttgttttattcttggtatatgtgccaatatctaccctttaaaatccatgccattcaggtagctcaaaggatatactcaactctgacatttgtaataagtgaataggctaacttgctgcaatttgataaaaacagaagcacacattaagttaaatatttgtggagatttgggtgtgattcacaaaacttttctctcattttatttttcattaattcattcaaccaatgcatactagaagtgtattatttgttaggcattgttttcggtgcagggaacactgataaataaacaggtaatgttactgctgcctttgagcttctagtctattaaacattagatggacaagtcagtctttctactttttagaaacaaccagcagataatatttgttaacaaaagtcatgatgtaaggaatttactaaaggaattcagaaaagattacatatttttctggttacataatataagaaatttactgaaagattatagaaaagattatgactaaactgtatccagtattttagtgatttgtttagcagattattaatttaggtaaaggtcattttgattggaaacatctatcaaatcagtccatgaggtaaaagaaagcaaaagaaagcagagtctaacaaaggagacagaacattttaataagagatacctttaaattatattttataccatacgaattggtctctttgtttgagaattcaaatattttacagccaataccacatacatttacattcggattctatatactcttctagtttctagttatatacagatatttcagataataagaaccaaatcttgcctcaaatgctaacatcgtggatgacaacatagagcctactgtaatccattrtgatatgagcaatgatggtaggtttgacagctgcatagggatcacaggagaaactgtacctgagctgtacctgtatcaaacaactacataattttttctgtcattgggaagtcagaaagatatacagaatcagtgccatacctgagagttcaactgtgtgcaaatagctcacaccgtctctaagtgttttatttctataataagaaaggtaagatttaccaaactctttcttctttatttttattatacatcctttattagtgattactagcccatgctcaaatgttagcttgcctcgaatcaaatcctagagtcactcttaattatttttatggtattaggtaagtgatttcacctccctaagacatagtttcttcttccataatatgagatttatgaggaaggtcctaacttgtagtagggtggtcaggaggcttaagtgaaatcatagctaaaacagttaacaattcctgaaaccacacaagtacactggatatcctgactattggtacttgtattcatacttgcatttataatacgcatttctcagataccccaacagttcatatccagacacccccaatggatacacctgagactgataccaggtcatcatttttcgttctcatgctgccagctacacaagaggcacgcactgtggatccacagacgaaacagacagaggctatgttccattcaagacctggaacagatgatcccttttccacgacaaggaccaacctctgccaaaacaaatcacttggcacaatttctaactctaaattaatgtcttcacttatttgcttaataactccctccatcctcgctgtcagatcaggctaggagagactccattggatgagcagtagactgctcttccccaggtgcctagcacagtgcctgatgcaccacacgctctcagtgtgtgcttgttgaagaaacaaagacacagtctgcccttttcattgaaagcagtgccccaaggcagcgggtccaatccaggtcacctccattgtgccttcccatgagggcttgctcaaccctctcccacctcctgtggccacctctctagagaagcttcttccagcttgccagacagtctagcttggaatgctgaacagcatccctggtccttctgaattttctagctggggaagcaaaatgtcagtctatgattaatcccacacaataggtggtaagaaacataccgatgccatatcttggcctgaggcacaactcttctatggagttgagtttcctgtaaattcgtggctgttgattgttagtgtgcagtcttaaggccttaacatgtatttataaacagtcttctttttaaaagtgcaggagcagtgtatatagtatgcggtatgccactattttttttaaaaaagatatatcgcatatatatatatatatatatatatatgactttttcttgcttgtattatccctatgttttattttattctccaaagttgatattgttttcttctaaggaatgcaattccaaaaaaacaaatattgaaaccaataaagacataaaatttatggttaatagcttcatttcatttgttaaatgtaattaacgtatctttttattactaagattatttaccattttaatgtatataatgactattgcattagattttatttttaaaatgctgttacgcaaacttaaaaccaaaattaccagtgttctatgggacagctctaaatacagtatagctattaaaaatatatattcttaaagtgtgctaggaagaaaaaacacttgacatgaactattctgacatttaaatcttctcttattcttgtcagcactgccacagcaaatgataaaggtggtattaatagccatataattttctgaaatttttgtaacattttttaactcacaaggcagctggacatgtttacagcttgaaatcttttattgcattatttgtaagatattaatatatggatatcatatatgaaggaaataaaatgcataattattttctggcacattgacttgcatttaattaaatagttttttcctacttaagttcatctatctatcgaacatttctatgttctagttattctttgaacaactgccttcttatagataagaaaattttcggtttgctgattggtaaattggtagttactcctccatttttggttcttgttagttttctaacactaggttcaaactcttgaagaaaatattttgttctgcatgcacctttgcagaattcttcgaaaatttgctggcagaatagttgtagaaaaccccaattacagataataattttgccattttcctgatgacccctagagaggaataaatttgcaaaattagtttaattttgttttactcctgtgtcttgtgctttctcatttcctttcctcaagttatagaaaatacataagcccagtacagattcagtcccctcttccactctactctggccagtcacctctcttcatcaatcctggggatgactaaagagaagtagggaatatatgatccttccactgaccagctatgtgcagggacatttggcaactgagttgacctttatctggacaatgatagaatgagaacccctcttagaggttaatgtgaagatcaaattagttaatagaagggaagacactttggaaagtgaaccacaaaggccaccagtaggagtagaatactaggaaatgatctttctaaatgccaatctggtcaagtgcttcctgcagcctgtctccaacaatacaaagtatccaagctccttagaatggcattcagatctctaaggatagctgatggcttcttggactgccctttgattcctaagagatactgcccatggtttttcctttcctcaaattcctggtaagacacctctgtcttccttctacacactattcaataccgtcttctctttgacatgaccttttccttccacctcttttcacttctctcttacytgcagggttaggagacacctgctatgtgagtgtatgtaaaccatacttcacagagcaagccttaaaaaaataccagctttcatcctttttccttcccttcctattaaaccctatacagtcatatgtacaatgtattgaataagtatggtgagaaaagaaagtgatatatttgtatttcttgtacagtcttctacaaatctctgaaattagacatgactgtgatttttttttaaaataagtggatgttaggatctgggctaatagggttgggggtctgagggagacttttcattgtatacattgatttgatcttttgaatttttaatcatgggaatatatttctcatgtcaatattaagtaacataaataaaaatttagtataaaattttaagtctagaaaagtcgaatgtaaaagtttcattcactcgcctaatatctaaattatgtgacttacaagcatatggtggagaaaagaatatggctcccattatcaatatttcctcccttccccttgtcctatttctcctccattactcagtagaacactctgacatccttagggttgaagcagaggtggagaggagagttaaggagcataaagattttacttgaaaggcattggtttaatcagtttttggcagctgagcttgacagaaaaacaatgtatttctcagtctggctatggtcccattgcagatcaagagggggctgtgctctgtgtcacctccactctaaggcccagtgacggagcctgcaccgtttctaatgtttccggttactgtggcagaaggaaaaagcrtatgacgaatcacacactggctcttcaaatgtctgcccagaagtgacacagtccccttgagctataagttcctggtcaaaacaaacaacatggccacacctaacttcgaagtgggcagagacatgcagtgacccatgtatctaaaaatactaaaaataatggtaaatagcactgataaatattttctgaaaaatataaatcaagagtggaattccttttaatttttcatttagttatagtttgggctgtgagatggttgtgttacacatgaaattcacataattagaaaactataggtgagtatgctttaaccccctgccccaacttcctcctctttctttgttcttgttttcttcccctcctctttcgcttatattttcctctgacctcaccctaaaaacacagtttaacctacaaggtaccagaataccaaaccaaaccaaccaaacaaaaacaacaacaaaaattgggtgccctctggaatgtttggctccaaaaaaaatattgaaatctatagcaccactgaaatgtctaatattaccaatgtggcattaataaatggacagtcgtgctcttttgtagcttttctctctggaaggaagatattggatagtttttgttttttagagacaaggtcttactttgtcacacaggctgaagttcagtggaacgacattggcttattgcagcttgacctcctgggctcaagtaatccttctacctcaacctctagagtagctaggactacatcaccaagccgggctacttattttgaaagttttggtagagatgggctcttgctatgttgtccaggatggtctcaaactcctggcctcagcaatcctcctggaggccttgatatccaaaagtgctgggattacatgtgtgagcccctgtacctagccagatagttcttactgtgacaaggggacaagaagccttttctcagggaggaccaatggcaattctttttaccccacactctcaacaatgattcttccaggaccatttccatttcttcagtctattgcctcctttctcattgagtggcgagcactcttgagacccagcagtttgctctatctcaacccactgtgacaaataggtaaacataggctgggatgtaaggaatggataatggatactggttttagttaccccaccagagacattttaagttaatgcaattgatgagtaaagcaacatgtatggttctctctcaccaggagaggaaaggaatagaaagaatagagaaatatagcctactagtcagtttggtgtttgttccaaaataaaccctaaaatctttgcagaggcaaattgcttattactgtaccgtcaagtgaaatgctccatgaaatatgttctgttttgctagacgtgtttggacaatttcctgaaactgttaaactgctcaatggtattaactcttctccaacaggccattagaaattttagcatttaaaagagagaagagggaaaatacagttggctcagttgagaagcaatctcttggagctggtaattatgtcacatctgtttggagaaacaagttggcctttaagagagtgaatggggtaacaatttaattaaagatgggttagattgcatggaaattacttgctattattattggaggaatctatcaaaatggaccactgggaaagcactgttttcactgtttcttgaggaaattgttcttggcataacagtagaatttaacttccttttctgaatgtaagtttcagccctgctgtatggaggagtgagatcattgcatagggtctgtgcacttccccagtttctgttttcttcctttcttactcagatgctgttcttttataactttgtttaacataacacttgagccaacatggtatgatctggtttgtggtcgctttctttggtttgcaagaattttggaaggtattatttgcgtttaaaacaaactatttgcctattggccatctggccagtaattccagcatagaattctaagctctgtgaacttgaacctaactcaattgaacttgctaatctaataataagtctattgccccacctcaatattaccagtgggatggtagaaggttttataagcacctcagtttttttctcagtgtgaaatcatctatatcaatctttttggtgctgtaccctatactgaacatggaaattccaccatttaacrtgctaaacagctagcaaagaactattccatagatattgaacttgaaaactatacattttaataagccaaagtacatcaggaaaaatcagagctttaatgaagctacaattgtagatatgttaaaaaagacaccaagttcattgtaaatgaatttccatttgttggttgattatttatagggtgaattgccaaaaaagatagagttaaataatcagtccatctaactgaccttaactaatgtaaaattactttctgtaagcccaggttagttataaaaagwttgaccctttaccgcagtttatctgatataatctcagattaattaatcttgattagtttgttatttgcctcagatttttaattttaaaaggatattattggaattgtactttttaaaatagttttaataaaaatattacataggtctattcatataataaaactatagtagaaccttgaacaaaatagaggtgaggagagctgactctttacatagtcaaaaatccacttataactcttgactccctaaaaacttaatgactaagagcctactgttgaccaggagccttaccaataacatagtcaattaacacatattttgtatgctatgtattgtatactgtattcttacaataaagtaaggtagagaaaataaaatgctactaagaaaattgcaaggaagagaaaatatatttactattagttaagtggaagtggatcatcataaaggtcttcatcctgtttgtcatcacgttgagtaggccatggaggagggggcatgggaggacttggtcttactgtctcagggatggcaaaggcagaagaaaatcagaatataagttaatcttgcaactcaaactcatgattttcaaggatcaactgtaatttcttagtaataaaccctttagtctcacaagtgtcatgatttgaacaacaaattgtatggtcacgttggtcaccctaggtagaaatttgctgatttcagcaaattggaagttactgcatgattgtcaggatctgagaaagcaactgagaagtaatagttacaataagttacaaaccttttaggacggtgaacattttaaggcgtatgttttctccatgtgtcacaaccaacagtaaacaaagatcaaaatcatggtagaaaagcaggatttaatggacatcagagaaattgcagatctggaatacaaggcaataaaaatttacaacaaggaagtggtaagccagagagagctgcttcatggtggtaggcccagggggattggagagagtggtgccagaaagttggatagaaaagttaatgcaacaattataaagaagataadaacgtagtatttgaaaataaatattttaacaagataaatataatacaaaaaatggaataagaaaaatacattattatcgaatattctgtattgagttttggaagtttatgtgtctccttttctaatgccatgattttgcaatgcattattgttagtaatttttaggtctgcctatccaaattaggcttttgcagcatctaacaccctccaccctagctcacttggtgggtgagcctccaatgactacacccaaggaggatttaacacagggattttatgacttgcaacaagtcaggaggacatggggttggggtagttcagcagtgcctgtctgaacaaaggtgaaaattgggcttttattgggctgatcaagggggagtaaaggcagccaggagcagtcgcctgtcatgcttctacctatattgcatgtatagaaaagggaaaataaactccttcctgggcagggttttagtatgctaaggaggggagttattcaacttcaatccaactcaagcatcagcattgctgcgtccatcccagttttgttttgctggggctgaacttcttcctataactttttgaaacaacaagaactcaaggtgtgacagttacaagtgggccctttttcacagtgtgtacctaaacacgtgaggaccctggattacagaatgacagactcgaagtgactcaagttccggttgttcatctttagatggtaaagatggctgtacgtactatccttgcttatttccaatctattgtttaaactcttgtatatgtaataccgcagaggctagagatacaacctttgaccaaatgagtgaattcaagtaatccattactaatgtgatctggaaacaaacatggtgttgaatgtgcatatgtcagttctatgttgggagttcactataagtaggagttctctaaaagcacttccacgtagaatgcaatgattatttaaaaataagtaataaaaatgtgcaaatttaaaacatgtatatgctttgaattatatatatatatatgaattatattttactatgtatacaatgaaaactgaacagtaacctcagctattgtataaaagtgaaaccaacaaaagattttttggggaggaagattattttactactgacataaagaattgccaggaaacaatgacagcaaacacaaccaacttttagttgccatttaagaaaaattctttcagataatgcattcctttattacttgaacggagggcagaccactccgtccattctacccttggcacacatcacttcctaaactgtcttattgcttttaattgtatattttttcccttaatttcaattaaaatctataattcattagcygtcaaaacctgacctgtttgaagtagtagcaattcaacattaaacctcgactagtgttgaataatattttggggctttgtgttgtatgctacagagtgaccccccmcaagttccttgcccatgtgtggctagacaatggaaatagttccgtgcttcaacatgttccccaaacacattccacaggagagcgcatccgagcatcaattcttgtaagacaactgggaaatgaagtcataatttgagctgaagcaaggaagattattaaatatattttccatgtgctttgaaaatatatgcaaagtaaagcaatcagtgcttgccactttgtttgtattctaaaagaaagctagttaaggtttttcatcaaactgtattcttctttaggcttataaagtaccatgaagaggaggtaaagagagagtggatatttcagtggctaaacccaaagttttttagcatttagactatggcaccctctagaaaagcaatttaaaatgtgaaaaaagagaggwcagttaaaaaatagattagatagataggtagatagatggataacaggtaggtagacagatgattgataaagagataggcagatcatagatagatagatagatagatagatagatagatagatagatagatagatagatagcatgaagatggttgaggtgactacaccctatgcttccttctgaagtttcgggaataattgttcattttccaagtgactgctcaatacaacattgctctgttaggtaatttaatgactggtgtaagtacaaaaaacattgccatctgctttgtttcttttggccttaattataatgttatcttcttttcagaggctatattgtgaaacacttattattcaccattatttctggcagtgattataatttatgaccaacagtgcagcactgaataatgtcttgattgattgactgattaatgtagattttgtaggtgataagggacaaaaagcctgagaagattttctggaaatgtaaaagtaattttattttctactatgtttgatgcccaaagatcactgtactgataattttagtgaataaagtgtcaactataacaaggagcttgtttattctatcaaccatgtgatttcaaaactggagcttgctttcacttttgaaattttccataagctaaatctaatcctctatatttacaacgaaattaattttctgagttatttattttaggataactctgatctttttcttttctttttctttttttttttttttttttaagatggagtttcactcttgttgcccagactggagtgcagtggcgcgatcttggctcactgcaacctctgcctcccaggttcaagcgattctcctgcctcagcctcccaagaagcagggattacaggcatgggccaccacgcccagctaattttttttttgtatttttagtagaggcgaggtttcgccatgttggccaggctggtttccaacccctgaccacaggtgatccgcccgcctcggcctcccaaagtgctgggattacaggcgtgagccaccgtgcccggcaaccctgatctttttcaaactgcaatttaaaatttactgatcacacagaactgaattgatttttaattgtcattctgaagaagtaattaaactttaattactacttctgaaagagagggtttttactaggactttttctgacaggacaataatttcattttttgcaatttttatttataattggcaaataatgattacatatgtttatggggtacaatgtgatgctatgtgtatatattgttgaatgattagatcaaactagttatcatatccatcacctcacacactaatcattattttgtagtgagaacacttaaaatctgcactgttagcaattttgaaatatatattattattaattatggtcaccatgctgtgcaatagatctcaaaaattattcctcctgtctaactgaaactttgtaccttttgattaacatctctgtctcagcctctggtaaccaccattctactctctacttctgtaagtttgatttttttagattccacatataagtgaaatcataacagtatttacttatctttctctacctggctcatttcacttagcgtaacttcctccaagttcattcatgttgttgcaaatgacagaatttgcttcttttttttaaggctgaacagtgtatatatacatacaaaacatttctttatccattcattaactgatgaatggagataaatatatataaaacatttcttcatccattgattaactgatggacacttaggttggttccatatcttgcctgttgtgaataatacttcaagaacataggagagtggatatttctttaacagttgatttcaaatcctttggatatgaacatggaaatgagattggtgaattctagggtaattctattttcagttctttgaggcatatctatactgttttccctaattggctatactagtttatattcctgccaactgtgtacaggggttccctttactccacattctcgccaacgttcgttatcttttgtctttttgatgatagccattctaacaggtatgagctgatatctcactgttgttttaattttaatttctctgacaattagtgatattgagcattttttcataaactggttgaccatttgtatatctactttcaagaaatgtctatttaaattctttacccatttttttaaaaaattcgattctttgttttctgctataagattgtttgagttccttatatattttggatattcactccttatcagatgtgtggtttgcaaatattttctctcgctctgggttgtctcttcagcacagaaatggacagtcrcacgttaccacctgtatgatcattattttaaacacaagcaggaaaagcttttgggttccaaagtttcagtcattatgattgaaaaactgccaaactggtagtgaaacatttattggattggggattaagctattcattcttttcgcattaaaacaatgatgtagttttattcgtaaatctataaagttaagtgcacagtcatcacttttagtacgttctgaktcattgaaatcctgtaaaattttatggaaaaatctgtgtaaacaagctttaaataaggcaatattccaataccaaaactcgggatttaggcataggtgctatatttacaattcttaagtaattttcatgtatttcacatatttttaaaactcatgttacaaaatagcctaattctctttactttctgtgtatgagggaggaattaacattttgtaatataaacctcccaaaagttattcagaatatttctaaaataaactgttttagattcttggagaaattctgtgatgtcaaaatctctttcctttttttaaacaataaaaaacattgtggctttgtttttttaattgataaataataattatatacatttatggggtgcatttatggggtgcaatgtatacatatatcaaattttaccccatattgtacattgggtacaatctgtaccctcataatacaaattgtaccccaatgtacaatatggggagcaatttgatacatgtatacattgtggaaggagtaaatccgactaatatatccattacctcacgtacttatcatttctttgtggtacaaacatttcaaattcattctcttagcaattttgaactatacgttattattaactctagtcacctaatgtttaatggatcaccaggaattattcctcttgtctaatggaaactttgtaccctttgaccatcatctccccttttacctcccaccctctcccaacgtctggtagctaccattctacttcctacctctacgagttcgaatttttagattccacatataaatgagatcatgtaatatttgtccttctgtgcctggcttattttacttagtataatggcttcatttttttaaaatgtttaaaccaaaggtttcaatacataaatctagacacaaacaagtactgtgtgattccattttttataaagttcaagaacaagcaaagttgatcaaagacaagagacaagaaactttcagtagtgttggacatattctttaatctttgtggaggccacacagggatatagatgtgaagaaattcactaagctatgcagtcagtattagagcccctggatgtacatgtgttatgcagtaatgaagggcacacacacactcattcattcacacacagcaaaagcaatctatgaagtgacaacacgacacagtgaacactgttttcatggtaaagttgcaataagacaaattacattatttttacagtataaacaattatattcaattaaatgcacgaagtgtgctagaatatattggataattcggaacgaatacctatactgcaggtgctgaagccaagagagaaacatccccattgaagtattgtaagaattctgtcccccctgccagttgctatgagatatcactgaaatatggtagtgttttctaaaatctactgcatgaggataggacaaacatgctttcagtgaaatgataaaacgctaccagaactaaaagaaacaaaagtggtcaggtgcagtggctcatgcttgtaatcccagcactttgggaggccaaggcagaaagatcgcttgagctcaggagttcaagaccagcctgggcaaaatagtaagacctctgtctctattaaaaaaaaagttaaaaataacaacaaaaaattagctgggcatggtggtgtgtgcctgtagtcccagctaccaggaggctaaggtgggaagatggcttgccccagcaggttgaggctgcagtgagccaagatcatgccaccccattccagcctggacaacacagtccctgtctcaaaaaaatcaaaaaagaagaagaagaaaaagtattttaaacctgtcattaagaagaaaaaagatgtaattacacacttarggaggccagagtgggcagattgcttgatcccaggagtttgaaaccagcctgggtgggccgggcatggtggctcacgcctgtaattctagcacttttggtaggccgaggtgggcagattgcctgagctcaggagttcgagaccaacctgggcaacacggcgaaaccctgtctctactaaaaatagaaaaattagccaggcgtggtggcgtgagcctgtagtcccagctactcgggaggctgaggcagtggaatcacttgaacctgggaggcggaggttgtagtgagctgagattaggccactacactccagcctgcgctgggcaacagagcgagactccatctccaaaaaaaaaaaaaaaaaggaaaaaagaaaccagcctgggcaacatggcaaaactccatctctacagaaaaatacaaaaaaaaattagcaaggcatggtggtgtgcacctgtagtcccagctactcagaggctgagaagaaaacagattatctaccgtaataaagcaagaaacccaatccctaaacaatactgtgccccatagagtaaagccgtttcatttctcttttagtactttttctaccctaacaaagaaaattgtggctaaaagttaaaacaaaaacagtatctttttgctagtttcatgatatatcttgtatgtatgtatgggtgaatattcttatattattatttttggttcatgtaaagtaatttttccaagtgaatatctaagaccaatgcttctgaaactttaatagtcatacaaatcacctgaggattttgttaaaactaatattcatctccaggagttcaggggttaggctaagattctgagtttccaataagtacccaggtgatagtaatgctactggcctacacactactctttgagtaataaggtcttagattaaagtggacttgggcccactaacattgattagcttatgacaggaagacaaaaaacaaaaacaaaggaacaaacaaaaacatagaaggtaaaatgttaaaatcaaggcacaaagtattgctgtatggaaagtgtctgaattttcaatatattcagccctggaggaagagcttcccactaccacttatttactgtttctgttctaaactggctataatagcccttcaattatagagctgtttcagtaatagcatctgcttcattataacagcagttttattaaactaatagttgttagcatgaagacaccattacagtaaattacatttataattatggctctaaatatactcaggttgcatacaattattaaaaatttccaccctaatcatttacctttcctgaagctttcctcctatcacatagatgctgtgagcgtgtgttagtgtatgcaggcttttctatgaggctgctttcctatatcccatacaattattcaaactgatgcctggtgtatctagaaatttgtattcctagctcagagagcagctaattagaacctccttcccaatctctacttcccacaatctgggtcatttccttgtttagtgccttgatcagaaataatttattgtctggttgtgcatggctttgagggaggcacaatataaagaaaagttcatataagaaatgtgcacatttaacatcaatgcataacaaacaccccaaakcatagtggcttcagctaaaaactgtctatcattgcatttgggacagctgggagtgcttatctagatttggctcagctgggcaggttagttaaggtggctctgttacacagtgtctttattagtctgttctcatgctgctaataaagacatacccaagaatgggtaatttataaaggaaaaaggtttaatggattctacatggctggggaggcctcacactcatggcagaaggcaaaggaagagcaaagtcacatcttacatggcaacaggcaagggggcgtaaggaggggaacttcccattgtaaaaccatcagctcttgtgagacttgttcactaacatgaaaatggcacaggaaagaccctcccccctgattcagttacttcccatcaagcccctcccacaacacgtgggaattatgggagctacaattctagaaagacttggtctgggacacagccaaaccgtrtcatcatctcacatgtcccctctgagcccaggtcctcctggcagtgacccaagcacatgagaacacattcaaccatgacagcacatttcaagcctccgcttcattgcttctgataatattactctggccaaagccagttacatagttaagctcaacttgtgttaattttgcccacaatgaggccaaagcaagtcacatggccaagatcaacataaatggagcagagaagtgtcatctcctatggaagtgaacagaaatgagtgatcatttcagaacaacaacctactctatcagagatagtttcccttttatacatgtaagtacaataatgttgaaagtctctgagtttattttcataacatgctaaatagccacagtcttatttagccaaattacaaacattggaattgcatggtttcttttagaatctaaggtttttatagaaaatataacatcatatatatatatatatatatatatatatatatawatatgtattccattttgatgctatatactactagtcagtcacctgtaagagtttttgactaaagttttcggcaagatagatatagttgagtcatggtcaaggtgaaaagggtattcactcaacaagaaaaccatccatcaaagatttccyatgtgccctttgttacggctgtgcagctaagtacaacacagttccaggctttacagttcttagagtgtttacagacaaataagtaagatgctcaatatgaggtggtaggtcctgtgtactgggtgtatgccagatttcacaaggagtgagtttaaccactggacagcagagtgggtgctagagctgactcttgaaggatcagaaaaaattcaccacaatagaggggttgggygttccacatatagagatgacattgggctgcattcggggagcccacaagtaatggcatagaagtgtttgtgtctgatatccccttccagacatcccacaacctaaagagctagacactgagggggcctgcatggtgagcctagagccaactcaagatgcaggaacaaaacagaatttattggaacatagaaagatatgaaacaacagtagttgctctgagaggcgtcgtctacatttgaaattgctgggtgttgtgctgaacccttattaaccccaataaggaaggcacaagattcaagaagccaaagaagagacccagaggcaacaaatgagacatggggttttattaaggctcacatacaggggagagaggccagtggtggtgagctaaatatgataacctcatagcccagtggcagtgggctgggcgggaaaacagcaactgctagcaatcagcatgcactttatatagcatttccacttaacacmctcccccagtgacctccacctggcaaccttcatattgtaacctaaaactctgggcctcaatcccctgtacggcctgtgttccacaggactgaataggatgggaccggggctcagatgttcctcatggacaaggaatgaatctctggattggctactcctggattccctagttcagaacatacattcaggtgctatacaaggtcattctaaggttatgcttaagttattgctgtcaggtatgtttatcctacaccaggttgataagacaatgatgtcatcagtcagagccacataarcttgacagccattaaaagtttatcttcctggctaggcgtggtggctcacacctgtaatcctagcactttgggaggctgaggcaggtggatcatgagatcaagagatcaagaccatcctggccaacatggtgaaaccccgtctctactaaaaatacaaaatttagctgggcttggtggcatgcgcctgtagtcccagctactcaggaggctgaggcaggagaatcgcttgaacccaggaggcggaggttgcagtgagccaagatcgcaccactgcacaccagcctggtgacagagggagactctgtctcaaaaaaaaaaaaattatcctattttatttgtttttaagataggttctcgctctgtcacccaggctggagtgcagtagcaatatcataacttacttgtcttcattgactaatgaatcccaacatgctgagtttgattgtcaccttttctctcccagcttcagcaatactatatgtttagaattatagaattttttcacagctcacaaaggagcctctcaggggtgggatgtaggataggactgaagaaagaaaaccctactggggagaaaatatcaagtggagactgagtattcatttctactctttgctaaagagtagttaatgtactcacagtttatgttcagaacattgtcagtttcagagaaagatttcattagttcattagtttatctataaatttatccatcctgtacttattgggcatctactacagcagcagtccccagcatttttggcaccagagatgggtttcatgaaagacaatttttccatggaccagggcagcaggttgggagggctgatggtttcaggatgattcgagtgcattaaatttattgtgcactttattttattattacattatagtctataatgaaatacttatacaactcaccataatgtagaatcaatgggaaccctaagcttgttttcctgcaactagatggtcccatctgggggtgatggaagacagtgaaagatcatcaggtgttagattctcataaggagcatgcaaagtagatcccttgcatgcaaagttcccagtggggttcttgctcctataagaatctaatgctggggccaatctgacaggaggcagagctcaggtggtgatgggagcaagggggagcggctgtaaatacagatgaagcttcacttgcttgcctgctgctcacctcctgctgtgcagcctggttcttagcaggccacagactgatagcggtccatggctcaggggttggggactcctgtactacagcatgccagacaaaatgcccactgaggttggaaatgaagcgaaaacagacacactccttgctttctcggtagcttacagactggagagtaagaagggcattcctacagtggtgaatactatagaggagtagtagacaacgtgtgtgagtgcatttagtatggagctgggagacatttatgggaggaaagataaggaaaaacttctccgatgaagggactttaatctgacatcagaaagaagagtagtagcaaactaggtaaacaaggatggggatgaggaagtaggaggtacaaaatacaaaacgaaacaaagcacagaatatctcccagaacaaagccctcttcatcctgcctgctctctctcccccatagtgattgacagtttgaggaagggggttattcttagggatcagaatatttttgtataactgcttccattttgtataattgcctagtttcccagggtaaataaaggcaggagacacattcagggccaaatacagaactctatattcttacttgagaaacacaccaaaatgatatgcaaatattactatgtagtatttatgtcttccttctctccccaaaattcccatgtgaaaataaattttctatgacctatatactgtcattttgcttaatcattttaaggcaatatgaggacatcatgtattaaatcctggagaattcttagttttcagatttcttgttggatatttcctgatcaataatgtgcaaagggagatgatatttgggccagaaccatcagtttaagcgtctctatattataagaaattctgactcaggctacttaatgtagtttcttttttaaagcatgaatgctttaaagttcatgttttagtcaagaaggaattgcattttctcaaacctggcaggcccagaaaaaagctacttagaaaatcacacttaggtgacagaatgataagaaaagtccctttaggggccattagcactttgcctgaagaaaaactgttagtggttcttcctagctttttaacttacagaagcagcactgttggaaagctcttggtaaaaacaacagaagtaaagcagtttattttggaatctcatgttaggaattccagaatatcccattggttaattttaagttagagtccttattattgcaatttccatcataatagacatattatatttgtaataggtggtgggacaaagactagagtttggatatatcatagaaatctatataccaaactttcattaactattttgccagttaaccatggccaactgatttttttttctttgttcacctcctccataaagttagatctaagattcaagtaacaacctatgcacctttttctaacagtactttattaaagtacaatttacctttagtaaaatgcacaaatgttaaatgtacatcacacagaactttaacaaatatacaaactcatctaacatccagatcaagatatggaatgtcaccccaaaaattccatgttgccctattttagctaaccactccacgactaaaggcaactgctatccaatttctgtgggtataaataacttttatttcttttcaacttcatatcagtaggaccatacagtatgtagtctttggggtctggcttcttttactcaaaatctgtgcattttgaggatttctgaaatattaaggatagcccagggcttctgcaaatgtcagatggacatacaactcaatttatataaacactgtgggaagtaagctaatatttgttaacctgaaagtttctgattatcatgaaatgtccctaggcagggactatgttgttagctacacaatatctaagaaaactatcctaagacaaattaaatatagaaataaaatcacaggcaatagcagatatatctaagcttcttatagataagctcatcccaagtactcttgaggtgcaaaaagaaaaggctaattataaattattcttatccatttattgaggctgttcccttaagggctaattctaggtaatgcttcattaaccttgtatcagttacttgttcttgaatttcaaaaattcattttttccataatttttattaattcagtgaggccctccttctcatttgtacaaattagtaagatgtcaacctacatgtggagttctggagattcatcttaagacttataaaagggaaaaaaaaaaagaataagtaaaggtattgagggcctactacgtgctgatggccaaggtactttcacctacattaacaaatcaaatcatttcaataggccctgtagggtggctcatgtctgtaatcccagcactttgagatgctcaggtgggtggatggcttgagcccaggagttcaagaacagcctgggcaacatggagaaaaccagtctctataaaaagtagcaaaaattagctgggtgtggtggtgtgtgccttcctcccagttacttgggaggctgaggtgggagaatcacttaagctcaggaagttgaggctgcagtgaattgtgatggagtgagactgcctaaaaaaaatcctttcaataaattatgattcacagaatccaatacatccaatgatccaatggaatgctagttcaaatacattggtacttaagcatggactgcattctaaaagttcacctctaactcagctattttatcatagaaacacagatatataactaaacaccactttttcaagaaaaggtaaaattgtgaattgcatttcaaccacacagaaaccaaacaaagttcgggagtgcaaactatattctccttctttcttaacatmagatttttccattgtagcaaatgtgattaggcagggccttgactaaatcactagaacagtgagtgctgacactaaagctggaagctaaaaatgcctccagaagattgtccttgagagccaagagtcaccttctcctgtgataggcagtctgctactatccccatgcaccctaaagctggtatgcaaggactctctaatcctgtggtatgaaaattcagtcgcctcacctcaaggctagacagatacagagatgcaatgtaggatctggagctccccttggattgaacacacatcttgcttcccttcttcccttacaagcgtttcctgagagcccttcttcaataaatcattttctaagaatctctgttacctccccatctcaggctctgcttctaggggaaaccaatttaatacacccattttatctatgacatcatcctcattctggcctgtggttacgctaacaatttatcttctcctggagtccactaagaaggacaaaagccattcagaatagaccaataaaattcaaagcctagtcttcttccagcaccctatgatctacactttctccccaactgacacacgtggtcaagcagaatgcaacgcccttttcttggaacccagaaaagacaaattaaggaaaatgagtttggaacaatgaaacagtctcctgtgcaaataaagcagacactaccattttaagtatgaataattggaaaacaaggcattgaatagtcttaattacaataagtatacgaagcttgcattagtcttaattacaataaatataagaagttttaaaactaagtgttctaagccacaaaaaagtaaaatatgtccttgtttgtacattatttcaaacataggaggataattaagataagaatgtgaaataaaggcttatctttatttaagactaatttgttgaggcaagaaagttggtggggtgggatgaggcccctgcttctcaaataaggaaatcttaaattaaatcaatgccagtcaattgctgggacattttagtcaaactgggtgtaatgtgctggttaagctatcaaataaaatgttggccatagagcatgattcgtggtcctcaatggaatcggcagttgaggatgagattgctgtagatgctcatcatcctctacagaagtgatgaactgagagcttgtatctttgaaagggtcatataatccttggacaaagggggtagtaggcctgttatccctgctgcctttattcatccacccatctaaacaaccctcccctcagtgtttactgaatgccaactctgtgccaggaactagtctagacactagggatatagtagaaagagaatgtatacggctcaggaagttgtgatttagtgaggattcaaaagaaagattagcaagtctttggagcaaaaattagagtcaagaggaagttttgcaaatgatcctgatcataacaaatatgtgtgtgtgtgtgtgtgtgtgtgtgtgtgtatggagagagacgacaacaaatatatatatatttggctctctctctctctctctctctctctctctctmtmtatatatatatatatatatatggagagagacaacacctccaaagaaaagagaaaaaaaggaaagcacatgaccgtgaacgaatctagcagtatgagaatttgattgaaagtctcagggaagacctgagatatagtgaatagttggccacagatatggtgttagtagcagacatcagttgggttactgaacaacacttttaaacccactaaaaggggacaaatggaatttactcagagcttagtatattaaggttactcagatcattgcgcattgggagggaagaagatgcttgtgcattgtcagagttgaaaactagagactgtgtgcctgagaaatgcccagtgagacacagaggaagcaactccacggatgcagaaaccatgccacccagaggcctgcatggggagcgtgtgttgtatggaatcaactgggcggagttaatacgtgaaatttcacattaactaattaattaattggttaatcaactgattgattttaaaataccaaaaagcttccaacaatcatttcaaaatttgatatatatgttgaaaaatacagcaacaaaacaaagtataaaatacaaacaaaatcttaatttatttcaatgctatgtattaaaagccttcatatccaaaaaatagcaagattgttattaaatacatttacatactctagtcaaaactataatattctataaactaacattagagaagatgcttgaagaaaaataaacatttaaaatacacccatatggctttaggaattcagaaaattcaataaatcatgaaaaaaatgaacctcctgggttttgttttgttttttcctttgagggaggggaggggaacactatgagttttctctttctttttattttttcagtttctttctacaggatacctaagcctaggtcaattgtttttaataacttcgttttgctaatcggtcatggcacttgtttctctccttaaatgcaaattaggatgagaataaccttgtaaacrtgtctttgtcttctcaaggtcatgtttggccaacagtatcagtcagggtttctttttccttttttaagcaggcagccatgttctgattaaatatttataagtctagttgagtaaagttaaacggagcagatgaggcaattaagaagtaaaaccaagtgtcaaactgcagggtctccttaaatgatgcaagaccttgggatcctgacacttttcattgacactctttgtaagccagagttgttttgtttgtatgaaaagtggcagtgctgtctaagatttactgatccctgtttagaagtcatctaaaaataatatctgagtaactcaaaycctctccattttccccagaaatagttttactgtaggggtgagatgtaggagagggagggagcgtctgtgtactgccacagctgggaacattactgcacctacttcctagtgccttgcaggcatctttgggacttgctaagaacctttggagaagtgtaagcagaggttaattgttcaaccacctgcttttagaaagatataaattttatatatgtaaaataatttttaaaatcatgattaatagcctatatcccttcagttacttttacaaagccttccaatgtccagaaggaaactgctgacagtgacatttatggagaagggggaaaaaaaagtaatttttcaactcaaattgaagggcagtggatagagaggggaacataaattcattataaaatatcttcttaacccatatatatagccaaaaaaaaaaggagctaattgcagaccaattatggaaaaaacctgaccttgggagaaaggcatgctatttatttataatcagtattaaggatttagaagcattttcaaggtttgcatttatttggggttgaaatgtcataaatatctgtcagcatggcaatattctagttaatttgattttggtgttgataaggccaagttcaaataatcaatctcaattaggctgattaatttcacactaaaaaactgtactgaggggacacaatttacttaaaccctaattgaccgtgttgtgcctttgggcacagagagatcttaaaaaggagaaatcagggaaatcactatacacaaacactggaaaaactgacttaattttcttgtttttaccaacaattggttgtgttgttgtcaaatggataaagtagaactttaaagaaaaatcaactttgtgcagtctcttaaaaatacctgaatgaaatgaaataaaattcataaaattctatccaacaattgaaaaaaacagctttttttttttttgcttggaggctagaggatgatgatgagtagctctattctgttagctctttctgtagctctattctgttaaattgtcatgacatttgttcagctcctaaaaaatgaaaattgggattgaaaatcaatttttagtattttttttccaaagcatcagcatacttgaagcctgtgttactatgaatggttacccttaaaatgaaagaatagttgttacttttggagcgggatagtaaccaggatagggcatatgagtggcttatgaaacacactaaatatcctatatcatgatcagcggtggagatacctgagtatgttaattttgtgaaacctcattgatttacacgctaatgatttatgcacatacaattttacttccttgatactctaattttttaagttgtaaaaaggaatttatatttaaaaaaaggttggactcctatgttcatttctataaatgaagctgtcacacagacctgaaattttatttgagcactggctctatcattttcttttgatgatgatgtttctttgatgtatgcatttttatcaaatatatctaatttgatgtttctttgatgcatttttacctagcttttaactgggacctggtttctgtagtgtaaaaatctatttgcaatttctagtgtattatactatttaatgccttcttctcatttggaactagaaaatcacttgggttaaatggtgtccagctgccttcagagataagccctggctttgacttattaatacatttccatcggcctttcctggtaataaacattcttactgtcctccaatatggtaaaatatttagcgtaagagtagtcttggctcacagtatagttgttgaatccatgctgtttttcagtcattggctrctctgttcattacattctatacaattttgtatactgatgtcttggggttttaattgaattttaatgaaaaaatggcccggattagcagtaatatggccagctgtgggctgcaatgttaatatgcacctactgtttcaatttgctggtaaagctgataatgactgaagagggcagctaatgcaaaaaactatgcctggcaattacatcaagtcaggttttcacccctcatctttagcagcttgcctccagcttttaataaagagcagagcaaaacagggccagttcaagcatcctctgatgtttgtttagacttttctctgttgactgagcatttgtaattttaaaggtctggtctctagtgtagttatgggcagtggtgtcagacacatctgggtgatgccagacacacttgagtatgcattcttcagccatactagccctgtaagatttagtaaggtaattttatatcttttagcttcagatttcttatacagaaaaatgggtataattgtatctttttcttggattattaaaaagattaaatgaaattatggatataaattccttaaatagcacctagtatccatttctgagctcaccaaatggtgaccattatttttgttaaatatgcttcaggttttccccatcaatatcaaaaattaagattggacttggaataaaagttctattttatattttaaatcttacaaatgraaataaataaacagcatggattcaataactatactgcgagtcaagactactcttattacactgaatgttttaccatattggaagacagtaagaatgttggttgcccagggaaggccaatggaaaggcaagtcaaagccagggctagtaaagtatatgatttcacttatatgaagtataaacacaagtacaatcattttatgggattaatgtcaaaatagtagttccttttgtgaggcatagtacagtctggaagaagcagaagggtttccaagatgctgaaaatgttccatttcttcatctgggccatagttgttgtattttatatacgtaaaaattcatcaagctgtaaacttaagatctatgcacattattgtaattatgttacaactcaataaaaaggaaagggcttagcaacaatttttttaattaattgaaaaaataaactagcacagacctttgggaaattaaaaagtcataacagtgctcagtaatcccacccctagtttctctattsaatattctgatagcagaactattccagtaacagataaaatattatgtatatgraggtgttcaatgcagcatttcctattttagaaaagcgacactgaaaacaatataaaataaatgtctaataatgtggtaacaatgacrtaattgatgatgcatcaattccaaaattatgcagtcatcaagaataactacattatgtaaaatggtgcagccactttagagggctctttggcagtgtcttataaaactaaacatacctcagccctatgactcagcaattccacttctgcatttctaccaatgtaaatgaagacatatraatccacacaatgacttttacatcaatgttcataacagctttattcataacagccaaaaactgaaagcaatctaaatgtctatcaataggacaatggatgaagaaatgatgatgtattcatacagtgcagtaaaactcaggaatataataacatgaatagatctaaaaaaagttgaatgaaagaagccagacacaaaagttattccattcataacaggttacattctaagttattccattcatacgaggttctagaaggggcaaattagtctgtggtgacagatattagaacagtgatttacctctagtgggaaggtcaggaactggcttgtgatgaagatactctatcttctttggcaggatctacagcagccatcatatgacactgaggatctgcccagtaaaaatgtaaaagtttcagtcctaaaattgttgagctggtgaaccaatgccgggatttccgtaactcttacataaaagaaagtaaagccttatttgttcaatccattatagctggtaacattctgtaaaagaggacgcaaaaggcacccatgaccaatactagataatacgtattcaatcattagamccttttatgaaaacaaggggcgaaaagtgctgcgacaattcccagagaaattgaaatggatatttcctatataatgctaaaagagcatcagatatgaagtaagagggtgtgaggagaagctgctaactacataatgcttcaacagtgaaaaaaacagttctacacaataaccttctaacgattcctcattgtggacgggtaggtggtttgtacttccagtcccttcagtatcagatgtttatcatatatcaaaatcacacacttgatgtttttcctttgtactgaaatttttaacttgttttcattctatttcaagaaatattgatgaatcattttgaattatgctgttatgaagacattcatgtaaatctgtagtaacatcataattgtatttaattatgtatccatttatcattttccaaaagattaaaccatgcacaaaaatacccctctgtgttctttacggcagtattaatagytgcatatacctaggagaaaaaggcaatttaaattttctcccatgttattttagatgtattttactcctcctcctcaaagtgggtatgaacagcaacacttcccccagaacctctcgcatatgctcaaggaacatttgcagggattttatatagtccgtcctctctttggatatgtttttaaaaataaggaaaagtttcatcttttaaggaagtgccttttattgacattcaactagttactgacagatttttactgttcagtctcttaaaagggtttgaaggaatgagaactgggtagttgtgttgctggtcattttaacgttattttatttattttctcagtagttaatacaagcattgtactgcagtcacaaaattcagaaggaggaaataagctagtctccctcacaccctccttctccagccatcctgtgcccttccccagatgtaatattttcaaatagtttaacgtacgtttctgtgctgattactttttttgctatttccaacaatgttgctatgaatattcttgtcattgcccccaagtgcacatgatttcaagagttctgtaactcttggagtataacaaggactagaatttttgcattgtatgctatgagtattttcagcctagctatgtataattagttactgttttccagatagttctcatttatcttcccatcaggagtggaggagagctgtgtggctccacatccttgctcataactgtcagtgtcaagcttttcaatctggtgtgtatgaaatcatatttcactgtgattaaaatgtgaatgttctggactaacaaagttgagcatcttttcggatgtttattcaggttttcacttctatgaagtatcttttcaagtgttctgcacatttgtttttctctgttgagtttcttggattttttcttattgactcataaagcatctctcatatgctttggatgtaggtatttgtcagttatatttttaaatgcctaaattggatgcagcattccctaacttcaagtctgtcttattttctaaagtaaatatttaagaccatttcttcttaagycttaactacatcttacaagctttgatacctaatatatttgctataatctacttgttaatacagtctgatttccattatttctcctttgatccatgaattgtttagaagtatgtttttgtatctataaaaaaaggagtattccttgtaactttttgattatttatttaaactaaattgcattataatcaaagaatatgttcagcatgataccaatacttcaaaatttgataagattagctttattactaaaatgtggttaggttttacgaatgcccacatgtacttcgacatgtatrttctccactcaatcaaaatagtacattgcacttttcaactattatatgtctttactgttggcctacaatcacaagagtctgatttgtccattattaatgaacactttcagtttttatattcaagcatttggtttgatccaggtttatttttatataaagtgtgaaactaagttcaggctgtttttttccccagattccagttgtaacaatagtttttattgaataattatctttttcattaccaatttgttttgtcaagtttgctacataccaaattgtcttatttttatttacttatggatttttattttatttcattaatctattcatgcaagaatgggacatttttattaggtgacagtaatgaaaatttaaactaggttttgatgcagtgatatactgatggacccaaggtagaaaattaaactagatttagaagagagaatttagaaaaatgaatagggtcatggtcttttttgtctaaaggagagtgtgtgaataataagtggaaatgaaaaacctcagcagagggaagtacacattgttaacaattattcagacccatgtaacaaaagaccgtaattctctgctctgtaaaagaattatattaaagagacaaatgtcacactaaatgatacttgcaggacttacacaggtctctagagaaaagagtgagtataattagtacatgtgttatgatgttttgattctagtccaaaccaactagattaaatacatttactttttgaacaaaaatggcaagacataattattacaattggaatgtgatagtaatatatataatatgtatatcttagtgtgtgtgtatttatatatgtatgtatgyattccttgtgcctaaaacacttcctgctaggaaattaagccagccttctatatttgtactcacaatctatcctccaagatatgtagagttgataaaaattaatgcttgcctacaaaatttcagcaatgcttctcctatctctgtacctcccctctgtatacatttgaaaaattaatcctgaccatcccaggaggtagaaaggaaagggtggtaaaataaatagttccttgagattttataaattcatccagattaaaatatatatatatatgtatatgcacacttgtcttgaaaaagttgtgatgatgttatatatcagaaataaaaaattgtttccactcatccaaaagtttaggactcacaaatttttttcaagcagaaataattttgtttcataaatttggtttaatttcttttgattacataaaaaactagaaatggaaatttatgtatatagcaatgtaaaaatgatagtgagtttaatgctaaaatctgatctactgggctctgtttaacctaatacccaaagcttaagtaatggttaagttggggtttagaggggcctattaccttcttcagggcattggtattttgtttcctaccttaatctaaaattagtgtcttatttgccagtctaatatattttacaatcaatctacattgcctaccttttggagtatttctatttaaataaaacaaaatgagcgtttaaactgggaacgtattagattcttctgagctattgagcagtatcagatccttcagcaagaaagctgttttatcatttactaagtacctaggcacagcatcaccttgcccrttaaaagccctgtcaggtacacatttkggttgctaggcagctgctggggaagcaatctcttccacacatatggtttatgccacctggcctgcatttcacaccaacctccccaaacttcccagggagttgcaagagaggtcctcatgttcctgtcttcactttccatttccctgtcataagcactccatttgttgtcagctttcattaaggacatttccaggagctaaatatggtagatttctattaactgattctaaagattcacattaaacagaaatagagcaaaaccataaagccatctgtggaatttgagagtatggaggggaatatattaagattaaaagataatcccggttacacttccattttcatgacatttgataaaaacactttggaggaaggagaagaaatgggccagtgagagggaggaagaagaaagagacctggaaaggaaaaaaggcaggaaggcagatggaaggagaggtacagaaggatgaatggaaggaggaaatgcaattttttttcttcctttttattttattttattttattattatgatactttaagttgtagggtacatgtgcacaatgtacaggttagttacatatgtatacatgtgccatgctggtgtgctgcacccattaactcatcatttagcattaggtatatctcctaatgctatccctcccccctccccctaccccacaatagtccccagagtgtgatgttccccttcctgtgtccatgtgttctcattgttcaattcccacctatgagtgagaacatgcggtgtttggttttttgtccttgcgacagtttactgagaatgatgatttccaatttcatccatgtccccaaaaaggacatgaactcatcattttttatggctgcatagcattccatggtgtatatgtgccacattttcttaatccagtctatcattgttggacatttgggttggttccaagtctttgctattgtgaataatgccrcaataaacatacgtgtgcatgtgtctttatagcagcatgatttataktcctttgggyatatacccagtaatgggatggctgggtcaaatggtatttctagttctagatccctgagaaatcgccacactgacttccacaatggttgaactagtttacagtcccaccaacagtgtaaaaatgttcctatttctccacatcctctccagcacctgttgtttcctgactgtttaatgattgctgttctaactggtgtgagatggtatctcattgtggttttgatttacatttctctgatggccagtgatggtgagcattttttcatgtgttttttggctgcataaatgtcttcttttgagaagtgtctgttcrtgtccttcacccactttttgatggggttgtttgtttttttcttgtaaatttgtttgagttcattgtagattctggatattagccctttgtcagatgagtaggttgcggaaattttctcccattttgtaggttgcctgttcactctgatggtagtttcttttgctgtgcagaagctctttagtttaattagatccgatttgtcaattttgtcttttgttgacattgcttttggtgttttagacatgaagtccttgcccatgcctatgtcctgaatggtaatgcctaggttttcttctcgggtttttatggttttacgtctaacgtttaggtctttaatccatcttgaattaatttttgtataaggtgtaaggaaggcatcatctttgagatgaatgtgaatgatcgtggaatattccttctgtgacagactttatttttgagacaggatctcactctgtcatccatgctgctgtgcagtggtgcaatcacagctcagtgcagccttgaactcctgggctcaaggaacactcctagcctccccagcagctgggactacaggtacaggcgctgccatgcccggttattctggcttcaagcaattctcccacctcagcctcccaaagtgctggacttacaggcaggagccactgcgcccccggcccttgtgacagacttttaatgaaaccattatatttacttctttgacagcctgttactatgtcaattcctccagccactacaaaacctgtcctcatggtttagagcattggcagtcactccctaaaattggagtggagtgaggaaggcagttctgtaggaggggcttatggactccttaagggcataggctgttggagtccctgctgagagatctctgccctaccttgtggaactggagtgaaacaacgggggcrttgcttccagccatctgggagagaggatccagagcttcccctcagagagctgggatgttgtcagcaggcatcagacagagcaaaaagccatttttctttattctattcctgatacaaagcaactgagatatgcgtttctctttggaattgaggaagggagaataatggagcttttgcggtgatggacagggaaaaagtgggggagcagttaattatccatcttgacaggtgtagacacaggctgggaagctgggtgtgtcttaatccctgctcctgaaccaccgtggggagcaggaagcctacagtttccttatatcagcaaatgcatcatgttgaaacaattttactgcttgctttctgaatttaaatatagattttccctgagaagggctcaagcatgcagatggtaagaaaaacaacagtctagaaagatatcttcaagttccttctcctggttggtggaaatagagcaattcttttccaaaatataatttttagagttttaaagtaaaaaaaaaaaaaaaaaggatagagtcaatttggaatttcttagctgaccattctattagagcataggtttttcagaaaatagagattatgggcaaaaaaaaaaaaaaaaaaaaaaaaggaaagaaaactgttttaagtatgatatcttcagtgtaatatatagttaacatatactattttgttgtaattagaatatgcarttattatatattaaacatatctacatctgtagtaaaatgtgttgtcctacatttcagaaaactataaggcttttgggaaagaaaatttaggagtatacattaaaagccatgtcaatgccattccctttaacatagtagttccatttctaagggaaagaagttaaaaaattgaataaactcacatgcatgaaaatgtttcaattataatcatgaaaaaggaaataatataagtaaccaggatagaggattgattagggtagttgctctcaattttgccccccagtggacatttggcaaaggacagcgcccctacaacagagttatccagcccaaaatgtgagtagctccaaggttcataaactgtacattagtgtaattagagtgtactgactcaacagaagaatgtgcagtctttaaagctcatattataaaggctaagcttcaacatgaaaaattattttgatataataaaagagaaaataacaggatgctatttcatatatacattattatggtcaaaggtagttttaccatgatgctggtgaaactttagttgcaggatctctcacttacggaagcccttcaaaggcccttacggaggctgtaactgtgtttcatatggttataggcttttgtataaatttttaaactaagattattttaattttattttaatataatatttttctttttccctcctgaagttatacaagtttcaggcaccactaaacttgatttycctttgactatcattttaaggaaatgaaacttaatgcacatgatggaggaaaaagaatgtgatgagaaattaccaaatagctaactgaagtcatgtaaggatgaggggataatggagaaacatttttctcttctctagtttccaggtgttttccagagctattatattagtttataatgaaagaaatgattcttaagagaaagaaagttcatggatatacaagaagaaaaaaaaatttggaaaaaaaccaccatgttaggcgccggatgagtttgttgtggtttgagttttgatcttctcatgctgatctttccggctttgtagttctctctcctctcgtacttctccatcattcatgcttgtgtccaaccacagtattttactaagagagcatgtgttctagtgccctattgctgcagagcaaaccacccaaaaaacctacataggctctgctgggtggttctcactgggggcctctcaaacagttgcagcaagatggtggttgaagctgaagtcatctgaaggctcactgggctagacatcccaggtgatcatcactcaccggccccatatctcmgtgctcctatctgtagcatctcctgacagcagagtagccaggtcttcctacatggccacttggtactacaaaaggcaagaagaaagtgccagtcctcttaacaactagatcgagaactgagagagaatccattttaccatattcagtggttcaacacaatcccaagccagcacagattraaggggatgcaagggtagactcctttgctgcatgggggaatatcatacagtgcggcaaaggaagggcttgatggaagcctttgaacacaagctaccacagcaaagaacatttgatttccaagattcccataaggtagggagggatatgcaatatagagcaagcatcttccctagaaatatgcatgtgataaaaatatctacctacagagatattgttagcagtggaagttattcaagttagtaatggcaaattcatacgggtctgcagcaacctcaattcttgcttcctcagaagaaagaatttgactgaggggcataaggcagaagacgagatagaggcaagttttagagtaggagtgaaagtttattaaaaagctttagagcagaaatgaaaagaaagtaaagtacacttggaagagggtcatgtggacatcttggaggtcmagtgcactgtttgatcccggacttacagtttttacrtgctgtcctacttcctgcatcttttgtcccttttccggtggaatgccctccgaaggtcatataccagttaaactttgccattttgcctcttaatgtacatgtgtgagctcactcgcccaactcctgagatctcatgaggaagctgcgcatcaccagtttcaggtatttcctatctatatagggwgactgcctttccctggtgctggctgygaccaattattattttagagagacagttaacagccacctgcccagggtcacctgactttcttggtggggtgtgsggggagccctttcctgccccgctcatgcctgactagctacctactgtaacaccatgtgtaacaccatgaacacaaaatgaatatttctgacaatcagctatagagtgtaaaagcttttaagtagcactttgccagttagaatgctctaaaatggagcctcctaaaattctccaatataataattttctacggaaatctatcagaatagagcagtgacacccagaggaaatttggaaatgtttagtagtatagtgttttatgcattttaaaataaacaataactaatattttaattggaattttttgagaaaagatacaagctactttcaactgaagaaaagtgtcccgagctaaaaagactacctttgcatcatcatagactgcttgatagaacaactaaggaagtaaatgaaacggaactcactagaggccacctgaatcatcaacaaattagtcaatcagaaatgttgactagagtccctctttgatgaataacaaaattcttattctgtttccaaatgtaagaataaatgaccagggctgttatttgctctaggggattaatattctgtacattcagttaatcttgcttgtgattaatcagcaaatagtcaagacaattraaatatwcacatatcttatgaaataaagagatatttgcaaatatcaacaaaaaaggacattatgtaaaaaattcacttattagaagcatgtcagtaggccacaaattaactaaccctaagcattattttgctttctttgtagcacattccccttatatggtactcttttctgggaaacatggtcttgctctgttgcccaggctggagtgcagtgttgcaaycatggctcactgcaggctcaagctcctgggctcaaatgatcctcccacctcaaaagcttttctagtagctaggaccacaggttatgccacacctggctaatytttaaaaaatgttttgtagaaatggagtctccctatgttgcccacccttgtcttgagctcctrggcttaagtgatcctcctgccttgggctactaaagtgttgggattacaggtatgagccactgtgcccagctgataaggtactcttttatgtcagacatattaaacaaccctatttattgatatcaaagtacaatgcaccaattctgtgaccagaaaatgagacaataaataaaaactatcttaaactttctattccccattttatttttacagctaacttttttttttttttttttgagatggagtcccactgtgtcacccaggctggagtgcaatggtgccatctctgctcactgcaacctctgcctcccgggttcaagtggttctcctgcctcagccttctgagtagctgggattacaggcgcctgccaccacgccagctaatttttgtattttcagtagagacagggtttcactgtctcaggctggtcctgaactcctgacctcaggatccacccgcctcagactctcaaagtgctggggttacaggcatgagccactgtgcctggcctacagctaactccttaactacccctctccttaaaaaagtaatcaaatattttcatcgtgcccttaattctcattttcagtttgtcatagctgtagaataaatggaacttaggattaatacagaacaatttcttcagttacttactctatatgacaaatggaaccagttatatgaatgctaagacctagtatcttgaagactctcaagtaaaaaaatgctctggggaaaataatttaaaaccatttgtctctggttttgacacacttcaaacaaacttgtacaatatattttcccaacctgaacatattcattcattcaaggacagatcagtcacccaatggacatatatttagcaatgattctatgtgtaatcatgattctgggaacatagaattaaagatgattaacaagttaaaacgtctccctttgaggtcgggaaatattcacctgactttactgttatactgttttatcccccagtgcctaatattatgcttggaacagggtagatacttgcctcttttctttattttctttctttctttctttctttccttctttctttctttctttctttctttctttctttctttctttctttctttctttctttctttttctttttccttccttcctycctttcttttcctttcccttcctttcttctttctcttttttctgtcctctttccttccttctttccttccttccttccttcctttctctcttccatttgttgttctttgtttttttgttatttaaataagtaacattaataaaacacactggtggaaataaacagaagtgagaacataaacagcttaggtgactgggatttaagcatatggctttctatgtcttagcaaccctcatgtggttggaggttgtcagtcttattccccatttgacctccagyattagcccagaggctggacaaaagaagtaatcaattaataattgatatcaaaataaatgattcagtgtcttttcaacataggacaacacagtcagtgaggctaacaagaatgatatcaatttttcaagatgttaaatgctacacattatactatactaaagaaaaaagaaagtttgcatcacttttttttcatttatctggaaaatttatttatattgaagttctcatttagttttggtgcctgatgaatgagctattacttgatattctcttgctttctcaataaccatctcatctagaaagcagggtgggacttctcttttttttacttttctgacgtggtgaagcgtctatcagaacatctttcctctcattggcagctcactacgsagcttgcaaaggttcacaggtggctgaaacccaacccagttgtaaatcacaacatgggtacatcttgcatattttagaagacagaaaagaaaataccttgtcagccagcaatcagaagcacattatatctcagaaagtctgccccttgtgcctgtcagcctgaatgggacctttcacacaaaccttcctgccaattcacttagagcagccagacaactccctccctcccatctttcaaattactccacatgtctaagttttcctttaaaatgtttccaaaccactggagcacacctctcatcacagacccccattgatgagagacaggattaaggttatgtcagatataactgatgattagagttatttccaccttctccacagttgttgacagacagcaaataaaggcaacattgttagacctacaattgatctattgaagttaggacttatttcttgactcctgaaaatacaaccttctaccagggctattctaagccagtgatttagagccctgatgccctgtatttatttattttttttactaatttttccactgctatgcaatgaggcatatcattattattattgtaaccgcctggctctcagtggcatgtgcacaaacacccagaaagtaaaggcatacagaagcctccgttaacgttgagaagggacagacaccataattgttttccactgttccttccattttaaacagtggggatcttacctatgttaagcatttctaggtgaagcatagactgcttaagagctgtatgagtagaaattaggaatttaggcttcagatccaaccccacctgggttggtatttgggtttcaacatatagtagctttgtaactgctggtgtgccactaatgctctccaaatattaaggaaggctttgaatgctattccaagatgtttaggctttcttccacaggcagaagagagcctttgaaagccttggagcagatgagtaacatagtagaaaaaaatacttcgagataacttgcaaagaggagttgtcaatctccaggatttgctcagctccattctccttctgggcacatggaagttctctgtgtctggcactgcattggttctccaaatctcacaaacagtgcactgaatgactgtgatgattgaataattgaccaagaaacccagataatgaaaggaagaaagagaaagaaagaaagaaagaaagaaagaaagaaagaaagaaagaaakaaagaaaggarggaagatagtaatgaaatgtgggcatggttgactaatgtatgagagttcatcagatgtataacttacttttcttttgaataatttgtatttatttattgagcattacctggataaaatacataactagttccatgcttcacttaatggtttaattatcaagaagttttgaatcaatactgacctgcaagcaatgtctcaaatctggaagctaccaagaattctgagatccaagttttctttcaaacttccctcccttttgcattttgaagtggtagtacaatttggatcagataaagaggaacaaggtggtttcagctagctgcagaacacagatatgacttcattacccagctgttagtaattttcctcccagtcggaggcagaattttgaatagactgaaaacatgtttgtgcagggttctaagatgctacatgaattcagatrttcattcatttaattcatataatagcctcagatgatatctttctttctcaccacaaggctatgctttgtctaaatggccaggtaaacatyccagaagtgagtggtccctgaagtggtccgtgaaccgatttccacgaccggttctttcctacgtgtgaaccgtgctctgctgcaatctactagtgcctcgggcattcctgcggcctttgtctaagcmgaaagggtagaacttcctgaacactaataaaggaaacataaaagcagaggtcagctggaagattggcaataggctaatgaaactgacagtcatttttgaccattttaaacaataagtttgttgcccctacatcctccacattagctgcccagtcttgtcaagtgacacacgggatattatgttgaatttttaaggtgcttcttggctgtgaatatggcctgggatctttctttccttttaataatacttagcacataattgttctgaaatcacatgttggaaaagctcttgactagaaatgttgagagcgggggagaaaaagaacagcacttaagaaaagaatggaaaagtttcagtgacatttgcaaaattgcttttccttctgatttggttgggaaaattatttttcagactctagggaattattgtttctcacacacttcatataagaatatatttcaagccagaaaggaccttagaggtggtgctcagtgtccttcgttcagatcaggraaggaaactgaagccgagggacgttaattgaattgcctctgttgtggctgcaaagtcagccagtgaaaacaaaaattctctaggaagccagctttgtttccttatatttaaaagtcattcactcatgtattcatttggccacagactatgtattgcacagctattaatattatgtggcaggccatatcaaggcatggagaatacagtggtaaasagaacagatcaaacctctgcccttatgttggtgataaatgctctagcaccttggtaatcaaaatacctccgtattagcagtttatcggaaatgcagaatctcaggccccaccccagatctattggatcagaatatcctttaaacaacatcctcctggagtttcatatgcattttcaagttgagaagaartagataaaaaaataagtaaaataaggaaaataggaagagtttggggagcttaatgggagattatgtaagagagatatgtggaggtcaaatgcccagggctctgtgggttatttgaaggacgtgggcttttgctctgagtggggtggcaaaactggagaggattttgagacaaggcatggtgtaatgtgactaagtataaattctatgtagcacagccttaaatgttagasaggkagaaaacagatcagtggcggcctggcaacaggggataggccacaaaagggcacaagaaacttttaagggtaatagaaatattctgtaccttgatggtaatggaattacactcatgtatatatttgtcaaaactcatctattggtgcacttagaatgaatgcatttcgttatttgtaaactacttccaaagagttccaaaaaaaaaaaaaaacctgttggacacatctgatacggtttggctgtgccgtcacccaaatcatcttgaattgtagctcccrtaatccctgtgtgtcatgggagggaccttgggggtggtgattagattatgggggcagttcccccatgctgttctcgtgatagtgagtgacttctcacaagatctgatggttttaataagggggctcaytctcattctcgctcctgctgcactgtgaagagggaccttccaccatgattgtaagtttcctgaggcctccccagccatacagaaatgtgagtcaattaaacctctttcctttataaattactcagtcttgggtattcttcatagcagtgtgagaatggactaatatacaacatcataaccaggatataacttaaattgtgtaaaagaaataagcaggatcacctccttatgtgggtactatgctcacaacctgggtgacaggttcaatcacaccccaaacctcagcatcacgcagtatacctctgtaacaaacctgcagatgtacctcgggttctaaagtaaaagttgaaaatttaaaaaaaagrcagwtgagagaacagctgttgcaaagagtatcagttgaaaccaaatttctctctaagccagaagaatagtgggtatgtgagcatgtgcaagattttgcactgcaaaagatcatttcaggagtccagaacacttgagaatatgcagaataacagtggagaattcaaagtgataccgaaatgcaaaagcacactaggtcaggatttatgagatagattctatttttgcctcacttctactactgcctaactttgtgaccttggacaagtcatgtattgttcttgggaatacaattttcttctctttcaagtggcaatcagagcacctgtttccacattgctatgtgggggtcaagtgcaatgtgaatgctggaaaagtgctttgaaaatgagaaggcactgcgtatgtgtaaggactgctaaaatggccttttccaagatgcattcacatcagtgacgccaagaagttggaaaggacaccaattattagatgtttctgacactgccttaacttcagggcatgtgcaagttttcctgatgtgcatgtgaaactgtgtctattacatatgctgaagttttcccccaaatgggaccagcacccacatgtctgatatrttccttaggtagagccattcttctcaataaaacacaaaatagtgaaatacagaaatgtctgatttgtaaagagagggtatctgtaacaaaattgaaagtcacagatttgatatctacttttacattcttgtatccagtaacatttttttgagcatctgctactgagtgaagcatggaaggatacacaaagatgaataaaacacagtctttattgtcaaggagatgacagtctagaagaatggataagatgtgtctaaaagtaacttgaatgcaaagccatatgtggaaactataagacaaaaattaacgcaayggagttagatagggggaaaaataaacacttgtctctcggaaaccttcctgagaaaagtggtgtttgaagtgagcattaagaatagattaagtcatgtcatagaatcaggaaaatacaaggcatttctggaatgatgtggtggcctgtttggctgggagacagcttatgtttggggcactagygtgatatggaagaggaggctaaagaaggttaattgaagacaggaccatggaaggttttccatgctagcctttctaggctggaaatggaaaaccactggaggtttctgagcagaagcgtcgtatgactcaaagtgtgtcagcggaagaggactttggcagctctgttgagtatgcactaatgttgggacagaccagtggtaggaaggccaattaaaaactaaatgcaatgatttaggggagagaaaatgaggatttcaactagtgtagtagattataggtttggacagatatgaatgaatataaataacattgtatcaaaaaattggctggaccttaaaaccatctggatgtgggaggtgagaaagaagaaagtaccaaggatgactctcaaattcccagccaaagtaaaaagccctgaaagagtgcatgggtgaaagatagtggatgtatttttaagacatgctgacttagtggtgctagtggaacagctaacattattatttcttctatacggcacacatttaccatatgttattctatttaataatcaaaacaggcttgtgagaagagtaagatcataccagttttacatagagggattaaggctaaagagaagtaacttgcttaaggtggcagaatcaccattggagaagaaacataaatattgtgttctttgtatgccatcattgcaaaaatctagcagattgttgaacataagaaactgaaattcttggctgggcgcggtggctcatgcctgtaatcccagcactttgggaggccgaggcggacggatcacgaggtcaggagtttgagaccagcctggccaatatggtgaaaccccgtctctaataaaaatacaaaaattagctgggcatggtggcgtatcctgtagtcccagttatttgggaagctgaggcaggagaattgcttgaacccaggaggcggaggttgcagtgagctgagatcgcgccactgactccagcctggatgacaagaacaagactctrtctcaaaaaaaaaaaaaaaaaaaaaaaaagaaagaaactgaaatttgtgatttcctggtccagtgatcatttctaattgataccaatgaatccctctgatgaatatttcactggtatttttctaatatatgatacattcataagttggttcctaagctgtattttaagagaacatcatgatttagatttttcttatactaccaagaatgccactctgattctttatggaaactgagaccatacacttaagctctaggggggaggtaatgtaatgcaacctgtgtttctaaagcacaatcacactataaacagaccttgctgcaaaaataagtatattcagcacagagctgataaacctcagatctgtggctgaaatgatcagttgatgatattatagtaaacaccattaccaatgttgtgttctggatgtttttcttcaagctgtgtgtctgtaggaaatgactagtatcataaaccctcttgacaaaaaaaaaaaaatcacatttctgttttccaaaaagagttttttttaatatcataataaatgagttcttttgaattcatctgtgcttttctaaatattatcttctggcaatgactttgccttatctctgctctgctgtttctggagagcataattttgctacatgtatctgaagatttataattgcgcctcttaattggaaatcaaggcttggcattagttaacagttactggtgaaatggcccactgataaaaacaaatgcttacatttctagaataataacaggaattcttctctgaagaacccagagtggcagactatcacttcacaaaactttctcatttccccaaacttgtaataaagccagctcattgtttcttcaggctactaagcatcaagcaatttgttttctgtgttcagtctgtcatcttacggctcgctctmatgttcactgaagccctayggcagactttgggactaytgtttttttaaataaacaattatggcattttcagatatggatattatcaaaggaatgatctaattgtccrccacagatttggatcagatagttattcctcataatacctcaagctgagactcaggaaactagtcctgcgtggggacatatgtcaaatgcattacaaaagcatcacctccttagtctaaataacgtcaccaccacccacccagttatgcaagcaaggaacttagacagtatcctttttacctccctcttcctcattgcccatatctaacccgttctatgttctgaaatagtacttctggattcattctgtcctgttgtatttttggatccatccatttttctctttctcaactaccccacttgtcagtccaccttgacattccacagtggcctcctcactgttctctccatccttcattcatgctcctctccagtgttttctccacctacattgagagcaatgtttccagattaacyagtatatcaagtgagtcctaggtttaaaaacctgcaatcactttcattgcttttagtataaatatcaaaatccttatgcaggaccttgaaggctctacatgctctagccccactcacttctacagaccatttgttctaagtctcctcttctctgggaggaagagatcccctctactgagaatgcttctcttctcccatctcttcccttagttatacttttcctccaccttcatatctcaagtgctagttcctcagagaagccttcctcaccacccacacactcctggtccagggacctcccttcctaccttcctccctcccttcctccctttcttcctcccttcccttcttccttccttttctttttttccattctctccttctttctttctctctttctctttttttcctttctcaccattagctttctttcttcccattttctttccttccttccttccttccttccctccctcccctcttcctctttttcacccttccttccttctttcattttttctttctttctttgtttttctttcgtcttccttccttccatcattttttctttctctttgtttctttctttcttttgtctctctccttctttccttccttcctcccttcccttcccttcccctccctccccttctttctttccttccttttcttctttcatcctgttttcattaatttgttctttctttccatcatctatctttctatccttccttcctttcttacttcctccctccctccctctctctctttcttttcttctttctttttcttctattatctactatctatgtttttgtctattatctatccatctattcatctatctgtctatctctatatgtatatattcaatagaaccaaatctctgtatttcagatcacttatttctacttataatcttatatttattcatatctacagtcttaactctaggctgtaagctccgtgagaacagtggttgtatttggtattacttaattttatgttctcaagcctaactttgtgtctgacacaggtgagctttcaataaatattagtagaataagttaaagtgctttactgagctctgaatgttgatcaagaagtaaccactgcgaaatattggatgccaagaaaataagctatttaacatttcccagcaaatgattttcagtgaagcagtgaggatgggaaagacacaatccctgaagactgaaagaaatttaaaaagaaaatgggaaggcaaatgaaaagcacataaaacaaatacctaatacatgcagggcttaaaacctagatgatgggttgataggtgcagcaaaccaccatggcacatgtatacctatgtaacaagcctgcatgttctgcacatgtatcctagaacttaaagtaaaattttaaagaagaataaccagaaaataaataaataaatatatatttttttaaaacctgctttgtcaggtactgttayagttgatatagatgaagtgaaatctaagaagaatgtctaggcccaagatgcctagtgcttgcttttaactattttcattttttagccaattactaattaacagaggactagttcaggactcattggaatgtccaggtggctaagggactgcacagtgtttgcttttgattacaaaaacaagccctagctcatgcacttcctgataagtttggttctgtgtccccacccaaatctcaccttgaattgtaatgatccccatgtgttgagggcaggaccaggtggagataaatgaatcatgggggcagtttccctcatgttgttctcgtgatagcgaacgaattctcatgaggtctatgtttttgtttttgttttttgagacagagtctcccctgtcacccaggctggagtgcagtggtgcaatctcggctcactgcaacttctgcttcctgggctcaagtgtagctgggactacaggtgtgaatcaccaatgcctggctaacttttgtatttttgtagagacaaggttttgccatgttgcccaggctggtgtcaaactcctgagctcaaagcaatctgcctgcatggacctcccaaagtgctgagattacaggcatgagccaccrcacccgcggagatctgatggttttataaggtgcatcsccctacctttggcactcattctttctcctgctgccctgtgaagaggtgacttctgccatgattgtaagtttcctgaggcctttggctggattttggacttgcatggggcctgtagccccttcattttggccaatttctcccacttggaacaggtatatttaccccatgcctgtacccctattgtatgtaggaagtaagtaacttgcttttgactttacaggctcatacgtggaagggacttgccttatttcagatgagagtttggacttggacttttgggttaatgctggaatgagttaagactttgggggactgttggaagggtatgattgtgttttgaaatgtgaggacatgagattttggaggggccagggatagagtaatatggtttagctctgtgttccccccacccaaatctcaccatgaattgtaataatccccatgtgtcaaggacaggaccaggtggatataattgaatcataggggtggcttcccccgtgttgttctcacggtagtgagtgagttctcatgagatctgatggtcatataaagggcttcccccttccctcggctctcattctctcttctgtcaccctgtgaagaggtgccttccaccatgattgtaagtttcctgaggcctccccagccatgcagaactgtcagtcaattaagcctcttttctttataaattgcccgatctcaggtatttcttcatagcagcataagaatggacttacatacttccccaagacctcttcattgctgggccatcacagtaccctgaatatgttcttaaaatcaaactttaaaccagttagttgcttttaagctttttctatggtgtcttgtgcaccttacatcaaattcaccatgtataatgaattaaaaagtataactcctagcaacaactcctaaagagtttggagacttcttctggtggcatctctcttgctcttgtaccctctctctctttttctctattcctctccccaagtstctgaataataaaatttctatcaggagtggattaaaagatacatctatcagttcaccaatttagattctataacaggaatgacaggcattaagacattgtatccaataatgtctgggctaacttttttgttgtcgttctcacatcctttccactgattaacacaaataattgaattaagtataatttcataagacatgaatgactgcatttcatcataaatcactcataaattcttttgctaaattgttggttttcaatttaggataactgaaggataggaattttaccttcaggttagctataaccaaaaatatgaggaaaaaaaacatgatctctgccagaagatcactggaagagatttagtgtgagatcttccatggaaagatcagagcaatacagactggctcaaagagagcacatagcctcagacttttattctaatgtataagaaatggtttttatgtactttgtgttcattgatacttattttctttcttggcttcagccaaaatatgaatgtaccctcagctttcctttttcatggcaatcattgattctaaaggcctggcacagatatgttcttcgaagggtgtgacctttaccgtcctgtgcgcatcagctatctccccatcccatacctgcatccctttaccagagggctttctctggtagactgtccttttgcatgctggagagtgagctcttccagaggcagccctcaaaccatgatctatgggagctgacagatcctcagttgtgtcatcccttaggtgacaaactgcaccatccctggagcatctcatggtgaagtcctggttcccacagtggtagcttgctcaacagtgcagcccttattggctcttttccatcctctttcttgctttcccactcttctacccgtattttctctgatcacctcccaaataaactatttctctagaactcttgtctcaggcttaaattttttctgcaaaagggaatgcctttggatttctgtaaaagggtctgcttcaaggagaaatgcaacctgagagagaaggtcatggttttcacaaaaggctgtggttacartgagatttgaggcttaaatccaggcttgtgtaagactgttatgtgttactagttgttaaaatattgagtgcttttatgcttgtttgcaaatagctacttctcccaactctgcagtggtcatgaccacttcatggtcatccattccttcccatgattcaacaactaaagtttattacttgccacaacaggggcttctaagaccctcattaaatgctatgggcaccaactgtttgaatgattggtgtgcttgctatgtgaattattaaatattttaaatattatttatgtttaatgtggtgcccaccagamccagatgtaacgtacagcttttccttggacagtatagagaagaccttgaagttatgttcttttaactcagtctttagtatttctctgcatgaaatccttcagctccatgtccagttgcaccgtggtagatttgcagggaagtggatggatgaaagagacaggagaaggaagagaggacagaacaatcaatacttgatgatgaacttctgggaaactgcgagcatttccatttgaaacaaatagagtgtttcttatacaatagccatatgtatttgtaaacaataaaatgcctgctagtgtacaatggattgcacttctctgatattatacttatattcttggctctgctttttttctggattcaaaatattcataagaaatgaaatatggaaccaaaagtcacacatacatacacacacagatacattttatagtagatacttgctgcttggcccagatatgttttgtggattaaattctaggccccatgctggatgccagactcactacccatgtttagacccctagacatcagacatttactgcctggccctgtgctcccagctgcccatccaggtggtaagttttatatctcgaaaagctttttcaggctgatttcatggtgaatatgtgttaatcacctcagggagttattgagaatttgggataaacttgattgggtgaacaagcagcatgtgtccaaatatagctattcctgagctgtatctttgatatatttgatgatgcttgaaaacagtccgatttacatccatcgctgcattataaagaacagggctgaagatttataagttgaattttgttgcaaatgccaaagcatgggccacagataaatcagttaccagaataagggtgattttataacctgcatgtgttttatagtttctcatgacacaataatcataaaattcaaaaggcacactcttgcaagtgtgaaaaggcaatttcagggttccttttggtttctgctattgcaaggcaggatatagatacagtttctcactatttagatttgctattgaagttttagtggagtgccaaagatttcagtcagcaagtgtcagtaaatgatatcaacacagctccaagttcaaggtggaatcgtttcttgaaataaagtgagcatttggtgcccagaaatcttgttttaaaatacaccaacttctcagttttggaagagctctttattttttaaaaatagattcttattatgtaagcatacaacttttcttgtatgttcctgttgctcgtatttgtacacatacacagtgaaagttatttttaaatcttttattcttatctgtaactgctgacagcatttgaggtgtggaaacttttaagactgaaaaatcaagtaaaggaaaattcaagcaaatgaatacagaaaaacattatcattaggagccttaataamactgctgtttagcttgtcacgctggcacattcctgtaatcctagcactttgggaggctgaggcgggtggatcacttgaaatcaggggttcaagaccatcctagccaacgtggtgaaaccctgtctctactaaaaatcaaaacaattagctgggcatggtggtacatgcctgtagtcccagctacttgggaggctgaggcagaataatcatttgaacctagcaagcagaggttgcagtgagccgagattgcactactgttctccagcctgggcaacagagcaagactccatctcaaaaacaacagcaaaactgctgtttaactccacaaaagtcattacaccactatacattcactaaaattgctaaaattaaggaaaaaaaaaaaacagtagtaaggccaggtgttggcaagattgtagaatagctgaaactctcatacaggggtgatataaaatggtacaactactttggaaaactctctggcagtttctaataaagttaaatatgtacttacctctcctatggcctaacaattccattcctaggtatttacccaaaagagatgaaacatatatccatataacaacttgtaaaagaatgcttatagcccctttattcataaaaaccccaaactggaaacaacccaaatttccaccaactggtaaatgaataaacacattgcggtataatcacataatggaatactactcagctataaataaaaatgaattgctaatgcattcagtctagtgatgaatctcaaaattatagtgtttttgaagagagctgaagagacacaaaatggaccatactctacacttccatttatattaagtttaaagacaaggaaatattctgcagtgatagaaaccagaatagtagctgattgtagagtacaagaggactgattggaaaggagaacattccagagagaggaagtgtattataccttagcctggatgatgattgcatggtcatatacacttgccaaattgcattgatccatatgtttatgatttgcattatttgtatataaattatacctcaataaaatgctgttaacataaaaaaattgcccagcttctgagttcttgcttaataatattagtatcacctgttgctgttctacgttaactcaggagctaaattcaaattcagtgtatgacaaaatcttatttgtgtgaaattactgggacgtgtacttttgcatttaagaaaatgctccaaaaaactgaagattctcccttcatgttagaaacttaaaaataaaataaaataaaataaagatttttttgggaggaagggaatcttaagttaaaatgtcacaaatctctcctatcatgttagtcacttttttcttgacttggcatttgcttggttgccttaagcctttgtctatttttcagagttctgacagagttgagtttgataatttttgctggttttatcagtgttttcgtggagaaatgggcccttggggctccctactctgctgtttttgctgacttcaccaccaaccctcatattcttaactctgtatccttaatagggttgaatgggtttcaaaaggcaaggtaggcaatggatcatgatactaagtcaatgataggagctttgaagtgaaagaggtgtttctaacaaaaagtagatacacactctccacctacactcctcttcctccatcatatcatacaattcagaagcaagaagaaaacacaaactcatagactgaggccatccaccactacctgaaatgctgcacctcactcaacatgggatggggcttcgattgttatgatttaagcacttctgaaaacacactttctacttcctgtttggtcttaagtcttccctggaaaggtcatctatctccatgtatttcctataaatatctacctctcttattaagtgttacattcaaatgtgacaaattaaaatcaagtggaaatattttgtgttaatgataaggtaaagccaactgtgtatgtcagagtagaatatggcatgtgctcttatcataaatattacaggagctatttgtttgtcagggcttcatcaaaacatctgaaaattgcttgacttggaggagaatagactataatttccatgtctgccccaaataatcagtcattgacaacttagaaaattcttatcaataaagatggaatcaattttttctattccacaaaatgtaagcatatcattttgagacaaattttaaaatcgttttagacttgacaaattacatgaaagagacacttagtcagaaatgattttttttaatgaagtgaaatttaataagtgactctgaatgtctgttgatgtgttgggaagcccatctttgcttgaccaaagatttatccagtaataatcaaaacatctaagttagtcttagaatttatatatatttcccatcctggctaacaccctcctcagcatggcagcagtaggaaagatggcggccacattctctctatgggtacctgattctggaaggagcagagcagaccttattaccaaagaattgtgtttgtctgttttgacctgaagagtccctaaaagtacttgccttcgttttacctaacttggaactctcttagggcagaaaagcagccatgtagaggacattcctccaaaacatagaaaggtaaatgaacaagcctctgccacttagggcaaaagatgatagttgttataaacaatagacaaccctaaatactggaaggaaaagctggagaatgagttactttagagaataattgctttgaaaaagattccttataatagaaaacctaaaaagtgatgcatatgcccaggataggacctatgctcaaaagatttgagaagacactaagctttcaccttcagcttgagatcttaaggcttcacaacagcaggaaatgaaggctaaggcagagttgtaaacagccaggctaggagagggttgggtgtgtgtgtgtgtgtgtgtgtgtgtgtgtgtgtgtgtgtgtgtgtttgctctaggcatttagggaaatctgccaaaccactagctaaccacaagctaacaaaatagagacttcagagtccatacaacaaaatttatagcctttaaaaatagtccggaaaaatgagcaaagtgtttgaatagacatttatccaaagagatatttaaatggaaataaacacatgaaaagatgcataacatcagtaatccctcaggaaatgtgaatcaaaaccacaatgagataccacttgacaccatttggatagctattattgataataaataaataaaataaataaataaataaataaataaataaaataaataaaaaaaataataaaaatggaaataaaacaagtgttggtgaagatgagggaaactgtaacccatgtatgttcctagtgatgataggaaatggtgcagccactgtagaaaatggtattgtattttttcaaaaataaacatagagttaccatataattcagcaagttcacttccgggtatatatctcaracaattaaaatcagggactgaaacaggcatttgtacactcatattcatagcagcattattcacaatagacaaaaggtgaaaacaacccaaatatccatcagtggagaaatagataaacaaaatgtggtatatacttacaatggaatatgattcagccttcaaaaataaagaaattctgacacatgttagaacatggataaatcttgaagacatgctaagtgaaatatgccagaaacaaaaggacagatatttgtatgattccactcgtatgagataactagaggagtcaaatttatagaggcagagtggcagttgccaggggatcatcagagagaagtataagtagttattgtttagtgagtacagagtttcagctttggaagatattaaaaagttctgaagatggatggtggttggtgatgattgcacaacacaacattttgaatttagttaatgtcactcaactgtacacaaaatgactaaaacagtaaagttgggctatctatattttatcacaataaaaaatagtttagaaaagtcactaaagaaagaaacaactccaacccacagcaagcagcaaaaataaaccccaagcagtggcaagaatctggtttctggagttaccacataataatattcaaaatgtcttgttctcaacaaaaaattatgagtcatgagaagaaacaaaagagtatcccactcacaggaaaaaaatgaacaactctccttgaaaaagcacagatattggatctactaactaagactttaaatcaactcttacaaaacgggtgattaccagagcctgggaaggataatgggtagggaggtggagggggaagtagtgaggcttaatgagtacaaaaacataggaaaaatgaataagatctagtatatgttagcacaagagggtgattatagtcaaaaataatttaattacacattttaaaatagctaaaagcatatcattggattgtttgaagccaaaggataaattattgagatgataaatatcccatttaccttgatgtgattattatgcattgcatgcctgtatcaaaatatctcatataatacataaatatatacacctactatgtatccacaaaataaagaattaaataaataaatataaatgaatcaactgttatatatactcaaaaagataaatgaaaccatggacaaagaactgaaggataaaaaaagaataaagaaaaatgaacagaacccaagagacctgtgagacaccatcaagcataacaatgtaaggggagtctcaggaagtgaggagagagaaaaaaaggcagaaagaatatttgaagacataatggttgtaaaactctcaaagttgataaaaggcataaatctacacattcaggaagcttgatgaactccaggtaggataaatacaaagacagccacactaagagaaattgtaatcaaactgttgaaagctctagacaaagaatcttgaaattagcaagagagttgcaattaatcacatacaaatgatcttcaatgaaattaataactgatttcttatcagaaacaatggaggcaagatagcaattggtatatttaaaatgccaaaacaggaggaaaaaacaacctgtcaaccaagaattgtatacctggcaaaattaagaaaaaagtaaatttaagaaaaaagtaaaatatttccagataaaagctgatagagtttttcacaagtagacctgtcctacaagaaatggtaaggagatgccttcaggatgtaatgtcagcaaactcgatagtaacttaaaggtgtacaaaagaaataaaacacactactaaaagtaaatacatagtcctataaaaaggcctattttattgtattattggcttgtaacccctcttttttctcatatgatttaaaagacagatatatcaaatgatgaataaaaatctatgttagtttagtttacatacaatgtataaagatatagtctgtgacaaaaacaatwtaaagaaagagatatggagaatataagagcaaagtaattgtatactcttgaagttaagttggtgttaaatcaagccagattataagtttaagatgttagttgtaatccccaggataactactaaaatattaactrtaaaatatacagaaaaagaaatgaaaagtatacttcaaaaatcaaacacaaaagaaggcagtaatgggggaattgagaaacaggaaagataagacatatagaacacaaatagtaaaaatgtcaaaagtaaatcctttctcacccataattacttttaaatgtaaatgagctaaactctccaattaaaaacagagattgtcagattaaaaaacaacaagaagattcaagtctatgctgtttacaacacattcactttagctccaaagatacaaacaggttgaaagtgacggaatgtaaaaagagatttcattcaaattctaaaagagaactagaatagctatactaatatcagtcaaaatagaccttaggtcacacatgctacaagaggcagaggacattatgtattgataaatggggcaattcatcaagaatataaaacaattgaaaacatatatgcacctaagagcttaaggtttgatatagaaaagggaatgagcctaggtcggtcttgtactaattcagtttaatttacctctctgagtttcattgtgtataactctgcaaatcctctttttttataacatagaaattccttcctacctttctttcttccttccttcttttaggaggcaagttttgagtacctacttttgacaagccctgtgctaagttctggagatacacatctcagtaattatagcccctgtaattgtagactttatagtccaagtcagtagctttcaaattttagtttatatgagaatcccctgggaggctgatagaaaatacaaactactgagcctcacccaatgtgtctgattcagtaggcctggagtgaggccctaagacctgcatttctaacaaacttccaggagatgctcatgctgctggtttgtggaccgaactttgagaactacccgtctaagtcatggattctccattttggctgtacattgacatcacctgtgagctttaagaataccaaggcctaggtctcatcttcagacttaaattgcttgggagttgcctggtcatctggattttttttaagcttctcacatgtttctaatacagaactaaagctgagaaccacttctcatttctggctgcttattacaaccacttggaaaggttttaaaaaaaaatactgatgtctagaaagcattatggattaatgcaatcagaatctctgagaattgagccccagcactagtattgttgaaaaacgtctagtgttgttcaactaatttgaaagtttaaccagagctgaactccatctaagcaaaggtaacatacaawgagtgaaggagagaggtaattttaaatgtcatctttttttgtttgtccttttaaattatcaagaagcagacaggaacataaatggaaaaccaagtctcccataacctaccactatagtatgtctattataatcatacatttttcctatccagtctttgaccatatgtgtgtatttttatatggatcatatatgtgtaatttgagattctgccaaaaaatttctttaagccacagaataaccttttaaaaataataagtaaaatgggtggcattgtcggattttctccatgttcactgaggaaagataacaagaataaacttgatctcagcaggataatttaggcttgtaactggaaggaccttcctagtcagcagaattaaactgctcaaggagaaaaagtggtgataaactaggatatggaacgaggaatcaaagtcctatctagaagccagatgatgggaaaatggccacagagagatgatctgggacttggcagggactgttccaggtagaatgctgaagaccgttagtggagagaatttgtctcttcatctgtatttcacttagaatctcctgtgtgtggttcaacattttgtggtggtttgtggatacactttctagtctaaaggaatagaactagattaatattttctattgtaaaatttagtatctttaacttagaacataatataattatgaaccgtataactaagttttgcaactcatgcagggggattatagataaccctagagcactcattctttatctgttctaagatagtcgggatatgagcagttgaagacattcctcttagttaatccaagtgggtgccaagacccatgcactggagagttgaaacaaaatacaatgagtctgaaatttcaagcagaagttcaagcgtctctttctattctgtcttgatacattgcattgaaagaactgctatggtttaattctatcagtgaaaataacagggtttgtgatgtttttaatttakttttccctccccacattaactttcctcatttgtgttyggtaaatttgcttcaactgctcaatttgcatgaggattaaatttcattaacagatgcaattagaaagtggaatttatagaataagtcttctttataccctaacctaattgacataaggattaccgatgtaattgactagaaatcctttcaagatagtcaagctgacatttaatagtgtttttctctataaaattaagaatgttcactacaatctacatataagaactaataagcctattccctccacccatcacctaaaattatagagctaggtcaattttatattcttgcagcaaaaaactcccctggcatgaggttgaacaaagtctagttaagcttgctatttttttccttttagtagaccctcccttgagtaaaaaaagatagagaagagcaaasggtcttcgctaagtgaactcatagcttagccaaagtctttcagagctgagtacggaggggctgcctcagtgggaagcagaaattaagacctgctcctccatacatcctacttgcatctttagcctcgtttctttacagcagttgtttgcaaccttggctgtacattgaaatcacctggagcaccttaaaaattgtaatgacaagaccccactgtaggattctaatatacttgggctgagatgcagtccacactatgtgagtgtgaaaagctgctcagcrgtcctaatgtttggtcgtggttaagagctgctgctttacagtaagcagtactttgcctgtggccaggtaaggcaaaaatgtgcctggggactttgggaaaaagaagcaggttctctcagtaaaagctgtgctccggcagaaagccggttaagtgttccttgctgcctatttaagaagtaacagtgccaaggcaatcccatttgctctggccatgtgataattaacaattgatatttgtgtgaagccagcctgcctaacagaatggtgtgcagtctttcagccaaacagtacactggcgctcctctgtggacttaaaattgcattctaaaaaagtagatggcatttttaataagcaaaaccccagtttaaatataaccaactgaaattataagtaatttggtaatatgacttcatgtgggggtcatcttaacattaataatacctgaaatgaaataatttctaaaatatttctaatctcaaattactacctttggtgatattttgggtgatagactatttttacaaactagaaaagattctaaatcaggaaaagtacataactgaggtctggctttttgaagcacacactcactttttttatgaaatacctgtttgctgaccatggtgtaggccattaatgtcattacctctaccacttgaataaaagtgaatccttttgtagcttatagtgtgtaaacctatgagacttatagtatgtagatgtatgatactgacagccaaaacagtatgcatattatgataaatcactgggtaataaagtagccaatttggaaaattctcaattggagtagtccttgtgtgttggcaaataagacttgcatttatacagtgaacaaaaaagtttgcttaagaattaggagcaagtaattgattttttaaaaatgatgtggttctggtggaagtagtatagccctaccaagtagaaaaaaagcaatcaatttaattaaaaagtctcagctgaaaaaaaatttagttcccatctatagacaggggctctgtccttagatacagcaggaagattcaagaccccatcatctctctcctcccacttctcaacctcctcttggtgtgtttcattgtccaaactcaaaaggaagccaggaggtgaaggctggctgatgcggttcagagaagtttgtctcctggacacagtgcaatatggagaagctagaaagtaggtctgaaaacagagacaatttgactttttgcagatgacatgattgtatatttagaaaactctattgtctcagccccaaatcttcttaagctgataagcaacttcagcatagtctcaggatacaaaatcaatgtgcaaaaatcacaagcattcctatacaccaataataggcaaacagagagccaaatcatagtgaactcccattcataattgctaaaaagagaataaaatacctaggaatacaacttacaagggatgtgaaggaccccttcaaggagaactacaaaccactgctcaaggaaataagagaggacataaacaaatggaaaaacatcccatgctcatggataggaagaatcaatattgtgaaaatggccatactgcccaaagtaatttttagattcaatgctatccccatcaagctaccattgactttcttcacagaattagaaaaatttactttaaatttcatatggaaccaaaaaagagcccacgtagccaagacaatcctaagcaaaaagaacaaagctggagacatcacactacctgacttcaaactatactacaaggctacagtaaccaaacagtgtggtactggtaccaaaacagatatatagaccaatggaacagaacagaggcctcagaaataacaccacacatctacatctttgacaaaccttacaaaaacaagcaatagggaaaggattccctagttaataaatggtgttgggaaaactggctagccatatgcagaaaactgaaactggatcccttccttacaccttatacaaatttaactcaagatggattaaagacttaaatgtaagctctaaaaccataaaaaccctagaagaaaacctaggcaataccattcaggacataggcatgggcaaagacttcatggctaaaacaccaaaagcaatggcaatagaagccaaaattgacaaatgggacctaattaaactaaagaccttctgcacagcaaaagaaactaccatcagagtgaacagacaacctacagaatgggagaaaatttttgcagtgtatccacctgacaaagggctaatattcagaatctacaaagagcttaagcaaatttacaagaaaaaaacaaacaaccccatcaaaaagtgggcgatggatatgaacagacacttctcaaaagaagacatttatgcagccaacatacatatgaaaaaaaagctcatcatcactggtcattagtgaaatgcaaataaaaaccacaatgagataccatctaacaccagttggaatggcaatcattaacaaatcaggaaacaacagatgctggagaagatgtggacaaataggaacaattttacactgttggtgggagtgtaaattagttcaaccattgtggaagacagtgtggtaattcctcaaggatctagaaccagaaataccatttgacccagcaatcccattactgggtatatasgcaaaggattataaatcattctactataaagacacatgcacatgtakgtttattacggcagtgttcacaatagcaaagacttggaaccaacccaaatgcccatcaatgatagactggataaagaaaatgtggcacatatataccatgaaatactatgcagccataaaaaaggatgagttcatgtcctttgcagggacatggatgaagctggaagccgtcattytcagcaaactaacacaagaacagaaaaccaaacaccacatgttctcactcataagtgggagttgaacaatgagaacacacggacacaggaaggggaacatcacacactggggcctgtcagtggttggggggttagggcatggatatcattaggagaaatacctcatgtagatgacatgttgatgggtgcagcaaaccaccatggcacgtgtatacctatgtaacaaacctgcacattctgcgcatgtacttaaagtataataaaaacttaaagtataataaactttattatactttaaatataataaagtattatataataaagaacttaaagtataataaaaaataaaaaaaagaaagtgggtctgaataggcaaacagaaatatatggtatatctgtttaaccaacagctttcctctcctttctctggaaatgtaaccagctagaagactggagtagccatgtgactaattctgactaatgtggtgtaagtaaaagtggcaaggtaggactttaaggaagattttttttctcaagaggatatagaccccagaacctgtgttttgtcctcagtcatttcctccttcatgatacctgcaaaacggaggtgaagattgaggttccaactgccattttggactggatttaggcaaatttgcatttggatgtcattgctaaggatgggagagcagaaatttacaagaagtgtgtgcactagtgactaaagccaccacagcagcgctggattcctcttctgaatttattccctgtgaaggaaaattaatcattatatattaaaaaaatcaacagttcaaaagtttcatctcattatgtatttgctatcaattatataattaaagtatgatgtaggaatttttaaatcatcrcttttaaattttaaaaattagttctaagaccccaaactatgtgcaattttacaaagtatatttgactgccttacaacaggctactatctacttaggtattgtgcttacttcagatgaaaattgtgccttatcaacaggtggaaacaatcattaaatattaaaaatatttgcttaatgtagcaagtgaatgggtggacgaatcatctcagtttctatcgggttttcagcatgtgaacctagtgtttaccttgtcaaaaagttgattgtttctaataagcaggataacagataytctagcaccttcaaagtcgaacagagctgagaaatgaagtgtgacttatcctgtggaatgtaaaaaacaacattttttaggaagcatgtgaatatgaatgagaggatgatcatcatttaaatatcaccaaataaacataacatttctgttgggcatcttttgagcagttagattttccatggaatatgttccagctttgttttgcttggttggtaatcatagcactgaatttaataaatagatattattgaatttccttggaatgttcctggtgttgtaacataaatttagtgcttaactggctatgatatatggctacatatctatagtacttacaggtggtgaagtctgttttaggttttctgcacttcggttacttagcttgagctatcttgagattataaatcacttctttttttttttttttcaaactacacattcatgacatacagcatcaacagaagatgatttattctgtgaccctactggcaaaagaatatattgatactataattttgctaggtgtcatttgttcttgagggttccttgtgttggtatgcaatagcaaattaatccagaattgcaaggtagaaggaaatataacagaactcgtaattctgatcctgagtcagttagctgaataacttgatcagatcacatctaatttttctcaatgagagcactactggcatctcaggccattgtgtgatattggcctgggcactggcctcacaaacactgcaaagcagtagcactttcagccagttaaaatgtcacggacttctgcagcagcctcttgatttgtgtgttccagaacttgagctccagggacgatgggccaagtttgggagcaagtactagagttttaacttaaagttaaaagcggaggggtgctaaaatgttgactctgatacaggtctgtggcaatttaattccatttccccctctgtcttgaaccccttctacttgaccactaacagtttttagcctaaattatccggatacccaagtcttcacttcattctcccctgtggacaacccaatgcctgggaacatgatgttcataagtttagtattctccaatacatcaagatcttgatggaaaatctctctaaaatagtaatgggaaaaatcttccctccaaaattccaattattttgagtgaacatcatcatgcatataaaaccaatgtcactggcatgcatcagaaactttaatttaacataggttagcaataatcattagtagtcgaaacttcattgctgatcagtagtgggatggtgcctgtgaatagccactgcactctagcctgggcaacatagcaagactccaactctaaaacacataaataaataaatactttaaaaaaatcattagtaggtggtatgttccttctctacttaaaagcaaccaatgttgaaatgtccatttgaagttgttaaaaatttttaaagacatgacttagaaattgcgacttagcaactaaagctgtgactttgaagtcaatttatactttaaagggaatctattatcagttaagttttcagatctcataaccaaattggaaatctgaagaagtcagaagttctaaaatgcagtgttttgaaaggacattgatatatagttgtgatattgtcttagcaacacatttttctttaaaagaagaatttcttcttgtattatcaatccttaaaatgggtcatgtattcttggaaaacagggtattcatgcaatctttaaaacaccgtctaaacttcaagtgaacttcaaacagcccaaaccaaatatatgctggataaagtgtattgtggttactggaaaactttaaaatatgaaacattcctattgctgttggtattttacctctgagaattttctagccaaagttctatttgaacagaggtcaaaaatcagttactgcgtgggcttttcttaagggatgaatttaatgaaagggcctagttattgcaacatatgctgccttcatttcaaaagatttccttaaagcataatgattaaagcctgtggagaaaaaaatttgtacttttcaaaagctccatgaagtaccccacagaaggaaaaacaaagttctgaatccacatatagaatgaataaatattccttttagcttaaaagtcataaaaatcattagttatttttgctcccttttattgaaagtgttttaagagttttaaaagaccagtgtacactgtatcaaatattcctgcttatttccaaagaaaagtgaactgctttattttgaatttttttttttctttacacagagtagggaagaattcaaatgttcagcaagtattcttaagcacctaagtcattgcactaaagtaratctcatttgatggctctcttaaggtggattctctagaaccaaagactgagagacacttttgggtacaaagagtttatctggaaggtgatgtcaacaagcaccagtacagcggggagaaatagagagaaggaaaggcagcaaggcagccaatatggtgtgagttaacaagcaggttactattgtggacaactggaagctaatcccactggagtattggggatgagaggttataacacagatcttactgttatcccacatgaggggcaagggagcagaggtagttatccaccaacaggttttgattgatggatgcatctggtttgtaagggagctctcccttgaaatgctctttcattcaaccactgctgctcatcccatacttgggcctactggacaccagcaagagtgcctttaggcagaaagcttcagttgtttgcctcgaaagtcatcgtaggaatgatgggaactcagaaaatattgccaggacactgactacatctgccacggtgaaaagctgtctctaaaatccaactacaaagtaaacaagtatttccccaaaagataaatgttaatagtaaaatacatatcagaaattatccaaactgtctagtaatcagaaattaaaacaggattaatccaaattgaggggtatttaattatcaaatttttataaaactgtgataaagcctaatatggcagggtactgttggtactaagaatattatttttaaaagccacttggcattgtgtttcaataggtaaatcaatgttcacatacactgacctaatgattaaatttctaggatataagtatgaaagaaacgaaataaaacttgaagagagtgacaatatcctatgtgtccacaaaaatagggaaatgattaagtagattatagtgtatgcaatcactgatatttttataatcaataagattagggttgttaaggtaagtattagcatgaaaataaatgcttatactgtaacaataagtagaaaaatgatgcacaaaagtatacatgcattccagttgcagctatcttatttttcaacagcattaaaaactactggaaggaaatacatccaaaaggctaatagtgattaaaatttactaccagtgtcaattacaatgttttatttgcaaggaacagaaaatccaactctcactggcttgagcaatgaaatatatttcttcatgtaactgtgtaactagaaagcccaagggttgggcttcaggtttgaaccagccagcagctcaaccaggtcattaaaggtctggttgtttctcttcactcttccttaatgtttgcttcatgccaaagcaggctgtcctcttggttgtcattttgatgccaacagaaactagaactagaaactagatgcttccatgctcacactgagggtcagaatgagggcttttatccctcaaccattgaacaaaatttcagaggtcatcttactatcagctacaagcctgtcggtgaacccaaaactgtggctgggggataagattggttgtaagcagatcagggcacccctctgcaacagtggtggagtcaattcccctctaagtctgtggcttccacccagtgaggaaggtagagagtgggtgaagaggagacaatgccaatatctacggtaatatatgaatatatataggtatatatgtcgtttttgcatgtgggtgcatatatgtaaagatacatatatacgaacacacccatcaacagaggaaacacaactgcacttaccacgctgattaatttttttatttactcattcagctgacacctactttgttccagacactatcttagagaccccagaaacaacaataaataagacagttaaggtccctgatctcacgcagctgacacctactttgttccagacactatcttagagaccccagaaacaacaataaataagacagttaaggtccctgatctcacrgagctgaaatcccagtgaaggaagacaggcaataagcaaatgagttcatgatcaggaaaaatggtatgaagtaactaaagcaaggtgccagttggagtaaccrggtgtattttgttttcttttgagtggttagaggaggactctttgaggaggagacatttaagctgagatctgtatgaaaagaagagccatccaggcaaagatcaggggtctggagcacacagagaagaaagctcattagtacaaaagggctttaaagtcaaagtaatcctgggattttggagaaatcacaagtcctgtgaagcagagccatggtgtatgaaaagtggaatggaataaagagagtgtggaatggtatgtaggcaccaggtcatgtaaaactgtggagacaatggttggaatttgggtgtcatgcaaagagcaaggagactcatttgaatgtttttagtagaaaaagggaaatacctatttgtgttttttagaaatctgtttgggaggccaggcatggtggctcacgcctgtaatccctatcccagcactttgggaggctgggacagagggatgacttgaggtcaggagttcaagaccaacctagccaacatggtgacactccatctctaccaaaaagacaaaaattagatgggcgtggtgccacacacctgtgatcccagctactcgggaagctgaggcaggagaatcacttgaactcgggagacagaggctgcagtgagctgagatcatgccactgcattccagccggggtgaccaagtgagactccgtctcaaaaaaaaataataaataaaaaataaaggatctgtttgaggatggtttataagatggcttgtggagagacaacaggaaattcaggcctgtacttgtctaggcaagagatggtgacgacttgaactaaagagtaatagaggattgagaggaatggaaggcctgatgtatactgtgtggagataatgccctatgtcctactgatggagaaagtcatggaataaaggctaactcaattattttatgtgagcaactggtgggttgatgggctgtgaccaagatgaggaaaacgagggaagatttggaaagaaagggaagaactaagaacactttatggacatttaaagctcggggtgtctgttagtcattagggctgattacatatttgctggcacactccaaaagtgaaactgaggggcccttttccaaaaagcaatgggggaagtgccaataaagatactaaaatagaacacttttctttcttctgcaatctctctcttgactggtaatggtatttttttaaaaattactatttaatgtcattctaagtaaaaaaaaattaaaattgtttattacgagttttaacattcattcttacattgtgcaatgctattttcagcaaataaaatgccattttaatcatttaatttatatacagaatcacaaaaattatacaattcacatttcatagatagtacatgcctatgttttttgttcttatcaagatagaggaactactgtacaaaactagtatcattgtttttattttacttcttgatacatgaacaccctaccagccttctgtaccttcagcttacttatgagaaaggaaggactggaaagaaggggaactctgggttgttccatctttctcactttttctatgtcattatattcagtgtaatggttggctaatagaaataacacataatgattaggattattggtgtttcatgttttagaatgctatttctgcatttgaagcaagttctgattctaatggaaagcatgacttttcatagatgtgagaacctggagatgtaacacttttatcatgtagttggtttgagcctcattgaactctcattgtggatccatggacattctgtgcacccgagcattgcaaattcaatatgtgagcagggcagcaaagaacaatggacatgtatcttgcacatatctcctctgcttatgtgcattctccattgttcsatcagacttcagttacaaaacacaagctcaaagataaaatgatggagaatttcaggacaatgactgcagaacattaaactaagcatgggtccttctgagtactgggccctgtgtgactgcagaggcctcacactcatgaagctggccctgcattcatgtggaaatgtgtaaaaaatagatattgaagtcgggagagctggtgaaaggtcatttttggagatgtaggcttgggaattattagtatttatatatttaatatttagggcatagacagggtgagaccacctacagggagtgtgcagatgaagaaaatttctcagaaaagaatcctagacactccagtaacacaaaatgccgtggacctgaaaagtatattgagaaggaatggccagaaaagtaggaggatagcaggaaagtccaaaattctaaaacccattagaagacaatagttaaagtagagggatatgatcacttatcttgaaagctactgagatgtcaagcaagatgagaaaggaaatgtcattattggatttgccaacataggggtcattggtgaccttggtgaatacagcctctctagaaaaaggaggacaaacattcaagtgaatattcaggagataatgaatggtgagaaaggagacagcaatgttgacaactttttcaagaactttaactaggaaatggaacagagaaatggtgctgtgtttgccgaaggatggggtatcaagggaatgatgtcaatatgtttggcagyaattattttcaatgctgcatactattccattctctgaacctattgtaaactatatattcatgagtgtttagtatatacacatacctctgttttgcaaagcagtttgtcatgctactaccatcaacagggacaagaggtcccaattattcacattctaattcaaagtgtgagactctggccaaatgatccttctgacctctctgtaaaaagaccaagttctaaatgactttggctttcactttgatctctgttaatcaagatttactctgagctcccaaaggcataaagagctttttccttctggtttcttgcttctctccaagcaggactttggagtatcagtgggtgattacagtgatagtttccttcatggctttcaggccatgaacaaatgaaaacagaacaaaaggccaagaattccatgcttctgtaagtctgttatttcagggtaattacacatttacatttttgcagctagcagctgatggacattgtgcaaaagggaaaaaaagataaatgtagatttttttaaggttttctttatgactttgtttttaaagactactttgtgtttgaaacatacaaattagagctcaaaagtttccagcaattagtttacacagcaaaagagaaggaatcaaggccaaagaacaatcttatttaaaatgctgtggttggcctggcatagtggcttatgcctgtgatcccagcactttgggaggctgaggcaggcrgatcacctgaagtcaggagttcaagaccaaccaatatgggtgaaaccccatctctattaaaaatacaaaaattagccaggcatggtggcgagcacctgtaatcccagctactctggaggctgtggcaggggaattgcttgaagacaagaggcagaggttgcactgagccragatcatgccactgcactccagcctgggtgacagagcgagactccttctcaaaacaaaacaaaaaaatgctgtgtttaagaagagggtatctgaggatcatggaattttagtcacagaaaaaaacagaaatactaagtgtttattattcttaatcagtttcatcacatgtaggtcctgagtcaaggacttgaatgaaaatcgtttattttgaagaagttcccagggaacagcattagaagtatgtcgaagggaggaagggaagtgatgtagtcaataaaggatatgttatcaagccattactactgtgggcaaccagagtcaatcccactggaaactgggaggcatgatcaaatacaagcctcagagtttccccactggaggtgcaagggagctgggatatttatccaccaactttcttgagtcattggttgatggttgtttccaggagacaycaactytcttgcacttccagcctgttaggccttaagcaggctctggccatggaaaaatcacttcaacagaaaagatayaaaggctgatagttagaagtcgagtccaaattcaataagatggtaaagagagacacagctggggaatcaacagaggcctgtaatcggtatggaagggacaatagtcgttaaaacaaagctccctctgtacttgtttctgacactaatccaaatgaggacctccaattcccccttaggaaatcatccatttagtccaacccatagattggcttataaggacatggaggctcagtgatacttagtgacttgctcaagggtgcacagatgcagtagagaaattggacatcttgatgtattaatatgtgagtttgatgaacatgagtaaaatgtgtcttcaaatatttagacagagagaaagaaaatagctgtctgagacattcaagtgaagcatttcaaatggaaacttcttagcttatacttagccccagccagactcagaaacagatataggcactagactagacagcatcaacattccaacaggagttttcccttcaccgtggaagattattattgtgcccacagaaaatgtctgtgcatagacagagcccatatgactcttgcattttctttcctgacttagacataaatttggcaaaggagcatcatgcgaagtggacagaacgttccttttgtcctttgaactagacaagaatcaggcaatgaccctgccttagcactttatttagagatgaattcccccgctctagggttttggtggacaggtttatttcactgtaagtgggaaaattcctggctgtttctcacctcaccgaagagtgctaacagagggattcccattgatctgatttgtttgcactgtaaggctggattcaacttcagcgtgaaatcatcttgcaatctgaaataatcttgattggatttccgtttggattaacatcacgtaagagttgatatccactctaccatcagagattgtggtctatgctacttcttttgtccctttgtttwatataagtaacgagcttggagatgtaaatcagtcaccattttaaactgattgatcaaactcagtaagaaataaaaccttttcatggaactcactcagccttcaaacatttgcaaattaactaagtcataagtactctagaccaatttataaaaacacagttaaaatatctcaattaaaatcatacatactcacatgttcaaataaactgcaataagcttctataaaattgcttagaaaatataatttctgttttaaatttgtaaattatttcccaggtcatcaaattaataattgaaaaaaaccttctaataattggtgggtatttctgcctaattttcattaaaagtggtagtttagtctgtcctcctgaagcacttaacctgattttatatcttaataaaggaacactatttaggagtttggggactgtgctatgctgtgaaagccattccttggagcccatttttgttattgatgaaattcttccagtctgggatgaacaaactgtaaagccataaataaaagaccaaggagaagaaagacactctgatcagacattcctaattctaaatatagtttaagaatctgtctcctgttcattttagcaaaaggtttggagataacatttcacactgacatatttccatacaatcatttaaatttattatttccagtttttagtgtaaatatacatatacacatagtctctctttatatataaytaaaaatctaagctcatcctagaaatattttgggaatatgtattttataaagaaacagaatcagaatataatttgttactcatctctctttccaaaggcaacccaagttaatttcctggaatctctcctagtagtatttttaagcattcatttgtcttttatctagctggaattaagttaaatgtgggattgtgtttcatgccattgttttatattgtaagatattaaaacataatatttttaagttgtagccatcaatttaatgattaactacacaataattcatacattacctacatttctatgagtttttcaagtctacgtgtgatggtgagacctgcatttgagataaggggcaaaccgagtgcatggaaggaggtacagaggtaatattagagagctgaccttaatcctgtagagccaggtcatgaaaagggagtagagaacctcaagagaagagcagagggagaaagaatgtgagtttgacgacaagttgcattaataaaaaaccaacaatcaagtcatgtattatttgtagacatacaaaagataaatactttttaagagtcttgaggccggatgcggtggcccaagcctgtaatcccagcactttgggaggctgaggcgggcggatcacgaggttgggagatcgagaccatcctggctaacatggtgaaaccccgtctctattaaaaatacaaaaaaaaaaaaaaattagctgggcgtggtggcgggcacctgtaatcccagctactccggaggctgaggcaggagaatggcgtgaacccgggaggcggagcttgcagtgagccgaggtcgtgccactgcactccagcctgggcaacagagcgagaccctgtctcaaaaaaaaaaaaaaaaaaagaatcttgaaaataacaatgttgaatcataaaagcatttcacattttccttgatgaccttctaacttaagcaatcttaactggcaaaactaaaaaatcaaaatattaataattcccccacgatatgtgtcctagtttagtttataagtcttggcacttaagagatctaatgagaacttacatttaaaacatgttttaaaataaattttaaaagctagagataaatccatggacagtaaaccatgctagaggtaaatccatgggcaataaaccatgccagttctcttttctgtgctaattattagattatcaatgcctttatttttctcccctttctgtcttcctcttttgattttgttttcaatgttaaaatgccaaggcacttataatgcttcccatattaggttttcttctgaaaaccatttgtccttttctgtataccagattctcattataactgggtctgtgcgtgtgagctgtggagcctccacctttgtaaacaagcctaaaaaaattgcttctgtaactaataagcctgatgccttcagcccatagggatctctttcatctctgttctaataaaacttactagcaattaactcataatcctaacctctgtaagcctttgtaatttatttttggtatactcattcctttgtcttcactgcttaataccttattaagaataaggactatgcaaacttttgtgtgtgtctttcagacaccaacccagtatttggcacataatatacctgccattaattaatatttttgctgagtgagccaacttcctttggatgggcatgagataaccacttctgtataatacattctctccagggcaattaaagcagtttttcagtgtgtgaaggttgtaaatgatcaactctcaacagtccttgatcttttaaagcacaatgagtgaaggaaacaaagctgttgactcataaaaatgaattaataaaaagtaacctctcctaagtaagaaatggaatataaaggatgagtgttgagtgaccacaagggccataactggaagttgtgatggagaacacatgtgagttatttgcaagaagagtaaacatattaaagatgaaaagctctgtgcaaagaatagtcctaaccaatactgtttaaaggactatccagagtacagacgatagatggaattcttagggaaacagcctgtgcttgttcccccaattatttctctgggctttgtaaacactgcatatttagtgtttgtccattaccattcggggtcattacaaaagaactcagccttgacctggattcctgagaaataaattacagcttttcttattaccttccagtagaacttgaagcaataattcaaactctacgttaagtcatcatatatgatcacaagtgagtatgttaataacaaaatggatattcatatacagacccgagtaaatttctgatggcagtcacatcttgataggaataaatactgattcattacaaattacttaataaatgtacatctggattctcaagcattataacagatgatagaatattaatcttgtttgttttcagagcacttctttttctttaagttatacttgctgctatttacttcgccagaagactgattgcattattggccccaattcttcatcattactacctccctggatccatgcccttagacrtgtaactttataattgccttctactcagcaatgtgacacattgcaaatgagatgttggcaaatgtcacatmtacagagaaataaaaagcagttgtgcaattgggcttgctcttagggttgtcctctgacactgccatgagaaggataggcccaggctatccggccagaggaggaatcacatgggctagagctgagtatccacagttgtctcaaccaaggcaaccctagataagccaacagcaagtctaccttcacacatgtgagcaggctcagtcaaggcaagcacgaccatgcagtctacccatacaagcgtaagctaaacaactacttattgttccaagcctctacatgttgggttagttcgttacatggcattagtatgaaaatacctaactgatacaccttgatttctcaatattcaaatataattgcttcttattaatcctaagtatagaagcatatggacaatgactagaaagactttgagtaggtcccattcataggatgtgatatcaaattaaattaaaaatacaatgtatttttcccacaaaatgctgagaaagtttgaaccattctgtcttcatttttttttcctacactaagaaccaggtgactatagaagagtctagctggccttatattgggttctctaggattatgtatggagggagcatgccgtgccacaggggcccacatagggaagcaccaggatcatcaggagacagagggagcaaggggaaaaatgtgrgcaaggtcttttattgttgtttccacaggaacaaataggcaaggtaatgtaaggcaggcttaggattggcttgtttgaataatttcagcaggctctggggtgtaggagctctctctattgtctggtacctggccctgggtgatggagcagtagaatattggccctgagtatgacagcctaatgagaaggtggtgggtatgtgggctctggattggttagtttgtatatgacaggtgttgtccttgttcactgtctccaggaattagctagccctcagtggggcagtgcttccagtgtcagcgaactccaaactggggtggccccacatgtcaaagcatcaaaaatacagaaaataaaaaggcatgactaatacaaccttcccttcaaaaatacactcctaaggcaataatatattactgttcttagagagaaaagttaagggagttgcactgtacttaaagtcatgtagttacgctgtgataatgatacaatgaccacaaaaatctcaaaatatttttaaaggaatcctcagtcttatataaagtttgcagtgttaacttcttgctatactgtcctctttcgagggttttctttccaatgatcaacattgattgatgtaggaccttcttagcgttctgctaaatatgtgggaaaaatacatggcrtgtttcctgaatttgtggaatttttgcaggggaagcaataagagagaaatagaaggcaatgtgaacttaatatgctttaataatgatttactgcacaactactgggtgctaggcactatgataggtgctgggggatttcagtcaaatgccatttatgctttcaaggractcatagtttaatgagcacaaattatatgaaaacaaatgattgagctatggtgagcagtcaactctgttggaattagtcagaaagcttcagggaggagatcatcaaggtgggccttcaaggatgagtttgacacagggctgtaggtgacacttcgggcaaagggaactgtatgtgcaaaggcacagagtcaggaattaaagtgtcataagaagctacaaacatttcctttacaaccaggaactggggtgtgtgtgggaaagtggtaagacattaggctaatccagaagcaggttgtgatcaaggaggagctcaaagtctgtactaaggagttagggctttaccccactaacaataaggaacaattcatgagtcttaagcagagaaataatataaacaacctgcctgcttaaaaggttattcaggctttgctatgaaggactttaagttctctgagggtaggaattctatccatctttttcacaatctgtaccccagcacctagggcctggcacctaggatgtattcatgtagctgagaacgctgtgctacttaaatgttccaatgctcccccgtacttcctagttctctttgcagttagactggagccctgtgattagttctgtccagtggttataaccagaagtgacttggcgaccatttggatataggaggtgaaggtgaaaagtgaacctaggatgacatttgaaatcttgcttggggtggttcagaacaggttataaggaacaagtatgggacaattttggatgtcctgagttcaagatgactgtgagatgaagtttttaattagaatagagctaaatgttacaaggtttgacataggcaacagttactatgggaaatcaggaaggtaaagtattaaacatgtagcactttgtgggttctgctagagtgactcactatccaggtttgcccaggactgaggagtttcttgggatgcatgaaggactgtcaatgccaataccaagagagttccaggcaaaccaggatggttggtcatcctaagnctgctataccttaccacctgcaaagaatagctattgagtatttctactctgaattcagaagtttgtattcctccgaacctctgtatctcaactaccattcagttgtatggaaaatgaatccaaattggccagagtaggcaagaaagtataaattctgtaaaccagtgttgtgcgagaaccaattcacaccagctcacaagagctgattttactcatttcttcacaactctacatttgctgagtcatgcgaataggttgcagttggccatggtgggagaattgacactatggaaattagcaagttctacatattagagcttctctcccctatccccaaccccagaactggttgttaaacatttaccaggacacctctgccataagctgagttgaaaaggtttggaagacattatattgtggggatagcccaatgtagatgctattggtacctcaccctgcatccctttacctagggagtgcacttatcccccaggtgctgtgagtgttggcagctaacaactcacaggcacccctttttctaggaattgtcctcagccaacaggagttgccgtggctggaatacctgggaggtaacgccctacacccaatagtggcccgtagcccatgattgactcatagagtggtgtcaaaggtcaggctttttaccctaagttgggacagcaccgtggtaccrttcatactccagaactctccaggatcaggctgagaccagtctccagctgtaactacrtccttgcctagctgcctctgcttccctatattgcttcccttattccctcatctgtttcccctgagagcttctctcaatgaatccctgccttatgttcatattaataatagccaaaagtagaagcaacccaaatatccattgatggatgagtggataaacaaaatggagtatatccatacaatgtaatattatttggccttaaaaagaaaaattggctgggcgaggtggctcatgcctgtaatcccagaactttgggaggccaaggcaggcagatcacttgaggctaggagttccagaccagcctggcccacatggtgaractctttctctactaaaaatacaaaaaattagccggacatagtggcacatgcttgtaatcccagctacttgggaagcagaagcaggaggattgcttgaatccaggaggtggaagttgcagtgagccgagatcacaccgctgcactctagcctgggtgacagagtgagactccatctcaaaaaaaaaaaaaaagaaaaggaaaatgattctaacacatgctccaacattgatgaaccttacattgatgaaccttgaagatattatgctaagtaaagaaagcctgtcataaaaacacaaatactgtttgattccattcatatgatgcatatagagcagtcaaattcatagaaacagaaggtaggatggtggttgccaggggctagggagaggaaggaatgaggagtttttgtttaatgggtacagagtgtctattatgcagagtgaaaagagttctggggatggatactgtcaatgattgtacaacaacatggatgtctttaacactgctgaacttaaaaatggtaaaagtgataaattcttatgttatttctattttatcgcaattaaaaatacaaaataaaagacattaaatagtttttttaaaaaacataaaatacaaaataaataaattatttaaaaaccctcatcttaggctctgcttcaagggaatctaacctaacacagtcagcccaggagaatttctatggaatgaacatataatctccagtacatatgccatgtgctaacaaacacatgagagaactttatgatctgtgtgctttcgttgagcagagaacgtccctttgattcctgagcttactggaatatcattacgtaattctcccccatttcctgctgcatacctacaagtaatctcaaaaatgctttcaaggagagttttcaattttgcattttgaactttggatctgccttcatttaactaagtgagagaaggagaaacaaaattccagtgtattagcatgacatttaaggtggagaaatgtaggcagcaggcaatcatgtggagcagcggtttacagctgaattctaccatttgtagctacttaacatgctgaaccattcctctctgtctggaaaaatcataaaaaggggcccgtcagcactctgagtcactgctaagaagcttatgcagcctcacacctgcatttaaatgagtgtttccggggcaaaaatgaaggacctcagagaaatgaaacggagcactctagcagagaaaaacgatattggtttctgtctgcatttgtaaattaactacaagaagaacacttctagaattagtttaattattaatagaaatcgctttgaacaatttttttgcttcacattttattttaaatgaggacggtcatagaaggtttatcattaggtggcaaaatttgatcatattcaaaatgtaaagaaacagccactgataccaaggtatggtgcctcacacmaagtaggaattctgtacctatggggtgaactcatcaattacgtcaaactcaaacataggtttcaaaaccaggacttgtgcatacttcatctttagtttcttctttctcaaattttactgcttagtaaggtatagcttacatagagtacagtgagtaaattttaagtgttatgttttgactaatttacacaaacacacacacatacacacacacagacacacacacacacacacacacacgtggagcccccatccatattgmaatagagaatttctagtgccccagcaaccctccttaattacctccccaccaagagaccactactatagatcttcctaaattttcacgcttccatggaagaattgtttttccaagttggagcaggagtaatctagtcatagtatcccttgattcttatttcaagattctcttttttttttgagacagagtctcgctccgtcacccaggctggagtgcaatggcacgatctcggctcactgcaatctctgcctcccaggtttaagcgattctcctgcctcagcctccttagtagctgggactataggcgcccgccaccacacctgactaatttttgtatttttaatagagatgatgtttcaccatgttggtcaggctggtcttgatctcctgaccttgtgatccccctgcctcagcctccaaaagtgctgggatcacaggggtgagccaccacgcctggccctcaagattctctttagcccaacatgatcccaagaaatcattagtcttttactgcttaccctcagaagggatcacccttgcactgccctcattgggtgctcttgcccatgccatggccagggtctcattgtgatccttggagcttcggcttacttttggggggcaaaatgcttccaagactctcagtattatagctctaggtccatttctagatgcatgtcctaggtgctgaactaggtcttttcagacattccttacctgccagaggtaagactttctctgtgcatgtcctggagccagagccaccatgctgtcccataagctgcggtctgatggcagaggcagactccattgccaagactccagttcactgacccttaattgtgcacagctcagaagaggtcacagtttggctcagacttcttgaatagcttctrgaagaattgtttgaaatgagaagatgttggaaagaactagaaactcttctttcatgatctactccacacacatttcactccaataatactaaacagcttccagttcctggtctaccatatcggttcatgtctccctgtctttgatcacgttattaactctttttagaatatatcacgtttttacccctcttgacgtgatgctttttctttttccaagtctgagctgagatgtcatattctagaaccacaagttcagctaagtccctcttctctagggcctcatgctaatgagcttctttagcattgcttccactgtctcctaaatgtgaggtggtctctgctccttgccagctccaagtgaccaaatagtatctttttataaactcaaatgtagacactatctccatgaaatcttttcacctcttctccaatgaagcgctttgcttcttctctatgtatatttgacacttcattaatacccctcagtggtttttcatatttttatttttcccgttagattgtaaaacctccttcagaagagttttgtttgacattgaattccaatctactccagtgcccagctcattaccccagattcaataaatgctcgctgaatgaatgcatgcagagctgagtggataagcaagcctccttgattaatcacatcaattaaactgggtcaaagatgttttgttatattggttccattatctgactttyggaaaagcaatgtgacctacagagttgacatgcccttgatatggcaaaagatgagtttcatcctcaaatatcccattagcattttattttccctgcttagagtatatggttgacttattcctgtcacagacctaagtaactactaatattgagattttctctctaattcttctgacacttcttctttttcttttttatttatttattatggtttttttttttgcctaaaaagcgtcatctttctggatcacgtcaccgactctagcctttggctttctatccagggacatttttcacaaagaaacaaaactgtttagtgatggtagcagagttatcaacatggtaagtagggaaaaacgtatttgcatttaaaagcaaatcctggacctgtggcagagccaggcttgataattacgtcccttacattggccggcctgataaagcttggatattcacagtgacaagtagcaaccygctatagaccttagtggtcactcacaaataggaaaaaaatcttggaatgttaaattcgcagattagagaatccccttttcacattttctgcaaaatccattttgatgcaaattagattacagaaaatttaagattctcataaatgtacatcatatttctgttagtgacgttttacccttgcccctccacacctttgtgtttaggctcacacatttcaatttcaaaacccagaaccatggtattaattctaaartctgagctactaaagctggggccctcaagtaagtacaccatggaatctgcragatagaaattcctagcctcgcattttagtttaaaaagttttagtttgaaagtatgggggatgagctggtggcataagctrtataacaatgatatttttattaaatttgaaggcctaaaaatatcctgtagtaggggaaagtacttttacccaccataaatgttattaggtttgtgtaattgtgccaaaattgtaagggcaaaaatgatctgctttgctattgtctaaaactaacgccagcactatcaattaaaaaatatatatatatatatgatctcaaaaagggagatggtgtagaatctacttagctttgagcagtaccaacagagaattctcctaggactcatactaaatgagttgggttattattaattagtaggagttaaaacaattatcagatcatgtacagcactgttcttaatgcagcctgcctagggaccctgttaggagggtgtgtggccatttgactcttgctttctttatgtaatatcataatgacccaagctagggggattccaacaatgatatacagcagcttatacaaaaggggacttcatgtcattccaaagagtgaaagaaaaacaggaaagcagatgcgagagcaaaaccattccttactgaagacatcatgagtcctttgtttttctttttctattttctattgtcaagaatatttatattcatccaggcaagattgcatggggaggaatatcacagttgtacatttgttgccattgggttctggtttacaactgtcttgcctgagattataaattttcaggttaatgcagtactaatgcagaatttgttcatcctggaatttgtgtatatagcatattaagtaaatccaaagagacaagtagcatatgaggtaaggagtcctgggtttgagctttttctagtaaagtagccagagattgtagttagtaaacatttctgaatgttctacagtacataactgtaaaatagaatgataaatgaggtgacttaccaggccacttccaattttgaaattgtaagatttcattcagtctctcccaacccccaccaaaataaaaaacttgtgaaaccaagtctgtaccagactgacgtgtatcgaaactgtcactctggtgttgagataaatagccataactcttagttactgtaaaaaatagttgagagttatggaggatatgatttaatacatgcttattgaatatatacttcgtgtaaggctctgcactgggaattatagagaagttcaagtatatttaaaacacagcttcttacacagtacctggtctgaagaggcctccaggggaggtgggaagatgaaagaaataattttcaaaattattttggagaagggtagagtagctcaccatagtagtggtctgtctcttcaacaaatgacacttttaaattgctttgatttttgtttctaacttcttaaaaaatgtgtatgcaaccaggattcatattttattacttatatagccaatgttaggaactaaattgtgctcaccccatattcatatgttgaagccctaacccctaatgtgactttatttggagatagggactttaaagaggtcattaatgttaaatgaggtcataagggcaggaccctaatccaatgagactggtgtccttataagaggaaggacaccagtccctcatctaagaggaagaaacatctgagaagcatgtgcacagaaatgaggctgtgtgaggacacagcaagaaagsagctatctgcagaacaaggagagaggctgcaggagagaccaaacctgtccacaccttgatttttgacttccagcctccaaaactgaaagaaaatacaattctcctgtttcagctaccaagyatggtgttatggtgtggcagcccaagcaaactcatgtagctgatttcatgaactttcatgttttctgcactgtggcttttctgatgtttgtaattttccccattccctctccagtcacaaaactagaacacaatcttgggaaaggacacttgttcccacctcccatccccagcacaaaaatctwcaaacacatatcggacaagacaacccacattgggccagtgtcttgtgaggggtgtccgacatcatggtaagtcagcaagggggagagactgcacttctaaagtgtccagtacaggctccaagagcaggtggcatttgagctaggccaggttaattcccatcactgttttgtctttgggcttagttgtgcacttctctcattttatcagggtagacagaacgaagacatgaacaatgttttgaaactcactccttcattcattcaaccaataattgaacactgggcacagttctaggtgactgagttacatcggtgaccaaaacagactcatattctacctttggaatttacactctagtagcatgtggagaattagacagtccttgcctttgaaaaattcagcatcttgtggggagatggtccctgtcttaatctgtttgggctggtataacaaattactgtagattgggtggcttacaaacaacacaaatttatttcttacagtactagaggctgggaagtctaagatcaaggtgccagcagatttggggtctgatgagagcccacttcctggttcgtagacagaagrccatcttcttattgtgtcctcacatggtggaaggggtgaaggctctctctggggtcaatctctctcttttttttttttttttttttttgagacagagtcttgctctgtcacccagactggagtgcaatgatgcaatcacagctcatgcagcctcaaccttctgggctcaagcaatcctcccacctcagccttccaagtgactggggctacagatgtgtgccaccatgccaggctaatattttaatttttttgtaaggatgagaagtctcattatgttgcttaggttggtctcaaactcttggcctcaagtgatcctcccacctcagcctcccaaagggcagggattacaggcatgagccaccacagctggcccttgtggtctcttttacaagggtactaatcccattcatcaaggctctacccttatgacctaatcagctccccaaggcccctcctcctaatatcatcactttggtggttagaatttcaaaatatgaatttcgggtggggacataaacattcagttcattgtagtcccacttaaactgatggtttcaataatataataaatgtagagaaaaggaagcctgaacacggaactttgaaagggcctggtaggagcctgggaatgactcaactgagacatccttgaagaattcctgtttgttttttgtccagagagtgccaaggaaattcccagcacaatgtacctatgacaaattcggaagtcgtatgttgggaattaatcctgctttattttcatctcattatatgaatgtaaaatatataagaaatatcagttgggttaattttagctccttttatggaaatttaattatttatacaataaatttagttccttaaaatataaaatcgatgtcacctttttctttgctctttggtagtttttttttgttgttgttgttgctatttctattgctgctgtgacaaattaccacaaactcagtgacttaaaacaacacacatttattattttacagttttataggtcagaagtctgacgtagaggttacttggctaagatcaaggtgccagcaggtgcatttcttcctggaggccctgggggaaaatctgtttcctcaccttttccagcttcatagrccccttcctccaacttcaaaggcagcaagattaggctgagtccttctcatgctgacatgtctctggttctttcttcaaattccctcttccactctaaagggccctcttgattccattaggcctacctggataatccagaataatcctactttaattttttttttaagttctggggtccatgtgcaggacgtgcaggtttgttacataggtaaacatgtgccatggtcatttgctgcacctatcaacccatcacctaggtattaagcccagcatgcattagctatgtttcctaatgttctccctccccctccccgaccttccaacaggccccagtgtgttgttcccctccctgtgtccatgtgttctcattgttcagctcccacttataagcgagaacatgaggcgtttggttttctgttcctgcgttagtttgctgaggataatggcttccagctccatccatgtccctgcaaaggacatgatcttgttcctttttatggctgcatagtattccatggtgtataagatcagctgctagcatgcttaatttcatcttcaaccttaatactcacttgccatgtaacctaacacatccacaggtttccaggattaagacatagacaactttggggagccattattctgcctaccacatgggtttacttaatcaccagggagacaaagtagataataagcacaaagtagataataagcaaaagaagccaaaaaaacttctgtgtgtcctgcaacactaaagaacataaagaatcaaagagctttatttttcatctaactcagtttggtaagattccaatttagaagctaaggtaaaggaaaactgacttcctatggtacaatttaaattcagtataaattcagtgcttgcccaagtagaatgtccagctgtgggtacggagcaaaggtgtcagtaaactgtattcacacccagggcacttaagagacgttattttttgagacttgcaattgatatgctttgcactgtaggggccacgtgggaatttccacctgagaagcatttgttgttaagcacttttttcccctgtctttgcttcagattgtataccttccagggacagatatcagtattatacatagctctttgtatattttggggggtgactgagaaacatatttcattacatgtaacttgctggccatcccaaatattacagtaacaataaccggtacagcttgggtatcccatatctgaaatgctcaggaccagaagtgttttgaatttcaaatgttttcaggttttggaatacttgcatatacatcgtgagatatctcggaggatggaacccaagcccaaacaagaaattcacttatgttccatatacaccttatacatgtagcctgaaggtaattttatacactattttaaatagttttgtgcatgaaataaaggttttgtacattaaacaatcagaaagcaaatgtgtcactacactatctcaagcccatgtggccaatctttgaccactatcatccctgtctctgaatttatatgttactgatgagcaatcatcttcttacacttattcacacctaagtacytagtaaaaaaattgacaaaccattaatacagtaaaaaaaataatgtgttcaggataactaagcagcaaagtagcatcaccagattacttgtattttatcactattacccatagaggtatctgtaggcctttttgacattttcaacaatatctttacagagcagagaataagcaaaaagtaatgcatgcaggtcttggcttcatgtgggacatcatggggaacctattgttggcatttctggccagcatacgtgccattttattaattgttctgggcaatgcttacaggagggagtctggataagggcagaaaatatatattgcaactgaaggggcctgagagggtctttttttccccttggagaagccgaataaactgtgtgttgtgcacctgcattttgacggtgactcgtcacatgtgatcaggagtggaattttccactgtggcatcacatcatcactcaaaaagtttcagattttgaagcattcagattttggagttttggattcaggatgctcaatttgtatttctgtttttaatctarcagttacactgagggccaagactctatgttaaatgcccaccatatattatctgatttaaacatcacagtgatgctgcagggaaggccctgcagtggccattctcaatgctggctgcacattagggccccctgagcagctcatgagattccggaaacccaggctgcacccagtccagttaatcagaatctctgagggtgggatccaggcccctcattttttaaagcttccaggattttctatcacacagccagggttgagcctagattcatctgattccaagcccagatatttttgcctgctgagtaagtagtatagcccaggcctttccccatcttttgccccaactctctcactcacaggccctgccccccatatcttacacgcatacttagtttttaagagacagagtcttgctccgtcacccaggctggactgcagtggcaagatcatggctcactgcagcctcaacctcccaggttcaagcgatccttctgcttcagtctcccaagtagccaggactacctgcacaagccaccatgcccatctaatttgtgtgtgcgcgtgtgtgtgtgtgtgtgtatgtgtgaagacagggtcttgctctgtttcccaggctggccttcaactcctggcttcaagcaattctcctgacttagtctctcaaagtgctgggattacaagtgtgagccaccacacccagccccatgtaggcttttattcccagttacatttttgcccacaaaatgaaaattataaatttttgaagtccttagtataataccaatgataatctgacattgtttctactgaaaataaacattactgttattggcattttacttttgtttttattagattttttatttttatttttttaatggggtgagggaggtgtctttataagtaacagtgatagtaattttgcaatactaattttgataactaagaatgtatcattttatataccaggaattttatggactttgccttgcatgttttgtgacattttttcggggaagattctattatcaggaggaaactgaggcttactttctgcaaagacacagccctgacatttaagcccaaatctgtgttattttattttattttagaggcagaatcttgctctgttacccaggctagaatgcagtggtacaaacatagctcactgcagcctcaacctcctgggctcaagtgatcctccaccctcagcctcctaagtagctgagagtagagctgtgcaccaccattcccagttaatttaattttttgttatagacagggtcttgctatattgcccacgctggtcttgaacaccctgcctcaagcaatacttctggcctcaagcaatcctccacctcaacctcccgaagtgctaggactacaggcatgaaccctcatgcctagcccagatccatgttattttaggacatcagtttatagcttctgtttgatgtattctaaactcgaccgaaaataaaactctcttgagaaacttgttgccctcctgaaaattctgtctggaatgggacttagcaataggatttttaagtttggtccatggtgttcctgggctactccaccacgctacaatacattgccttcaatcagggcttctcaaacactcatgtgcttgcaagtcattggggatctggttaaaatgcagaacctgatgaagtaggttaggggcggtcctgagattctgcatccctacctagttcccaggagatgtgatgcttctggtccacaaaccacattttgagtagccacttagtgcctggtaacttaagttttctgagagcaaagttctgagagcactgttgattctccactcattgtagtgtctttttgcacattgacttgcaaaagctccttagtatatctttgaggaaaccaaaaaaaaaaaagcacttttaagacaatgacatcaatatgaactcagtgctttaagtgcattttataaatagcacagcagataaatcacctcttttagaaagaaaatatttaaccaagtgtaccttgtctccattagacactaagcacatctctaattcattcttagataacagagttccttacccaaattaggtgtttaaaaaggcatttcttaaaggaataaatcattttacaaacttttgaattgtttttaaattttgcatcccatattctaacaccgaggtgcctttttaaagatgcatctgtgaattttcattcaaaagtatatatagactacataacatatgcatcttaggtgtaatacaaagacatagaatatttaaaggcaattaatatgtctatacaaaatatttatttatttttttattatactttaagttttagggtacatgtgcacattgtgcaggttagttacatatgtatacatgtgccatgctggtacgctgcacccactaacttgtcatctagcattaggtatatctcccagtgctatccctcccccctccccccaccccacaacagtccccagagtgtgatattccgcttcctgtgtccatgtgatctcattgttcaattcccacctatgagcgagaatatgcggtgtttggttttttgttcttgcgatagtttactgagaatgatgatttccaatttcatccatgtccctacaaaggacatgaactcatcattttttatggctgcatagtattccatggtgtatatgtgccacattttcttaatccagtctatcattgttggacatttgggttggttccaagtctttgctattgtgaataatgccacaataaacatacgtgtgcatgtgtctttatagcagcatgatttatagtcctttgggtatatacccagtaatgggatggctgggtcaaatggtatttctagttctagatccctgaggagtcgccacactgacttccacaacggttgaactagtttacagtcccaccaacagtgtaaaagtgttcctatttctccacatcctctccagcacctgttgttccctgactttttaatgattgccattctaactggtgtgagatggtatctcattgtggttttgatttgcatttctctgatggccagtgatgatgagcattttttcatgtgttttttggctgcataaatgtcttcttttgagaagtgtctgttcatgtccttcgcccactttttgatggggttgtttgtttttttcttgtaaatttgtttgagttcattgtagattctggatattagccctttgtcagatgagtaggttgcgaaaattttctcccattttgtaggttgcctgttcacactgatggtagtttcttttgctgtgcagaagctctttagtttaattagatcccatttgtcaattttgtcttttgttgccattgcttttggtgttttggacatgaagtccttgcccatgcctatatcccgaatggtaatgcctaggttttcttctagggttttatggttttaggtctaacgtttaagtctttaatccatcttgaattgatttttgtataaggtgtaagaaagggatccagtttcagctttctacatatggctagccagttttcccagcaccatttattaaatagggaatcctttccccattgcttgtttttctcaggtttgtcaaagatcagatagttgtagatatgcggcgttatttctgagggctctgttctgttccattgatctatatctctgttttggtaccagtaccatgctgttttggttactgtagccttgtagtatagtttgaagtcaggtagtgtgatgcctccagcttcgttcttttggcttaggattgccttggcgatgcgggctctttttttggttccatatgaactttaaagtagttttttccaattctgtgaagaaagtcattggtagctttatggggatggcattgaatctgtaaattaccttgggcagtatggccattttcatgatattgattcttcctacccatgagcatggaatgttcttccatttgtttgtatcctcttttatttccttgagcagtggtttgtagttctccttgaagaggtccttcacatcccttgtaagttggattcctaggtattttattctctttgaagcaattgtgaatgggagttcactcatgatttggctctctgtttgtctgttgttggtgtataagaatgcttgtgatttttgcacgttgattttgtatcctgagactttgctgaagttgcttatcagcttaaggagattttgggctgagacaatggggttttctagatatacagtcatgtcgtctgcgaacagggacaatttgacttcctcttttcctaattgaataccctttatttccttctcctgcctaattgccctggccagaacttccaacactatgttgaataggagtggtgagagagggcatccctgtcttgtgccagttttcaaagggaatgcttccagtttttgcccatttagtatgatattggctgtgggtttgtcatagatagctcttattattttgaaatacgtcccatcaatacctaatttattgagagtttttagcatgaagggttgttgaattttgtcaaaggccttttctgcatctattgagataatcatgtggtttttgtctttggctctgtttatatgctggattacatttattgatttgcgtatattgaaccagccttgcatcccagggatgaagcccacttgatcatggtggataagctttttgatgtgctgctggattcattttgccagtattttattgaggatttttgcatcaatgttcatcaaggatattggtctaaaattctcttttttggttgtgtctctgcccggctttggtattagaatgatgctagcctcataaaatgagttagggaggattccctctttttctattgattggaatagtttcagaaggaatggtaccagttcctccttgtacctctggtagaattcggctgtgaatccatctggtcctggactctttttggttggtaaactattgattattgccacaatttcagctcctgttattggtctattcagagattcaacttcttcctggtttagtcttgggagagtgtatgtgtcgaggaatttatccatttcttctagattttctagtttatttgcatagaggtgtttgtagtattctctgatggtagtttgtatttctgtgggatcggtggtgatatcccctttatcattttttattgtgtctatttgattcttctctttttctttattagtcttgctagcggtctatcaattttgttgatcctttcaaaaaaccagctcctggattcattaattttttgaagggttttttgtgtctctatttccttcagttctgctctgattttagttatttcttgccttctgctagcttttgaatgtgtttgctcttgcttttctagttcttttaattgtgatgttagggtgtcaattttggatctttcctgctttctcttgtgggcatttagtgctataaatttccctctacacactgctttgaatgcatcccagagattctggtatgttgtgtctttgttctcgttggtttcaaagaacatctttatttctgccttcatttcgtcatgtatccagtagtcattcaggagcaggttgttcagtttccatgtagttgagcggttttgagtgagattcttaattctgagttctagtttgattgcactgtggtctgagagatagtttgttataatctctgttcttttacatttgctgaggagagctttacttccaagtatgtggtcaattttggaataggtgtggtgtggtgctgaaaaaaatgtatattctgttgatttggcgtggagacttctgtagatgtctattaggtccgcttggtgcagagctgagttcaattcctgggtatccttgttgactttctgtctcgttgatctgtctaatgttgacagtggggtgttaaagtctcccattattaatgtgtgggagtctaagtctctttgtaggtcactcaggacttgctttatgaatctgggtgctcctgtattgggtgcatatatatttaggatagttagctcttcttgtttaattgatccctttaccattatgtaatggccttctttgtctcttttgatctttgttggtttaaagtctgttttatcagaggttaggattgcaacccctgcctttttttgttttccatggcttggtagatcttcctccatccttttattttgagcctatgtgtgtctctgcacgtgagatgggtttcctgaatacagcacactgatgggccttgactctttatccaatttgccagtctgtgtcttttaattggagcatttagtccatttacatttaaagttaatattgttatgtgtgaatttgatcctgtcattatgatgttagctcgttattttgctcgttagttgatgcagtttcttcctagtctcgatggtctttacattttggcatgattttgcagcagctggtaccggttgttcctttccatgtttagcgcttccttcaggagctcttttagggcaggcctggtggtgacaaaatctctcagcatttgcttgtctgtaaagtattttatttctccttcacttatgaagcttagtttggctggatatgaaattctgggttgaaaattcttttctttaagaatgttgaatattggcccccactctcttctggcttgcagggtttctgctgagagatccgctgatagtctgataggcttccctttgagggtaacccgacctttctctctggctgcccttaacattttttccttcatttcaactttggtgaatctgacaattatgtgtcttggagttgctcttctcgaggagtatctttgtggcgttctctgtatttcctgaatctgaacgttggcctgccttgctagattggggaagttctcctggataatatcctgcagagtgttttccaacttggttccattctccccatcactttcaggtacaccaatcagacggagatttggtcttttcacatagtcccatatttcttggaggctttgctcatttctttttattcttttttctctaaacttcccttctcgcttcatttcattcatttcatcttccatcactgataccctttcttccagttgatcgcatcggctcctgaggcttctgcattcttcacgtagttctcgagccttggttttcagctccatcagctcctttaagcacttctctgtattggttattctagttatacattcttctaaatttttttcaaagttttcaacttctttgcctttggtttgaatgtcctcccgtagctcagagtaatttgatcgtctgaagccttcttctctcagctcgtcaaagtcattctccatccagctttgttccgttgctggtgaggaactgcgttcctttggaggaggagaggcgctctgcgttttagagtttcccgtttttctgttctgttttttccccatctttgtggttttatctacttttggtctttgatgatggtgatgtacagatgggtttttggtgtggatgtcctttctgtttgttagttttccttctaacagacaggaccctcagctgcaggtcagttggaataccctgccgtgtgaggtgtcagtgtgcccctgctggggggtgcctcccagttaggctgctcgggggtcaggggtcagggacccacttgaggaggcagtctgcccgttctcagatctccagctgcgtgctgggagaaccactgctctcttcaaagctctcagacagggacatttaagtctgcagaggttactgctgtctttttgtttgtctgtgccctgcccccagaggtggagcctacagaggcaggcaggcctccttgagctgtggtgggctccacccagttcgcgcttcccggctgctttgtttacctaakcaagcctgggcaatggcgggcgcccctcccccagcctcgctgccgccttgcagtttgatctcagactgctgtgctagcaaycagcgagactccgtgggcgtaggaccctccgagccaggtaagggatgtaatctcctggtgcgccgttttttaagcccgttggaaaagcgcagtattcgggtgggagtgacccgattttccaggtgccgtctgtcacccctttctttgactcagaaagggaactccctgaccccttgcgcttcccaagtgaggcaatgcctcgccctgcttcagctcgcgcacggtgcgcgcacccactgacctgcgcccactgtctggcactccctagtgagatgaacccggtacctcagatggaaatgcagaaatcacccgtcttctgcgtcgctcacgctgggagctgtagaccggagctgttcctattcggccatcttggctcctccccctgtctatacaaaatataaggagcaaaagaagactgttaagaggctaaaaataacctaaacatgccaaagaagtagagagaaaattgagggtgtttttaacatttattttaagttcaggggtatatgcgcaggtttgttacataggtaaacttgtgtcatgggggtttgttaatacagatgatttcatctccgaggtattaagcctagtacccattagttatttttcttgatcctctttctcctcccaccctgcaccctctgataggtcccagtgtgtgttgtttccctctatgtgtctatgtgttctcattatttagctcccacttataagtgagaacgtgtgagttggtttttaatttatttccctgacttgtgatacccattgtgaaaatgtatattatgggtttaaaaataataatggtaataacagaaatgttaaaagctaacatttcttgagcactttctatgtgctaatttgtactgatcactgactgagcccttgtgtagatgaggaagtggaagagttgagtgactgcccccactagcatggctgtgatgtgcaaagccaggactcacccaggttattcattcctaaactagaacacctctgagcaagttttctttgcacktgagtaaagcagatggattaatgtttgctagaaagctaccagacattgayagagagccaagtttgcaatggaaaatttgtctaaacctgctagtgttaactggtatgatctccccttgttttgagaccaggcttgttctggaagtgttgcggctgttttcttctacagctctatcaatcccttcctctttccctcccttgcagcaccaacaccttcaccatcatcacccttttatctcttaggtcttgatggcttccacattttaggatatctgatggtcctccaatgtcacttaatgtattttccattgggcagcatcttctctagcctcagataagaattaaagttctctcatgagactagtttgaaaagctgaacctatgagacaaagtataattttccaatacccataatgatggatattctaaataaagaagagtatatgacaccaacaccaagttttttttttaatcaaaagcaaggttgactcttggtattcctagaatagaggcttttataacagaccttaaactgccttaatttaaagcaggtgtataaaatacaaaatggtatttaaagaggtgtagagatattaattaaaataggcttgctgaaatgccagggatatcatcacttctgaaaattgaattaagccctgaatgtcaatggtgaattaacatgaatagacttatctatccctgtccaaatatattttatccacaagctgtgtaatacacgatgattaaccagaggttacagattctagctgaaacccaatcaaattcttcagaatcctaattgaggaatgcattcaggtcaaagaatattaacagaaaagcctctgtcatttaaagggcaagcagagtgagtgcttaaaagtgttcaaaattttgcttaattgttctcttcttgagctattgttcttgatgatttagaaaacctgtgtgctgcaagtttaactgctttaattacagtgatgtcaaatacataggcctttctatttaaagggaktttaatttctgtggcttatgaaagagaaactgaaagcatagttaaaagtgaatatgttagttgagaaagttcctgttcttaccaagcaataaaattttcctaaatggatgtttgaaggagagctggtgttcagaggtgtggttcagttgaagctcctctggtagaagcccagcattttgtctgtctagtttttttgtccttagcattgcttacttttgtaaagccccagatatatataactcattgttaaagtatcacatggtttgtacagcaggatgatttgcattatatgaaggacaccgaaacacagaaaatgaaaggtctacggtgtatgacaaacaggacaaatgctctagcaaaaataaattctactttctctcaraattagcatacttgttatttaaagaaatgtgccagaagagaaatacaagattttcttttcttttttctcattgactttaactctctctgaatggcacctataactaaaaatacatctcgggaatcaagtaaccctcttttatatacatccctctaaatctatggctaagttcaatgtttaaggttgtcaaagtggctcccatccaaaatcgggttaacatttgcactttgcctaaagtgggactcctagataaaattcaaacgacctttctggtaatcccagcgtgtgggttttagcatcaccagctggctccaaatgggccactgctctctctacaaagaggagggagccttcaacacaggggccatgcttgtccattcaactgtgtctaaattcacagatcagtgtttctctcagtccctagaccagcaacatcagcatcccttgggaacttgttagaaatgcagagtctcaggccttgcctcaccgaatcagcacctctggggttggacctagcaatgtgtgttttaacaaatcctccaggtaattctgatgcacacctaagtttgagaaccacttttgtaaatgtgtgtttcaacttgacactaaccaataattctaccacttaacattaacagctttcaattttatgatcctttgtgttggacaggtcaaagtgggtgatttcaactgcttaatgggtacagaattttattttggggtgttaataatattttggaactagatagaggtggtggttgcacaaccttgtgaatgtactaaatgccactggattcttcactttaacaatgagtactattggccgggtgtggtggctcacgcctgtgatcccagcactttggaaggctgaggtaggtgtatcacatgaggccaggagtttgagatcaacctggccaacatggcgaaactctgtctctattgaaaacacaaaaattagctaggtatggtggcatgtgcctgtaatcctagctacttgggtggctgaggcatgagaatcccctgaacccgggaagtggaggttgcagtgagccaagatcataccactgcactccagcctgagtaacagagtgaggccctgtctcaaaaaaaaaaaaaaaaaaaaaaaaaaggttactttgatattttatgttatgtaaatttcaccttgtttttaaaaatatgtaatataaatgaaactcaagtgttttagatatgccagtctaaagaaatctgcaaattaaacaatttccaattcttaatcattcttattttgagtacatcctaattctttttttacacatatgatatgatgcattctaattatacaattactaaggtttcccaagtaaacatataaaacagagtatctgtaaagctgtgatttgagtgcttttcatggaaagtttctcattagaatttcttgatcagccaaacaacagttttcaactacaagcaaaacaagggaaagcattatttggttgtctgtcattgctagggtgaagactataaaagaggcaggaagagtaaaaaccaggcttttaaaattaaatttcaggcaatatcttatagtacctccaccctcatgttgggcaattcaagaggtctattcacattgcattgtatgaatagaattttatttcttttgaaatgtaatatagaatattttattttataatatgatctgaggatgcctcctggaattgtgcaacacaaaggtcttgggtgttgtcctttctgggtagagggtttgttagctactgaatatatttgttataaatatcactggggatttttttaagtaaatttattttttaaaaaaccctaatcctatgaagtttcactaaatgtaaaaaacataaatcaattaaggcttgaagtaacattttattttactgtataaccctgtaatcccacacacacacatctattatagacataatacattactatatagaatactggaaaatatcgtaaaatacattaaaaaaacartttcccttactctcagaactgagaagtaaaatctgttgtatcttgtgagagtatatatgtatgtgtgaacacatatcacacatatatagagtacagttaataacaaacagcatattccattttaaaacctattttcccttaccatatcagattttttttcttaacgagaaatattcttctacaatatcaatatcatttgaaggccatatagtatttccacttatagacgtagttcacttgattaattttgaattccccttaattgaacacacttaatacttcatttttctttaaaatataacaaccttacccctatattttgtgcttttgctgattacttgtcaaatatatttatttgtggtatctctttttatactagaaacatcaacctctttgtcaaattgttcttccagtttattgtatttttgttaattttgattttaacatgtattttatgtttggtgttttcttttttttttttttttttaaagaaaaaagctctcattcttttttaaaaaatagattcagggtatatgtgcagatttgttacatggacaagtttcataatgctgaggtttaggcttctagtgtacccaccacccaaaaagtgaatatcatatccaataggtaatttttcaacgttcactctcctctcatcctccccacatgaggagtccccagtgtctattattgtcatctttctgtccatgtgtacccatggtttarctctcgcttgtaagtgagaacatgtggtatatgattttctgtttctgagttatttcttttaggataatggcctccagcttcatccatttcatccattttactgcacaagacatgatttcattcttttcatggctgtgtagtattccacagtgcacatatagtacattttctttattcagttatccattgatgggcacttggcttgattccatgactttgctattgtaaacattttatgttcagtgttctctttcatagtgttgccttcctattccaatattatgtacaaattttcctatagtttcatcatcatggttttgttgtttacatttaacgctttatttgaacatcaatgtgatctgtgagatagtaaaaagacctaagtcaatttttccaaacagttaaaacatgtttttatcatttattaaataacacagtactttctccatggatttgcaaaataagattatccaaccaggagcataaacagagcaagttatttaacctctctgtgccttcatttcctcctctaaaagaagaaagccagtaacagcatctccctcaaaaaactgataaaaaaaaatccacaaggtgcctgacacggaataaacttcatcaatattatatgacaaccactagtatgattacaattattattagtgccctaatgctaccactagtatgattacaattattattagtgccctatctacccaactcaatatgctagtgtcttttttaggatatttacaattatatttgtaagtgagatggcctatgttgtctgtgcttacatcaattctgtcaggctttgaatgagggacttgatggcttcataaaattaaaaagttctgcatctgtttattttattactaaatgtagaatttatccttgttgtgatagattgacagaatttctctcaaacctttatgagccctaaacatttctttaaaacaacacttggaaaagtatttcaaggtctttcttaatttttgatctgttgttaaaaatttccctttcttttggatcagttttggtaattgctacaattctagaatgaattgttggggagcatgcctaaaagtagacaccaataagggagttgctctaacagtttaggcaggagatggttcccaattctaaatccatagctttccctaatatcgggcttgataaataacaacacagtaccccccatttataatgccaaaaccagggaattctcctgaatttctttctttcccttagcaccatttaccacagtcccacatcccattcctcagccaggcctgttgcctccatatccaaattacatccaacgcatccacttctctccatctccatagacctcacattagtccaacctccatgaaatagactcagttgaaatagcatcttaattggcttcctgcctccagttttgcacattggcagacaaagtgatcttccaaaaatataaattaaatcatttcactcccctgcattaaacctaatggacttcttttgtgtttcaaatagaaatctaaactccatccctctaagagcccttgtgacttggattagaatttgccctttgccccaaccacctcatcacagatcactgtgccgctctcttgctatgttccagcctctctggactctgtgttcctggagcaagccaatccgttcccaccccaaggtatcagcacctcctggaactttcttctcttctccagactttggtgtagcccctttttcttttatctaatgttcctaccccaatccactcattattttaccttaccccattttattttcatcattracttcttctctgaaatgttcttgttcattacagttgtgtgtttattgctcttctacctgtaagcattatatgcattatttacatgtgcctgacacatgttttgccttcattaaatatgtattgcatgaatgagtgagtgaatgaatggatatagtcagaatgattttaaaaatgaatagactgaggaatttaagaattagaatttttaaaagttagatataaaaatgatcccccaaactgatatgaggtaatgcttatgttaaatagcttgatttagccattccacagtgaatacatgtatcaagacatcatgttgtacaccatatatatatacaatttttactcgtccaacaatttttttaatgactagaatatacagggagctgggagtgtgtgctctatctctatgtacttgggtgtgattacaggatgtgtaaaatgtaragatcatcaagttgtgtacttaaaattaatgcattctgtgctctttaatgcatgcatgttatttctttaaaaaataaaaccataaatacatgtttaaaatagccagagagagcacaaaatttaaataatatgtgtaacttaaaagcttccatttttacatagtctaggacctaatatcacaggcaaatttaaaatttctttgaaaatgagctttgggattctgtaaagatttggggctctaccatgtggttgataaacaaaattactctctttactcaaggacctaaatggactttaaaatgagctggaaatcaactctggcttcaaggaaaagggtatacccacagggcaaacttgttttgcctcaaaacatactttatcatgtaacgtcccattcctcacccaaattagatagccttacattatcatgtgacatctgttaaataactcaaataagaaaatagttcctgatatttagataaggatacttagatttatagggtattttcctgcataagacactaatgacttttataaaatgtttcataaatgtgttttgtgaaaacacaaatatgagtcagctggcatagcaacatgcacagtgtagcaactcaaacattttctgaataaataaatgaaggaatgaggataagaaataaaaatattagaggtaattatttgggttccagatagagctttattttaattatagtttcttaaatttgaatgaattcactattttaccataatcagaagactgcagcaatcatcaattgcacaacagtgatggcctctgtaatttggcactattagctcctgaaatgtattgagatgtataaatataagcatcttaatcttttcaatataccctagcaaactggccctagcatccctagggctttcggagctaaggggaagttaaatgcccttctcttattccctgccaaaataagaaaaactttattgatttgaaagtgttaatttcctccaacttttcatatatgcagtaggcatgtcaacagagcaaaaatagtcttagctattggaaatgaggctacagattttattaggttggtgcaaaagtaattgcggtttttgtcattactttcaatggcagaagctgcaattacttttacatcaacctaatagattgacttatgtcataactatacatttcccaaaaatacaagacatggttcaaacattaatatttgtgacttagagcatcagaatgaggagattaaaagtttgaaaatgctccagcacttggatgaggcaagaatagtgaggtacagtttaagagagttaagaattaaaagtctttatgccaagctaaatgtgtccttcaaaagctgtgcatgttatgactgctggctccaacgcatctatctagtcagtctctgctattttaaccatcttttttctcttcaatttaccacctattattaggccaagaaaacttgagcatctgtcaagagtaaaaatattttgaagttttcttcaaacacactgaattccatgatttacacatggttctttttttaagagatgggagtcgtgctgtgtcaaccaggcttaagtgcagtggtgcgatcatagttcactgaaatctcaatctcctgggctcaagcaatcctcctgcctcggcccactatgtaggtggtcagccacctacaggtgtcagccaccatggccagcttcatacatgtgttctgaagcaacttttttgaaagcatggtatacacatcacaaagggtgcacaggtactttagggtgaatatctgtatttgcacaccaataaattaacccttctaatgtaaacaattcagtggtttttagtatatttagtatattcatagatgtaaaatgagcatcagtatataattttggaatgttttcatcactccaaaaagaaaccccctacccattaataagcattcttccctccttcctcttcccagaccctggtaaccatttacctttctgtctctatgtgtttaactattctagaaatttcatataaatggaatcatataaaattatgttggtgcaaaagtaattgatgtttttgcttgtgaaagtaatggccaaaactgcaatcacttttgcaccaacctaatacctggtatgtagtgactggcttctttcacttagcataatgttttcaaggttaatccatgttgtagcatataacagtacttcattgctgttaattgtcaaatattactcaattgcatgtatataccatatttgattttccattcatcagttgatagacatttggattgtttttattttttggctattatgaaaaatgctgctatgaactttcaggtataagcttttgtgtggacatgttttcatttctcrtaggtatatacctaagaatgtaattgctgggtcatatgatggctgtgtttaacatcttaaggarttgcaaactgttttccaaattggctatgacattttaccttcccaccagcagtttatttgataaattcctttcagatagaattcataaatattttctcccattctctttgttgtctttttaccttcttgatagtgtcctttgtagcacgaagtttttgttttttataaagttcaatttatctatattttattttgttacttgtcctcttggttatgtaagaaaccattgcctaacccaagatctcaatgacttatacctaggttttcttctaagatctttagagttttagctcttacatttaggtctatgataaatttcaagttgatttttgcatatagtgtgaggtaagggtccaagctcattatgataatgatgagaagttttattttaaataaacatattttaatgtatgaaatttgctaatttaaagaaaaatcttaaataaatggtaaactataaatatctaagaaatgtatctcttttcaggttttctaggaaaatcaacctaggatttatattagtaaggaaatttatacttaaaattttacttttatttattttactttttatttatagaaggtaaggatgaaatgatgaagtgggatagaggttgacacctatatatgtgccaagctctttgtgaatgtaaaattctattttaaggaaaaaaatattgtgttttgaaggctaagaaaacatgtatacaagaaactaaaatggtgccattgggcaccatcttctttaattcttagttttaaaattcagggaaatactttggttttgataagcttaagcctaagtgttgaaaaattcttaagtaaggtttaaaattaaaacgacatcagtaattgttaataaagggatcaccaaaaaaggcttcactatagtcagttcattcacatcaagttacctagtcagtctgggttgattaccttaaaatgtaagaagcctgtattatgactttattttaataataaaaaggtcctttcagttctaaaaacatggctatatcatgttttttacttcttgagcctataaaaacaatttctttataaggactaggataaccaggaggcctagtaatatcaactaaaaaacattttattgatgaaatagtttacagagttttattgaccgtgcaggaaacattcagggactcttcaatcaattctcttagtatttccagtggtagtttgagaacattcccttggcactgtttctatatctgcaaacttttaagagacgtattagctgggcatggtggttcatgcctgcagtcctagctactcgggaggctgaggcaggaagattgcttgagcccgggggatagagtctacagtgagctgtgatggtgccactgtactccagcttggatgatggagggagattctgtctctaaaaggataaataaaacaaactagagatatattcacctcaagttttctctgttgaaaaaccaactagcttttaaggaagtttgtaacttccttaaaaacagttagttggcctttctctgtgctccaaaagcatttatccctttgtcctaaaaggatctacgtattttcctcttctaccagatcattagaagcttgagggcaaagactgtgccacattcataaacataaccctggtatagaaaatggcaataaaggcataaagtttgttgaatgaataaaaaacacaaatgaaaaagtatgtttatggtattggtagagctcctggaacattcatttgcatataggtgaatcaattattgtaggagaggtcgcttcagtaaatgttcagagttttcctgggattctatgacrtaaagatccacaagtcagctttgaagaaggcagctctcaagccctcatctttgccgtccattggatggaggaagggtggcatagcaacaatggttgtttcactgcttaacccaactccctgtagtaaaattccagaggtttcaccaggaagtccaactacactctggtttacatattccatagggattaaatgtcctgtgctccataggtgcattggattatcgcgcatccactaaaccccatagatctgtagattaccttagacctttctgccccagttactgattgagccacatgtatcaggttgtttaggtttccatagcctcccctgtgctcttgagagcttaaagccccttccctagcagagcttcattacacaaaaatggaactaccaacctaattaatgacacagccatacttctttctataagaaggacattttctgaagtcaaatactctacccctgagctgtacccgcaagaaggacattttctgagacaatctgaagaaagtcaccatctgttaatgacttttcaggaagaatttggggttctaactagataaccacatttcagtgttacccttagacatggcccagcttaacacatgagtgagcagagacagatctggatgtgagatgtgtgggtgggtacaagcccattctgtttgctttatttttaatgataaagcagtagagcttggaactgtggatattggctctattgcatacatgaaatgtgtaaatgctcgtctctttatttatttaaaagaaaaaataatatgttgaaaggcaccacaagaagtgcccaatactgtccaataccatgctgaattcataatttcttctatgtataaggaattgtgtgccacacacttagcctaaacagcaatcatataaaatgacatcaatgaccacaactatcaattatgatatttttattcaagtgctcaggtattagagcataacaattgcagagccatttcagggttttctgggggtgatgagtttaacaatggacaacatttgggtactgaacttcagggacattagccgtgtctgttagcaactctgcaagttgcttttgctgtatttgaacttacaaggtacaaaatatacctcacaaggggaaattcagaagacagtctaataggtggctcccttctgtgctaatatgtgactttcaatccatgtcataagattcttataaaaggtttagcatttgtaagtcctcatgtatagattgaaaagaaactatcagcacaaattcccactgaaaagaaaacttgattcttagttgttttgaaaaatgattttatttttatatttttctcaatattatagtaaggaaatgagttcatggtcttgtaagcatttataaagtatataaaatgatgaagagaaaataaattcctgtaaattgaatatttttataatctcaaggtaaggaaagcttttttatacatggcaataaatcagaaaaattacagtgaaaatattgatagaaccaaatataaaaaaattaaatttctataggagaaaatgccacatcatttgacattaaaccaaatgatacatttgaaaaaaatattacaacatatatatcaggcaaagggtcaataaacacttaagcagcccaaaaaaaggttgtttataaatcaataagaaaataaatcctacttgaatagggggattatagccttaacaaactctttctactctaaaagacatgtgaatggccaataaataagaagatatatttccaataactagtcattttaaaacacaaataaaaacagtaacaagatattctattatttttcagcagactatcaaagataaaaaaaaattgtcaataacccatgttggtgatctcacatgctgtaggtacgataagttgaaatatcaatacctttggccctgcaattacacaccaggaatttatcctaagtaaattatcattcaagtattcaattatatatatatatacacacacatatacacatacacacacacccacacacagatgctcattgaagcattgtttataataataaaacctgtccaatgatgagaaatatgttaaataaattatggtgcatctatatagtagaatactacagaaccaaattaagagggaaatatatttctatatttataaatattttatcagtatatcagtaagcagtcaagttacaaataaatatgtttactttgattctagttatgtaaaattctgtgtgtgtgtgtgtgtgtgtgtgtgtgtgtgtgtgtttatgtagagaaatgtctacaactgcaccattcaacttggtagacactggcctcatgttgctacttaaatctgaattaatttaatttcaaccaaattaaaaattgtgttagccacatttcaagtattcaatagccatgtgtatctagtggctaccatattggacagctcagatttggaatagtcccagcatcaccaaaaatttctgttgacagcactggtctggaaagatgttctccaccatgtttttaatggttgcttctggctagtgggatctggagttaatttcatttaattttctaaattgcttgaactttttatgagcatgcaattaattcatattcagaaggttctgtcatctggaaaaaactcacctatgattccaccatgtagaaataagcattgttaatattatgttgtatttccttgcagtctttgttctaaatgctcatagttgcacagaatgacaatatgtacatgtttttaatgttgtatttatatctaatacaccataagcattgtatcttattctttaaagctcttcataaacattactttaaaaagctgcatactgttctgtctaatgtccttaaatgatttttgttatatatgttgccttgaatgtactaaaatatttaagaattttgcaaatcagttgggtttgggaaaatcaaatttatagggaagacagtgatttatagttcttttgttatatgtagaggaccatctaatacatcacgctttggagatgctttttttgttccaaatcactattcaaaaccaccttcacaaaacataatagctttagaaatcaatgtttttgataaagtgcctttattttcaagtatccactttccctactgaatgcaacaatgcacagacatctttgttattatccaccttctgagatttatccaaaatgtgtcacctctctttgaatccctttagaaaccattctttgatgaacatactttatttggctctcctggacaacattttgataaatataaaatgactttaacacaagaatcaaagggaaaaaaatttcagawttaaagaacaatgacctgaaatccatggaagaggagcacgtgtaacaaatttacttgacatcttgctctgcaagttgcttttgctgtatttgaacttctctccggaataaaactgaaatcaggggctttgtgttctataccataccctggtacataaaacctttccaattacatttatgttctcctaggagggatggccccaaaggcacctcagactttgcatatcaaaaaccaaactcataatcataatcataccctgtactcctccccaacagggtccttctccagatctccctgcctctcttgactacaactcctttctctcagttacgcagttcagaaaccgagggttgttactgacacctccatttcttcaaccccaaaactgaatccaacatcaagtcaagctgattttgcctcttacatatctctccaaatctgtcccccatattctagcaagtcacattccatccttcccccgtttaaagccatttggtggcttccccttgcttgagggcttagaatgccttgacaagaacaaaccttacttccttgcagaatctggctccttacctatacagcttcatttcacccaaccttctctactagcttttaattttctcatccttgctgctcttcctcctaccacaagaaatttgcataacatgctactccactgcctgaagtgcttcttactaaaccctccttcatctaagactcttctccatctttcaaatttcaactcatcatatgcttgtttagggaagccctctctgatttcattaattatgttagactcacctactaaactcttttgcacacattaatgaggctgtttgattaatttaatgcccgtttccttgccagaatgtaagcaccaccagggtgtaagcatctgtttttgttcactgatgtagctccattaactagcacagtgccagataaatagtaggtgctcaataaatatttgtttactggatgaataaagaccatgagacagatgcccccaagcacaaggaaaatgctgagtcttctacaaaagaatcttggagcactggtcaacagcagagcctctctaaagaaacagattcccccatgaggagaaagctgcataagtcatcaaactttatagtgaaatatcctaattacatttccctttgagttggactgtactgtatgtactgcactcagtattccccaagaatagtttgtatctgagatatagagcccaggaggctaggcccaacaggactattcttggggaatactcagagtggattctatttatgtatcccagagaaggcctaaggagagagatcttgaaagcattcatgatgcaatctcctgctgggaagaagaaagccagatgggagctaaaaattgatgccaataagagatttggagcaatgctgttcaaactgaggccttttcctgtttcccaggagcatagagtcatccttctactaagttttaagacttacagaccacctgtaaatgtaactggcagtgtgctgaagccagcttgtaccagttcatgagagccaattgttaaatgtttgctaaatttgctacagattgatacacacagccattatgataaattaaataatttaaacttaaagctaaataaattatactaaaaatgcaggtaatgaatactcaaaactcatcactttctaattattttattaaatgttatgattaagtatgattttgaggctatttatagtcttgtagctctatggtgaaattgtgtgctacttgatctttttttcaattctgaattcagtgagatcatcagggtggcttgaaattggctatgttgggagtatttacaccatggaaaacagtaaatgctaacattcggggatttggaggcttttgttgttgttgttttgggttttttggttttgttatttattgtttgttttgatttgttaaaagcctgttgttgaacatttaccggcataccacaagaggcaaccaattcatggcccaatgtaatctgtctttttgtacttcattgttgaaattacctagcaatactaggaaatcttaggtcgaagtggaattgtgaatcttccaatcgtctaaaccacatttcttctaaactacatttcacaaaaacatattgggtgggactcgtttgagaaaaaaaggytatatatatatctttttaatcccatatcatatactgctattttttaagtacctaagatagtgtttggtataaattaaccatatagaaaatatttgaataaattaattataggagtcaagaagtataataatttgagttaattcttgacaataggatgatttgaattctcttcatataaaatgggtggcattataattcatttcaaaatatttcatgcattaaatatcttcttaggaagatgcaagaacacttgacttcccagttttcaaaggattttaaaaatcctctgggaaaatattggttggggagagaaatgatggctgtgaagagggagatgaagagaaaaatgtgaaaaaagtgaacgagatttgagaacaaaaggaaaaaataattgcctaaaaattaatcagtgcaggccaacaactaaaagaagtgactaatgtcctgggaatatttactgcttttttgtaaaatttttttaaaattaagagagctttacactccttaaatttcctttctattccctatttagaattgtactggctgggtgcagtgtgtcacacctgtaatcccaacaccttaggcaggcagaggtgggaagatagcttgagcccagtggttcaagccctgcctgagcaacacagtgagaccccattttccacaaaaaggaaaaaaaaaaagttagaattgcactaacaattctggtgatagcttttacaatcatataacataactaacaatagacacaatcacataactcacaagacaatttttttcttattgaaaattgaggtcttagagatgacaactttggtcttcatgtataatgtgttttgatggatcaatagtaaggcattttagaagacattttcttactttcacctcaaaagaagcacacacacacacacaaaggcatattgaagacggggcttatttaaatgcaactagttattccttataaaagtagacatcaaaccttatcaaggctttgaattgttaagatctttatatccctgtgtttctgatggtatattattgatttttatgtattatagaatatagttaacccatgtgtatctagagtaacacaaaaggtatataaataaaacaaaggaaataaatctgaaaatcaaatagtatttactcttagaatatttttataactttcagcaaatacgtattcacatctatatttagctttatagataaattacccatttacttcaaactccttcagttacctgtagtgaactggtgggaaattttctcgctccttttaactcctacaatcatttataattttaagaagaaaaagaggccgggtgcggtggctcatgcctgggaagctgaggcagatggatcatgaggtcaggagtttgagaccagcctgaccaacatggtgaaaccccgtctctactaaaaatacaaaaattagccgggcgtggtggcatgtgcctgtaatcccagctactcaggaggctgaggcaggagaattgcttgaatccgggaggcggaggttgcagtgagccaagattgcaccacggcactccagcctgggcgacagagcaagactctgtctaaaaagaaaaaaaaaaagaaaaaaagaaaaagataagtatmagctaacatttatttcactgcattttttcatagcattcttaaaataagtaatcatgtcagactccacaaaaatgtattaattctttatgtacatgtgatacattagagtttgaggatttaattttgatcaccacactaatgatataaggtgaacagacattgctattatcattgttaaagctttgagaatatgagttgcctaatttacaaagctagttaaatggaagaaccaggaactgaaaagatctagaaatgacttgtcctttagcactctttaaattaagcttcccatggaaaaatgaattaagggaaaaacaaaattaaagtgcaaatgtttagaatataggtagtcaagtatacacaaaccatgaatatattcctaaatgtgcacacaaatatacatactgatcgacaaatctcaaagtaagtaaatggatatacatacatatactaaaatgttcttgtctctataagagattaaagtattcagtatgttccccccatattgtgtttcattttcatttgtagaacttttcagtgtctggttcttccatttaactagctttgaaaattaggcaacttgtattccctgagcttcaacttagttttccctcaaggtggatgataatagcaatgcctggtcaccttacagcattagtgtggtgatcaaaatcaaatctgcaaactctaatgtgtcacatgtacataaagaattaatatatttttgtggtgactgacatgattgattacttattttaagtatactaccagctattaattttttttcaagtactcacaacttgttatgtgcggctctcagcccttaacatataatgattcatttatttcccataataacctttttaaggggacactactattatcctcatcccacagtttggaaaactgaggcacagaatgattaacaaaattttttaagttcacatttcttcaaacgacagagccggaactcaaagccagacagaatgcaggctgtctggctgggcacggtggctcacacttgcaatcctagcattctgggaggcagagatggacagatcacttgaggccaggagtttgagaccagcctggccaacatagcaaaaactcaactctactaaaaatacaaaaattagccaggtctggtggtgtgcacctgtggtcccagctatttgggggctgaggcctaagaatcgcatgagcccaggaggtagaggctgcagtgaactcagattgcaccactgcactccagcctgggtgacagagaaactctgtcccctgcccccaccaaaaaaaaaaaaaaaaaaaaaagaaaagaaaagaaacagaatacaggctgtctgctgttttcctccatgtgtcaaaagctcacagcatagatgatggattttcttaacaaagggaacatcgtgtttgtcattattaataaattgtcatcctccttttttgatatgtttgattttaaattatgctctgaggttttagaagcccctttgacacatctaactatagcacagtaccatggaaggaagtagatatcattacaaaataggaaaacttaaatctcaccaataaagaactcatcaactagggagatgctgyggactcattgtaaaagtgtctgtgcattctattaacaaacaggcgtcattatgatagctagaagcattgaccttggatgaaagttgaggggaatataatgcttttcatgctttgtcgggggtttaaacaggaaggcacataggatcctaattgtctgctttgcacacaccattacccctcagggcatgtggattttttatgcattgcagtggtaagggctgtgcatacaaattttgctggcagacaggtggtagcatatgtcaaaaagactggggggatagtttaaaacatggctgaaaagttgtctatactttagaatttttaagtttgacaaatactgactcaatgaggaggaaaaagctaactactttttccattgactagttttcaaattgctatagttcatgcacttttattttcagcaaggatgattgtacaaataatgattaaaattgaccatttagcttcgactctttgctaggaaggcaagcacttccatgagaccacctttctttcctattttgatttctcatatgcattattttatatttttaacaaactgcctaaaatatcgctaaacaaggtaacttgaatgagtgctatttaagttttattctgccaattgaactatttgcactattttatataaactgcatcaaattggatatactttgtaacacggtgtgatatggagagggcttagagtttaccatcaggtgtacttggattcaaatctccctttacaccattttataaaactgagcaaattacttcatctttcagcacctcatgtgaaattggaataacaatagctatttctctgtgttagtttgcagattaaataggtggaagaagatacagaacagctggtgtggtagttgacacagtcactaattagaagaacttgttgttatatgtatcatttttatagagaactgaacagagtcagcactttgggaggccgaggcaggcggatcacgaggtcaagagatggagaccaccctagccaacatggtgaaaccgtctctactcaaaatacaaatttagggggtggttggtggcgcgtgcctgtagtcccagctactcgggaggctgaggcaggagaatcgcttgaaccagggaggaagaggttgcagtgagccaagatcacgccactgcattccagcctggtgacagagcaagactctgcctcaggaaaaaaaaaaaaaaagaatcttagtagcctatctgatgaaattctttcaattatagatcccatagaatacatgaagattaatcaatattgagataacatttccttatttcctataatcacttctttaatgttgtaacaggtgtattcaatccattgatattctattggctcactcacagaggttacctaaagagagttcccatatagtcctaagaatgttttccggctatggaaatgcaagagagcacaccaggaatgactgtccaccagtgatggatgagactgaacagataaatgctgcagtttccaggctacttagggacatcctaagatgtgttcttcattctgtctccaaatggcactagtgttttgagcctcagttgcccaaaatggtaaaccgctaaattaacacagtctttaaagaccttcttccctccttgtcttacttccccactcctcactgtgctttctgcaatcatctccaaaataaattacttgtcctcagatctttgacttgggtcagcttctggggcatccagacaaagatcctgtctgccaagcatgtgtattgcaacctgggaaactattagattggtgcaaaagtaattggggttttgccattacttttgcaccaacctaatagctcaggcaatgcaactttttgaaataggtaatagcagcattttcccagctctgaagctgtctctccacattctgagcccaattttcttggtccaaggactgtggatactttatttcaatcccattttctgcttcttctatggtcagcctgcctgaatgccctccagcagccccttatctttccttccttcctagctctcgaaactgcattaaaccagaccctgagcttgttcctggagatgaggaaaatctaggatgctatttagggatgctcctttaactttatttatctcttctctctgactgcttccaagaacaaccaaacttttagctccatgggaactccagggaacttttagcttctctgtttgtgaaccaggagaatattatctggatgatcgccttcgtgtttcttctaatttttttttgttttagacttaaatagtgtgttcactttagctcaatcaattcaagcctgacagcttcaaaccgctttatttcagatgaagatgcatggctaagctaattatattttctcttcttcatcaacagttttctatacttatacagwgactttataaattcatcattattccatcccaaaacaaatatgaatactcttgttatggtaatgccaytgcgggatatgaaagggcagtcctctaccagctcgtttttttcctagtatgtacccatagttgcttttctttgacatagtcagtctgttctccttctactccctctagttaaaaaaaaatagctaaaaaatatttaaagattttccatctgttacttgtgggaaagaaatacttaaacaagtaacatcctccgagtcttttgctctatttagaagaatattcacagcaccatatttcagagccatcattgatgcaagtggataggtgtttcctctataaaggcttgctggctgtgtgagccgcctaagccactggtacaccctggtgaacagaatgatagccttcatcacactcatatataaaagaaagaaaccttgaaaatgagaggtatgaggataagcattgattcaargggaatttgttagtctgtgttttattttctgagatgcaaatgttgaattcaagggtttgatgggaaaccagcctggacgtaaatttatacatttcctccacaatgaaatttgaataaagcatagcaagtcggctctgccttcaaagaaaaggtagctttatcactatgaagctgaatcacacgaatctcacttaagtataaggaatccatctctttcatttccaactgttgtactgagtgctactggaaagcctcttatatgcttgatgattgataggaatggatttgagttccatccatataactgtaattcagattgagaatattgcattaagtgcagggaatcaaattaacctacacaaatcattggataagcctacaatccaataaagatacatttcatgagtatgaaaaaatgagtaaggtatatcttctgcacgaaaaatgtttctggtatcaaaaataaaatctaaaggtcatgaagagatgttttattttstagatacttggcatgcaaataaaataacctttttaaaaagtggtattaaaaagtaaggattcaaaccagcatttaactctttttttaaatcatcctttagcctgtgtttattccttccattaattttgaatattttaaatgatataatgcagtaacacatgctgtaattgagtccttgcttcttaggtgtagaacagtctttactttcttcagtggccaattacctgaaaatgggaatcattaacatgagctttaacaagagcaaaactcaactttctttgcaacagacatgaagtaatttaatcacaaatcctgatgattgagagaaaatgaatttacttagtcagacagtctttatttggtagcacttatgggaacagaaatgatctagatttaactttaaaagtggaattcaattatagctgccaggattctgagttggtctggttaatttcagctrtggagatacatctaggatattctgcaggtatttacctacttgagtaggtaaatccttctctggaaacttcttaggaagttgagtctataagaaatactcagacataaagctccttggtagaataggtttgggagataaggtggtttgcatgcaagttgtctatcagtttgtgttattgttgctattttgattttatttgtttgtttctgaaacacagccacccatttcccaagaactgagaatgtcatactctggaaaacaaccactttttacacatctgttttcatcaaattccttctacctataaagtcctctaaaaacttgatgcatttgcagtttgtccgtccagacaatcccctctttgtgtattctctgaaagtctgaaaacaactgaggacaacttgaaggtacaagtgtctttctcggtctaccccttgcgtatcaatatgctcaacaaagagctgcattcaaaaatagatacgttattgagtacaggtcaaataaagagtgaacttgtttcttaaaggagaattctaacataatcaaggttagtgttgataaaaatgaaataaatgaagaaaagatacagttttaaagataaaatgaccagtgctggaaaagaaagcaaagcatagtttaaatcaatgtgctccatcaccgaaaaagsacgttagtaagaaacttggcttgttacatactttaaattctctgtttacattcagaactatayggttttaaaatattgtggtttcttctgagtaagtgtttctcaaatctaagtgttcctttagttcatacacagaaacctttttaaatttttttttcccaaatgttaaccatccagatgtagaatcatgtggtgagtcctcaaatacttacccttcagattcaatcagcagcatcattttaccagcctgtttcatccacctaattccagacatcacttctaaatacttcattataaatttctaattatataaagaccaatagtcttttaaaaaatataaaacacctgtaatcccagcactttgggaggctgaggtaggtgcattagctgaggtcaggagttcgagatcagcctggccaacatggagaaatcccgtctccactaaaaatacaaaacttagccgggcgtggtggcacacccctatagtcccagctactcgggaggctgaggcaggagaatcgcttgaacccaggaggtggaggttgcagtgagctgagatcacaccactgcacaccagcctgagcaacaaagcaagactccatctcaaaaaaaaaaaaaaaagaaaagatatatgagcaacaattactggggaaacttttcaaacaaagatttcagagagttggtcatgtttcttataaattcttagtggaaatcccagaagctcttttccagaattgttttctactctgagcacctactctgggtggtctttacttgcctygagttcctttatcytaaggatgattcaagagaatccctgacccccaaacctagtatctgcaattctgagaggtggcgatctttaaccaatcatctgtttatcaagttttgagcaaaagtattttgaatggacatgagaattaggcagtaaaataatgtagactgaacaaaaaatgcttgggggagaaaaaagccggagaatgagttgtgtggctatcactggaaggaaagaaagggtccaatgtatagatctgattcatctccaaatattttcccactaaagactgtggaagtaaatatattgatggactctgtaatcactgatttaaaangtgtgatttataattacaagtttcaggtgatttctgagaatgctttttctcttctgagtrtaccaaaaagaaccccacaaaattacaagtackaatatgttttctctttgaaccttgtctcaatggtgttcaaaaactttgatgcaattaatcaattcataaaacaccttgttatcaagtttaattagccttcacaaaacattcattcttcccgaacattctcctttaatctttcgttaatggtagagtgctaaatgtttcccttttttgctattattgtttatttaataaaacttttgatatagacctctccttttctgggtcatgcaaattgatgttttagtgatagcatttgatctttctaggaggcttgatgtacttgataaggtttcaacttgttagtgaaagtgagatttcagttatattaggcagagctttgaaatggggttttctttcttcataactttcctgaaaaggtgacttttcatgcagccaaacagagaaagttttattaactaaagagagaattaatggcaccaagtaaagtaactcagctggaaaggttttgtttgttttctttcttggttgtgtgtggtttatttaaacatctactatttttttaaacatctactatttagattttttttaaacatctactatttcttcataaggatgctgtatatcaaaacctccaaaaaggtcagaatagccagtctaagtaatcaggacctgttggcccagtatttagctaaataaataagaatgtaagtgtactcctggctcagaagctggccagcaaatttgctaagtgattgatttgatgctaattttctgcatggacttctcatttccttcagggcctgtcctatgggaggaaataacttcagccaagctgactgagccctattttaggtttcactttgagctttgaatgtttggaaaactccctttcccagcaggactacatctccaaaggatttccatttatgatgacccaaagaatgcaacttgctctaaaaagactgcagaagttccctatgtccaaatcccagtacattccgaggacagaactgaaatcaacatatgcatggcaggcactacgattttgctcacgctaattctgtgtctctttgcatcagtactgactgttggagcaggtctacgctgagagccagggctgtgtttcttccctagtcctacgtaggcattgtcatattttaatttcagaataaccaccttctttgtcttagtgcattcaggaattaaggagaagaatagagatttttcattgcaatacacaatttatgggatgattgaaggaaatagagaaccatgacacataaaaatgtgtgataggatcacagaaagagcacttaactgcaggctatagtcttgagccagaaattgtctctccactacctctgggcaagttgcttcatctctctaggccatttgtggaatgggagccttaaactcctacaattttctagtaagaataaaagcaactttgttttgaaatcattctaactcaacagaagttgaagttatgctatcacgttggaatctctagttatagactaattattttcaatatttattacccaggaccccaaattacgtgaacttttggatgtggggaacatcgggcgcctggagcagcgcatgatcacagtggtgtatgggcctgacctcgtgaacatctcccatttgaatctcgtggctttccaagaagaagtggccaaggtatggtggatggaaattgctaaagcttatcatcatgatctgaatccttgagctatcatactaatgcctgcaaaagactgaatttttgtcatatttagcatgtgttaaaatttcacctaaaaataattcagctgccaagtataagtgcaattaaaatacttctaaataatggcatcaacttaagaattatggagatttttttcataaagaataagccatttggcygggcacggtggctcatgcctataatcccagcactttgggaggccgaggcggacagatcacttgaggtcaggagtttgagatgagcctggccaacatggtgaatccctgtctctactaaaaatacaaaattagctgggtgtggtggcgggcacctctaatcccagctaattgggaggctaaggcaggagaatcgcttgaacccaggaggtggaggttgcagtgagccaagatttgccactgcactccagcctgggtgacagagtgagactgtatctcaaaaaaaawaaawaaataaataaagagaataaggcatttgatatagtttctttgcataacaaaatacaaataaaaccacattctatttcatctaaacactttctcccaagtcattctctcttagcctcatccctatgccacttctaagtccgtgtcatttccagctctctcctaggggacagacatcttcagccctctttaaacttcttaatccctgggcagcaactagcccaccataatccatgtagtagttactcagttaatatgtagactaatgaaaaactaacagtttaaaataaaaattttagataataatgaaaataatattaagtaagaacaaataatatttattcaattacggattagaaagatgaattagatatggcccacccactgaggagctgccatttcactaggagcaagcctttcagatatttacaaaaatagctagaaaacaggtataatgtagcaaacaagaagctgtgaacatctaggacccctggattcaagtgcaatgctttctctagaaacgtccaattgtcattgaaagaatactgaaatgaacatatttaaagaagagctttctttttccatttttatagtttataaaatactagtgatagtccttctccttcatataacttccttcaagagttgagaatatgaatctaagaawactttgagttctgcrtataatatatgtgccttacagagcttctcatgtcatgcatcacaactacagggtcacttcatgtcagtgtgcattgtctaagtattgtgatctacaattttttaaccctcagtgctctggtgattttctgagctacaccagatgtgttggcctggttcctttctttcttttctttcttttctttcttttctttctttctttctttctttctttctttctttctttctttctctctctttcttttctttctttctttctctttcctttctttcctctcttctttcctttctttctctctttcttttctttctttcttctttctttctttctttctttctttctttctttctttctttctttctctttcttctttcctttctttcctctcttctttcctttctttcctttctttctttttctctctctctctttcttgtttttttttttgatggagtctcactctgtcgccaggttggagtgcaggtagtggctcctgcactccacttggctcacttcaacctctgcctcctgggttcaagccattctcctgcctcagcctgccgaatagctgggactacaggcgcatgccaccatgcccagytaatttttgtgtttttagtagagacggggtttcaccatattgaccaggatggtcttgattgtcctggtttctgtgtcattagtgattattggcagggatttatttctaacacttatgtaatattgactttaattcttataatgggatgcataaaatgccaaccagttttaatattctaatgtctttagaaactactctttccaagtatgttgtaaacagaatctactttctctctttataagccaagttacccatttatttctatagtatcatttatacttggagagatttcagttcaatgaacattgtctgtgtgacatatactttattttgctgtatatgaatggatagttggatggataaattaatacagaaaaaacagattctaagtgtttgcaaaatatttttaaaatatgtttccmcaaatgaactatattccttttataaaaagtgaccaatttatgggatgcactaaatctcaattaaaaacatgcaataaatggcagtggctttcagggaagcttttgctaagagtaaatatatttatattacacatcaatctgcatatcttaagttgcattaagcctttgtgcagtcctatctaaaatatatttaatttcctcttctctgtgggttcctagccactaattttccttagggatttttatctccaatccctgtaatattccctctcaggagtgcatctgtagagattttcccaggggctacttgatgttcccagtataattaatgaagctatggagaatattttgccttccctggctgtgatgttctatagagtattttcccccacactgaaagtgctcagccagaaacttaagatttgcaagtaccactgttaccttggagcatcacgtatcacagtcacacagggagcctgttaaaacacagattgttgggccccagccccagcaggtctgggatggagcctgagcatcttcatttctaactggtcccaggtgatgctaatgctgctggtccaggcaccacactttgacaatctcttccttagagaagcttgggcacagtgttgccagatcttgaattttcttctaaaaggagctgcaaaatccatgaaagrtgttaaatattggcaacagttgtttaaaaacaccatgtgaaccaaaaaaacattaactatggtctgagtaagacttgggagcttccatttggcagctttttggtctagattcacattaagtaagaaaaacattgtgctaaataaaacctcaggtcctgaccactgaatacaatgggggaagcacgtaacattatcttgcagagcagaatcagcactctccaccacatttgttcattctctaacttccaaaccattcctagagccctctgggtgcctaagaaatgtgaccttttagcacagcatttttcagtagacagagaaccatctgcccccttaatggtcattgtggaaatttttcagaagttttataataggccacttttttgtgacttagattggatcctattcttaaccacagcatctctcatcccctataaaggaaagagagacagaataatataaaaagaaaatnttttggatgtctccaggttccatttttaaacatgtaacttgaaaattagagaataagggagacaaatcatgcctttgggccaaatttaaaagtcaagaagaacacaatcactacacaatgtccttacaacactcaacccattaattcaacaaatgaaaaccaagcaaatgagaaattactcctggaggagacaaatatgggttttttttgttttttkttttttkttttttttttttttgcctgctgaaaaaggtaagactttgttgcaaataaaatatgttcccctgaaaggccataattttgactctttttgagaaggaactaagtggcacagaactcatactcatgagttctgtaatttgggccccaggaaggaacacagtaaacgggagagagcactagagaagatgtctataaatgagaaatgttagcaatactcttctgccaaatggatatgagccttcaagcccgttgacagtttgggtacattcttcatccataaaatgaagaacttggattcgttcactcatttattcaacaacattttgttaagccttctgcaatgtgccaagtcctattctagatactggagatcaagcagtgaagaaaacagataaagacccttgccgatgtggagcatacattctagtgtgggagacacaataagtaaaataaagaagtcagccacgcagtgtattaggaagagagtgatattgacaaaaatgagatagggatggagagtgcagtggaaaagggcattaaatagggtggtcagtgtagccatctctaggaagtgacacttaagcaaagactggaaggaggtgagggaataagtcaggaggatgtctggagagacagcactgcgcttgcactacagcaggtgcaaaagccctgaggcaaaagatagtctggtgtactttaggaacagccaagggcaagcgtgacagcagctgggtaagcaagattgagggaaggtagtagcagagggaactgaggaggcaactgcaactgattttgctgtaggatggcataggcttttgaaggactttggcttttactgtgagtgagatggaagccccgagagggtttcagctgaggacagatgtgatttgacttaacatttaatccataatggaccgcatgggggaggggaaataatggaagcaagcagattcgttaccaaactattgaaatatttaggtgagttgctaatgacttagaccaacgtggaatgtggaggaaataaaaaggaatccaaatttgcatgtatgtacacacacacacacacacacamacacacacacacacacacayatyataaagaaggaagtgatggcatgtgtttatggattttatgttgcatgtgaaagaaagatgcatggaatcaaagacgatgttaaagttctggcccaagaggaaaagatagaaatatcatttactgacatagggaaaatataaaatagaatataattttttgtttagaagtatatagcagaagttcagttttggttacgttcagtttgagattattattaaatactcaaytgggtgattttgagtaggtagttggatatatgagcctggaggtgagtgccaaatataacacgtaaatttgggggtcattgggtatttgattgtattaaaaagtcatcatactttttaatgaagctggatgagatcagccaggaagtgactgtagatagagatgtccaagggctgaatcatggacagtccaacataaaaagaatcagaaaaacagaagctgagaggaggcagccagttaatgccatgctcatgggaactgagccagattatttaatgttttactgaaatgtagcatacacagaaaagtgcacagtttcttactccataccctgatggagttttgaaaaaggaatatatccacctaatcaacatccagatcaagaaacagagcataaccagcaccctagatatccaccctactaacacctctatatcggcagttaacatgatagattagtcttacctgtttttaaaatatctgtaaatgaaatcatacaataaagtctttttggtctgacttctattattcaacattatattatgagatttatgagattcttctatattttctgtgtaattgtagtttgtccattctctttgctaagtagtagccagtaatttacttacagttcatgggcattcttgtagttgtaagtttagggctgctacaaataatgatgctgcaaacatctgcctttcagagagctagatattggagtgtaatgactggtcatagatctttgtgtgtactgctttgatagatactgtccttttctcaaacttgttgagccattttgattttttaatattatttcacacataaaagaaaaatttatcagaggatctctgtaggttaaattattacattttgaagtagctgtcatgtcacagaagaaatgcgctctctaaaaatatgttatataaagtgaacattagtctttaatgtttgtaattttagattcttccccctctgtagctgtgagtatcttggagagtctaattcacttatttcaaggatatgagtgagattttctggaagttttcgttaacttcgtctatatcagtttcttgtgcacaatctagataacacaccagctctctgaatttcctaactagctctcacatctctttcctgctccccattcttcctgccatcttgttaagcccttgacaggtctcatggatagtcattacctacctatttcctgaaattctctcacactttgctctacaaatctgcctgctcatctgcataagaatggccttttaaaacaacaaactcattcctgatcatattttaaatcattttcattctctattacctgcaaaatgaagtttctgtgcatttagtgaacaaacatttattgagggcctagtatgtgccaagcacctcgctgggcactgaggattcatcagtgacccaacatagtccctaccctcaggtactgatgayccaccactttgactgttgcaccattctgttctagcagctcctaactacttgtgattcttctacctttacaattgtaatattaatgcctttataatatggtagtttcctagactgcctttctctcttttgtccaccaagaaaagtcctaggcctcccgagggactcagcatcaactcagttcatccatctctcgctctatctcatgacttccatgcatagcccattgttctttcatctgttgttctgtgaaccttgaacatattttcaattacagtcattacactgtaattatcaatcagtgtgtcttataatctatcctgtatttgcgagctgatgaaagtcaaaaacagtagtttagtctgttttgtgttcccaggatctagcttagtgcttggctcaataaatgcgagaggtgtgagagaggaaaggaagggaaaggaaaggaaggaaaggggaaggagaagggaaaggaaaaggaaaaggaaaaggggaggcttttgaactcttgaaaataagtgataggtcacgtacaatcttagagtcatagtggcttttaacaccatgtgctgcaatcttttcatttagagttgggagaaattaaggccccttagcagattggttgcttaaggcttttcctagaataattctctctccagcttgccaggattctcagtaggaggacccaggtggcattcattacgatggcttccatttycctaatcttttttcccaaagctaaccttattcccactcagagttactgtgactgtcacttccctacccagcagttactccacgctttcttaagcaaatgaaaaatagcttctatttaccaaatagttgacacctttcaggataaggaaatgagagaagatgtcacggagaggggaatttcttttaagcaaaagaaattatagtctatgggataaaggtgggaaatagaaaagaaagagggacaagtgaagggttctgctaaggccacctccgggccattcatcaaaaacttcaggaattttcttagagttgccctaaaataatagtattagctatttaaaagtgacctcaagagacatgaggttcttatatttatttttattctgggaacatrtgcattgaggtaagaattttgaaacacttgcgtatattctgtacaaaatgtgygctttatctcgtttctattttgaatttcaaacaaatttatgatgagtaagcagtagctgtaagtttgactttaaatgaaaaatgattaagaaaaaagaaaaggtggtgccataaattgtgttcagcaatttgttttgggacataatggaaaactgtgcatgacttccttgcaggtagaatacatgtgccaaaaagatcactgtttgcaaacatgaaaagttagatccatgttattgtgttttgtgagatcatcattacctgctattcctgaccttattatattaaaaaaaatgcctgtgtcatcttaggctattcttccacccaatcataaaaaggaccaaattcttactgtgtcaatacattgcactatttgtcttggaattttatactggtaggtgtcctttgttggagaatgagatttactctacattctgcacattttggatatgtgtcaggcaaatgaaggatgcacaacttaaacttttatattgtgaaaacatcgtctatctggaacatttgtttaaaagctcataagtcaaaagaaagacattcgtattaaaaagatttttattaaaaaaggggcaacttggatttcagtctctcccttacacacacagaagcagcagcaattgctattctggtgactgtggaagaaagcacccctgccttctgtctcctgggtgtcttttctgcatttgctagacaagaacttttttggagccagagagtgctcaatggtgcccacataaaaacaattaatgtcaaactgaagggaaaatgtcaacgctgagacatagaaatgactgtgatttcagactgtgggttactgttagtacaagcccacctctcccctgaaagagaaaacagaaaactgcatcarcaatagcatctcttctttccttccatccrctccattgcagagacaagctactcttctgcatacctccatctgcctaccttctgatgcctggcagctaagtaagccctgattgcattaccggtgtgcctagcctggaagcaagaacatgagcaccacaaaaaaaaaaaaaaaatcaccgtgactttttggaaggaagargagttctaagaaaatctggcttcyttgtttaaatttctccctccacatataaaatattggtgttggcaggggaatactgacatactttgagaaaggcargttgatctgtttcacctactaccttgatattggttgtcatctttagtagttaagccaaatgatgcccaatgaaaagctggcactaaggattaaaaatactttttgaaaataccttgctagtaattttcctgataactatattataattttcattcattcaacaaatatttacaggcataatcagccaatgaaaaggtgaaatcagaagagggaaattaaggaagatattacaagaaaatatctgagagctaaacaaaagtactggtcttaaagtctaaatagcaagtacaggaatggagtagattcaggtaatgagtaggaaactggaagatgacagataaatgaaaaagacttaatttttttctctccaaaaaaaagttaaagtagaagggtggggataaatgtaccagaaatgtattatccaaatataaaccatgctaaaacatgtaagattttcaaaaactgaaaaaagaacttaaaaagatamatatatacttgttattaggaatgttcccttcggaaagccatgtgggttatggtgttggaactgaaacaaataatctgatatattctaatatatggcctagcagaaaattatagttgcaatttcatactcatgtaaatttttattatatttgttttaaactttcagaatcaatttatatgcaaataaagtcataattatgaatgcggaacaagataaaaactgaccatttattttatttattgatttatttttgagacggagtctcgctctgtcgcccaggctggagtgcagtggcgccatctcggctcactgcaagctctgcctcctgggctcacccgccattctcctgcctcagcctcccgagtagctgggactacaggcacccgccaccatgcccggctaatttttgtatttttagtagagacggggtttcaccatgttagccaagatggtctcgatctcctgacctcacaatccgcccacctcggcctcccaaagtgctgggattacaggcgtgagccaccgcacccagccaaaaactgacaatttaaaagtgagtttaagctaacgagagttggaagtaaaaggaatggcaggtaaatgtcctcctatcataaaggagccaagggatactatttttaatgagtggatcaagagagtttgagtatgttgcttgagattgtagaggtgacagggaggaaagggcacaagtgatagaactctatcacaagcaaggagaaagggcaggtgagagatggaatcagagatttaaagcctcctcaatcagagcaggatattatagtcaaattctaaaatcagtcaaggaaaaacattatacacgcacacacgcacacacacatgaaaaaagcattacacacccatatatataaatagaaatgtgtaagtaaaccccagaaatttaagaatagaaatgctgaaaatwgttgtcaagaaacagaactaggacgtagaagtgatcattgcctttccaacccctctgaacaacttttaagaaactctgtctctgtttcatcgataaataatagttttttaggttactatcatttaacaagcatatattacacctgtcactggtctaacatgaattatcccaattctctcaaaagccctatgaaataaattctattattgcttccattttataagatatatgaatattggaggacaaatttaaaaagacttgtccaacatgattctgtctttgcatttggcctggagtaacagaaaaccaaatcaaacaatagctgagacaaattaaggatttttaatttgtgttttgttcagtttttcttttcttttctttttttctcatgtagccggaaccctgaaggtagtgttgtgggtgccactgcctggggtgggcattgtgggtggtaagagaatttaccaagacagtgataggtaaagaaaggcagatttattagagaaagtttgaagatatgttgcaaaggtgcagtgggcagcacagcagagaaggggctgtctgcaaagaggcagggattggagggaagtttcatagggtcatgatggaggggttatgtgcagaatgaggtcatgcttctggagttactgggactacgtgctgaaggagctatttgggaacagagtgttgtgccagcgggttgtctgtgattagccatctcagattgttctccccaacctagggccctttcctcattgttgcttacttatcttattaggactccacaggtggtttctggcactgattcaggagctcagggataacaaggctgagtgaggcccctatgattctcgtggcctttttctcatagatcgagatgcctctgtagctctagcctttccatttacattccctacagtaaaaggaaaagagatctatatcaggaaacacattttcccagaaccctccagcaggcatctgcttacatgtgatttgccatgtggcacatgttggtcacccagctgctaaggacattggaaaatggatatttttttttcagttgaacatattattggcctgagcactgttgggcctctgttaggcaagaaggataaaatagatatgagatagcatttggcagaaggtcccagctagaaaatggtagaattgtgttctgaaatccaataaattataaccatgataagctagaacaaggatctgcaatatgaaagtcaggaagagccattaaataaactgatatcaatattttacttttaaattagaagacaagaaaaaaaaaaaaaactgtgtttaagagtcactattccaagrccttcacaggcagtgagaatggtcaaagatggaacaatcaaggccaaagacaaagaatcgttcttatagcagaggaagaactaacgggattgagttaccaagggcaaaataccctcttcatttgaagagaagaatctagcttgcaaaaaggtttaaaataaagttggaaggtataattaaggtaatttaaaacaaatttatttccaaatgagaaaattatatttcagcagaattctgtcattaaattataagttaatgaggaactacctgtgcctcgttcactaatcagttttcaagtaatgcagttttaagwttgtcgaactgctttcataataagcagataagcagcatgcttaatgcccaagaattgcgattgctcccctttttctgtttcacatacatcttactaaggaaattagcagtgcttttttcttttaaaatccttttttatgtgatctcttcaaatggaattatttttgtaatgaacaacgatatcaattataattacagaccccgcttacatttattgtctatggtacacagcaccgaggcagatacaaccaaagtaataattaacactgagactgctaggattcaaaggcataatagcaagtgttttcataagaatgacatgagactgttggaagaatcatttcaggaatgtgagggattgacatgaaatccacaaaaatgaaactttgggggttctgtatatgagcacacaattagcattttctcagttgtacaaatgaataatgactcaggaaactaggaggagggaagggaggaggtctccccagtggatgctaagaatacacctgagactcccagtgatacagctgcagtcgtctcattgtgaaaacttcaacagaaacaaacatctctccgttcttctactctgtgccatggacgttgctctttgggggagttttaatttttcccgtggaagaattttctttaagttcattttcatttcatttcaccacgttaaacttttcccatttggcagaggaatgtcaagargactgggacatactagaactggcagcctgaactcttccttagagtatcaggataccatttagaasaatattgcttcacttacctgaaaaaaagatacttgaacaacagttcttcagaatacagcccaaaacatcaaccaaagcataataagtatgtctacatagccaacatagatgcccaaacccttacacaaaagcttctgtactttattaattggagagcttgctagtcccatgttatatccaggactcctaatgtttgtaaactattccagtatagttcacattacaacagaaatgcataaagccagtattacaagccctctagccaagaatggttattgaaacttataacaatagaggagatataaaaattaatttcaaaagacataaatcataaagcatggaagtcagtctctttcatttacacattcacttatgcagtcaactcagtgattatgaatctattacctattttataaaaaagaatgcgaggcagaactatgagatcccacataagttatgaaacaacacacaccctttccttccgtctgctttcccacaggactcctaggtaatgggcatatgccatgtttgctatactctcccctcttctggtcattgcttccttcccagatccaattacttggttgtcgtggacactgctaggttcttacctgattgattgttcaagaggtagaccaatcagacctttcccagcattcttgttactgaaaatggaggaattagccagaccttctctggtggtgaaagataccatatgtgacaactcttggtgaagttggtggccatggggaagaacccgtcagtaaggaaaagaaaaatgccctcaggaagagagcagagtaatagcaaycaagaaagcccttttgcattcagtctccaaattcctgatgatcatgtatttattataaatgcattttttggctgcagtttgtccagtttttccttcaattacaggaaacgacccattgcacttgatactttctcctatttcttaagttagtttgagttgtgcttttgtcagatgtagcttaaagacatttgaataacatgatctgaaaataattatgcatctttccttgatttgagtaatattattatgctagttgtcctaatcatgacaatattgagtcctaatatgtttcctagctttttgttagttgggtttttttgtaattatgtatgattggcaatcatttctcttttggtataagataaaaacgagagcactttgactatgatataagatccacagagaaactataccagaattttttccaaaattctagatgttcagtatagtatcaaaagtgcagtcagttatcagatagtcctttctgattttaacaaaaggctttccagctcctgtaccatctttcaccatgaaaagattcttcactgcgtcattaagacattaaatgctcagcaggatgaattctgatgcatgccagtagtgacagaaatgtgttcagccaggtgaggcaacactgactgaatcacacaatgttcctccttactcacatcacacactgccacccccttatgagtagaggtaatcagaatgacaccattatcaatgacagcaataggagtttgccaataaataaaaaacaaatataaaayattaaaaaataggacctttacatgtctcaccaatattaaaatatcttgtttaaaattattatatrtcccagtaacttttaaatattaattcaatagaggacgagataaatagtgaaacacagagaatttttagggcaatgaaactactctgtgtagttaaatctccccaactctttctaatgctgtacctttttctggcgtgaaactagcctctggtaaacatacaaaactgtatcttgccctcagttatagatacttttaccaatgcagaaagttggcatggagctagaaatgtctaaagcttggccatgagcctacaaaatattataccagaaacatatttttgaaaccagtggttattattcttagtttaaaattatctattttaaggaaaattgatttttaatttgttagatagttactgtgaaatgctcttctgtgtcggcataaagcttggtgagcaataattttgcttctctcttgcagctattctgtactgtctttttaagtcctcctccaacatatagagttcaaggtctcagtatttctcacctggactactggactattacagcttcctaactgagttacccttctttggattctcagcctcaaatccatccttgacctggctgccagataatctgtctgatatgcagcctagccctggcatcacattttttactaatttatctccagacacctaaatgctctttatcctctgaccacaactctagtttgttgtcgcaaccccctccctcttttctaattcctattagactactttttgtttgctctaactcctgccatgttagctcacctctagttcttttcccagttttctctgctcrggattccctcttttcttccccatcactctatgttccctgctcctccagttccatcytgaatgttactgtacacatgacagcgtattatcggtgccttaagtcaggaagcaaaaaaaagacaaatcaaacaaaagtagaaacaacaaaaaaacaggtggcaaagcaattaaactaaaagacattatttcactttgggaggctgaggcgggtggatcacgaggtcgggagatcgagaccatcctggctaacatggtgaaaccccgtctctactaaaaatacaaaaaatagccctctccctctccctctccctctccctctccctctccctttccctctccctctccctctccctctttctccctctccctctccccacggtctccctctccctctctttccacggtctccctctgatgccgagccaaagctggactgtactgccgccatctcggctcactgcaacctccctgcctgattctcctgcctcagcctgcccagtgcctgcgattgcaggcgcgtgccgccacgcctgactggttttcgtatttttttggtggagacggggtttcgctgtgttggccgggctggtctccagctcctagccgcgagtgatctgccagcctcggcatcctgaggtgccgggattgcagacggagtctggttcactcagtgctcaatggtgcccaggctggagtgcagtggcgtgatctcggctcgctacaacatccacctcccagccgcctgccttggcctcccaaagtgccgagattgcagcctctgcccggccaccaccccgtctgggaagtgaggagcgtctctgcctggccgcccatcgtctgggacatgaggagcccctctgcctggctgcccagtctggaaagtgaggagcgtctctgcccggccgccatcccatctaggaagtgaggagcgcctcttcccggccgccatcccatctaggaagtgaggagcgtctctgcccggccacccatcgtctgagatgtggggagcgcctctgccccgccgccccatctgggatktgaggagcgcctctgcccagccgcgaccccgtctgggaggtgaggagcgtctctgcccggccgccccgtctgagaagtgaggagaccctccgcccggcagccgccccgtctgagaagtgaggagcccctccgcctggcagctgccctgtctgagaagtgaggagcccctctgcccggcagccaacctgtctgggaagtgaggagcgtctccgcccggcagccgccccgtccgggagggaggtgggggggtcagccccccgccctgccagccgccccgcccgggaggtgaggggcgcctctgcccggccgcccctactgggaagtgaggggcccctctgctcggccaccaccccgtctgggaggtgtacccaacagctcattgagaacgggccaggatgacaatggcggttttgtggaatagaaaggggggaaaggtggggaaaagattgagaaatcagatggttgccctgtctgtgtagaaagaggtagacatgggagacttttcattttgttctgtactaagaaaaattcttatcctgttgatctgtaaccttacccccaaccctgtgctctctgaaacatgtgctgtgtccactcagggttaaatggattaagggcggtgcaagatgtgctttgttaaacagatgcttgaaggcagcatgctcgttaagagtcatcaccactccctaatctcaagtacccagggacataaacactgcagggtcctctgcctaggaaaaccagagacctttgttcacttgtttatctgctgaccttccctccactattgtcctatgaccctgccaaatccccctctgtgagaaacacccaagaatgatcaataaaaaaaaataaaaaaaataaagacattatttcattgaagagggagccaagtcaactacaacaatatcagatgatgacctaggtcttgtgtcatcttctcttggagaattttgtaggggtttcagcccagaatgtgttgtgtgtttcaaataatcacgcagaatggaacttctatatttttttgtagacttgctcttttccattatcttggaagcctagtgagatcattgctttctggtatgaggtagggattatgattaggagattagtgagatattgacagtgttgggagaagggagaatattgcatattatgtggccttgtgactacatggtatggagaatttctagaactgtagttaacagttaaagataccagatatagctgctttggcatgagtagtagagcaggaagattatgtttgcatgttctgctggaaacatatttgatcatattttaaatttttaatgactctttatctgtttataattcaaggaaatagtaaaatgtgcttagttattgaagggaaacagagcaattttctatttatacaaattttaaaaagcagaaaaacctttatgtacaaagaacatctcctttggaaaagagtagtctctcagggacttgaatttacttatgtcatttttacccaaaaaagggataataatacaaaacaaaacaaaaaacctttggcatgcacattgaactaatgtgtcttcctggaagccaagctaaaagcatgtgtctaatgactgtgcagtatttaagctaatgcaagtgttatttacatttttcaggaatggacaaatgaggttttcagtttggcaacaaacctgctggcccaaaacatgtccagggatgcatttctggaaaaagcgtaagtcactctaattttattrctaagggckttgcttcttctgagtcagtttcctttctcctttgtgagtcttcygtttatgccatactgacttctcacattgataaacacaaattttcctttgggatttattagagaactgatacctcccctgttcagaattggaagacttccaagaaagattgctctttcctccaagctgcacatctgtgttacacctgggctaagttcgcatgaatgtcagtgcttttgacacacaacaaagagacacttccaaatcctggcagctgtgctcagaactaaaaattattaatttcagataatcctctgcttctacatctgtgtgtgtcctctcaattattaatctgaggaacagcatatgttcctcatttctgtagagttatagatagatgctacaatacctttcctgactacttaaatcaataggctgacatcctgattccatcccatgtagatgatcccagcaagtattagtaagaaaagagaaaggatctaaaggaaagagaagaaggaaaataaggaaagaaaagcaaaacaaattgccagatcactctggaattgccacagcccttctaaaaattgtttgaccaaggaaaataatgacttaggcaagatgagcagcaaggaaagctggttgtgttcattttggaagctgtggttggtcaggaggttaggaagtctttaaatcaaaaccacaagtagaaacattaataggtggtcctctattttgtttaacagagttctgtcttccctcttcttatgtaagacatacccatcattccagacctaatayctcagccacattcctttattttactcttctatgaattccttttgcttttagtcaatacctcaggtcttcatttaagggcttttttatgggatcgcctcctctcctgagtttgttaacttaaggactcttccttcatgcctccacctcttcccttcctttcttcctctatgtttttaccttgtctttgattttatcatccttcttctagaatatgttttccagacaatgtttctagaacattcattcttccatgaaatgttagtgaaaggggacacagaggtaaataacatgttttatctgaaacatagcatgttattgctagttggctaatcaatctctactacaaatgtctattccagaaagatgtctccctatgaatagctactatggacatgtcttttagtgaacatattgttaatatttttgttgcacacatctagctttgggattgctgggccttagygtgtgcagcttcctgaagtagaattcccaatgtatgcatccatcaacagtgacctagagttctcattctgagaatgaatatataagcaaacaataagyaaaatatggttarttctcagaaacatgctattgagtgaaagaagccaaacacaagagtatgattccttcatgtaaggtgcaaaaacaggcaaaagtaatctatgctatttgtagtcaggataacagttccctttggcagggcgtttgggaagggcttctggaatgctgctaaagtgacaatgttctatttcttaatctgggtgccaactgtggagacttgggcagtttgtggaaattcagcaaaatgtacaaaggcatgggcttttttgagtgtattttattgttcaagaaaaaaaagcttttttaaaaaaatcaaacccttgtttttctgcttctccaacagctatactaaacttaagctgcaagtcactccagaagggcgtattcctctcaaaaagtaagctttgtgagcatttctcattattcattttattttcctcaaagatctgaatccatgccatggctctgttttgtttctccagcagcctaagtrggagtgtggaaatgcgtggtagccctgtcctccctcacacatgtctcatgtcagtgcagctgctttcctcatagacgtctccccggggcttccctttcctctggcattattttcaagaaataccaaagcaggaagtgggtggaggaagtggagggacccttgctactaaggccgaaaggccatctgagattcagatctgttctaggagtggaaattggccgacctcagtgcctctttctaccaagatggctgtagccctcaagcagggtttgcaacctcagatgctaactggagccaggcagggaatgtaaatgatgaaacaggtcaggaggaggaggaaaaactaaagagcaaaccctgtctaaaggagacaacagctcatctccaccatatatcctgtgggactggtgagcacctgacactagattgtctaatgtctttatagaacccataaacctaaattagtatattaaattgtccagtacttaagttctatttttaaatcaaattagtaacgaaaaaaagtccatctctaggtcatatccagccaaaagtctttaacttttgacttacaagctactagaaagcttctgcgaatacacaaattaagccaagcacagtggctcatgcctgtaatcccagcactttgaaaggccaaggcagaaggattgcttaaggccaggattttgagagcagcctaggcaacatagtgagactctatctttgcaaaaatttttaaaaattagccaggtgtggtggcacatgcctgtagttctaactactagggaggctgaggtgggaggatcacttgagcatgggaagtggagactgcagtaagctgggatcatgccactgcactccagcctgggcaacaatgtgagaccctgtctctaaaaaaaaaaaagaaagaaagaaagaaaagaaaagaaattaatttaaaagtaaacaaattaaaaattaaatttatwaatgcaatgtacaccttggggcaatgggtagtagcagcaaggggacagaattaataaggatgtttattttagtgcttaatattagagattatttaatgcaatattttttaattgggtcagcaccataatcctaaaataytgattttatactagacaccttaattttaaaagcacncagttgatctttcagaagacagatgcaaatgcatggaggaatggttatcttttagttctttaaatatgaataataaatagatttgactgaatggaatattttgagttggcatcatctgttagtgctgtgatccatgtgccatttaaacctctctcctttgttgtgttcacttcacagcatatatcgcttgttttcagcagatcggaagcgagttgaaactgctttagaggcttgtagtcttccatcttcaagggtgagcatgtgtgttatgctrtagtttgaatgttcagcccctccaaaactcatgttgaaacttaatccccaatatgacagttttgagaggtagggcctttaagaggaaattaagagcttccatgattaatgggttaatgaattaatggattatcatsggagaggaactggtggctttataagaagagaaaaacagacctgagctagcatgttcttccccctcaccatytgattccctgtgccacctctgccaaagtggagagtccccactagcaagaagacttttgccagatgtgccctctccaccttggacttcccagcctttgtaactgtaggaaatacattttgattcctatatattatacagtttcaagtattctgctatatgcrtcagaaaacagagtaagactgaaaattggtaccaagaggtggggtttttgctgataacaaatatctgaaaatgtagaagcagctttggaactgggtaatgaacagaggctgaaaaaartttatagagctagctagaaacagccaagacttggtgaggcctcttttcactcctataaccccagtatttcaatctagaatgacccttgmtttttgtagataaaaaagtcacctaatcaggtaatatttttaaaatagtcaaaaaaggctaacattatcaagatgacaatttgaaatgtggtttcaaacttattaacaataaacccttcttgatgttttttttaagatattagctaatgatagtgttgagttaggaggcgagactcaactctggtggtggggtatgaacaccggaccaaattaaggaccagctaaaacagggggagcggaagcagctttccmtaagatatgtccatgtcagtttaccattgccagggcaacaccgaggaattaccaccgctttccacggtaatgatccaatgacccaaaaattgccactcctatcatagaaatttctgtattaaccaccccttaatctacatgtgattaaaagtaagtataaatacaacctcaaaactgcctgagctgctactctgagcacactrcctatggagtagccctgctctgcgggaacaggcatggagctgtaacactgctgcctcagtaaagttattttcttctaccctaccactggctcgtccttgaattctttcctgagtgaagccaagaaccctcgcaggctaagccctactttggggctttccagccctggatcagtgtgaagccgttatgtttaggaagatatttgaaatattaatttcatctcaccttagcattttaaaatgtttagttttaagatgtataagctatgtaagcaattagtatgctgctatgtgcttataaataaatatatttacatactttacagagctgtgctcagaaagtttttactgagggggtgcaggatctaaacagtttggatctaaacacctactttgctcatacggtggtaaagtaggtgagaggacaagcatgtaacatgctttcatttttatgcctgacacacacaaggtacatcatatacrttaaccacctcaaataaaataatttgctttcattttgattcatttctacatgactggctctaaaatgatttgttactattgtttctggaagtccattgcataaaatttttttctcgtgcagagctctcctttcattatttttatctgagtatctaagcaacaaggaagcctttacctaagggtaacatgactttataggaagaacctttgagcccctcaaaatgtgccagcaatgttcaagttgcactgaataagtttgcaaagccattcttagacttatgattgaattataaaagtattgagtgctatggttaaatttatcagccaattattgttgtgaagacttttcaaaacagcaaagttcattaacaactttggtgggtcacaagaaagaaataagagcacctcttcactatcacctttcttctataggtggaaaaagctaatgaggctgcgaaaagtgagcagagctgtggaaaggctcccccaaaacattttcaccttcattttataaagcaaaataaaatgcttgaacctgcttgctattgcttttttgttagatgctttggaataggaaaaatataacaattaaggtcctgtccccgacttcaacaaatatttcttgagctcttactatgtgcccataggcattgagaatatggtggtgaagaaaatgaaactcaaggtttcaaggacaatagagtcttctggggaaactagccaataagcatgccaacaaatgcgtctgtaaactgggggaagtgctataaaaagaaagactggagaactactattgagaagaagggaagctcattccagaaaaagaaaacaatgctcgcaaatccctgaggctggaaataatttccctactggatttaagcaactgagaaaagaccaccgcattcaagcataaagagaaaacatgagagatggatttgcaaagacatgcaaagaatttttttccttttgcaatcacttctgattttaccttttctggataacctctggtaaaatataataatcaaaatatttaacttatgaatctagctaagggaaagaaggaatagaaaattaaatgtatgaaccaattccccgtaaattgtaattttctaaacaactggattctgagcagtcaataaatacacattgagtaatctactatgtttattatatgttcaaactttcagaccaatgtcaaytgcaggcaaatttaaaaggaaaatgagattcaaataacatgagttatgtttaaattagaaaaaattatctctaacaaattaaatgtaatgataattatctgaagttggagaaaactttaaaaaacctctatgctaaaactttgaaaaattattattcatagtaaagtataatttacttggatgacttatagaattagaatgctttttaaaaatctaaaaaccaaagactgtttcagagctaggaaataaatgtttctgtgaactgactatgaygtatcaaaactctgttttaaatctctgtgataatttcattcctacataacaatgactctagaaaatatccactaattagcaaaaaattttggccatattcacaagaggtattttaaacaagccacggaagaaaagggttatataaatcatagttggttctgcrtaaatgggagcatattttgtagccaagtcatttaagctagatttaattgtgctctgtaaatagatatattaccagaaacacagtggatgtcctgttgagatttctttttaaaacatgatattactgcacattgttrgggataaataaggcacttgaacttgtatcctggcygacgtgatccactagaataacatattcctttagaagatgctactctttagaaatcacagttgctagcctgaagttaccctaattgttaaaaggtagtactgtatccaaagagagagacaaagcaattactgtccttctgttaacaacccaagcatattttccagtgagacccttgaaaactgttccgtgttcaaaaaattaccactttacccacaaactttctgagaactgaaaatagtttatttgcaccaaattcccttgatttaaggcttattaacttgaaaagagctcagtgacatytggaattgtataatagtcttgccacagcactggcatacggagttgcattttaacgaagaagatcaggaataaacccatgtatttgtttcaaataataaagtttactgtagttgrtgggcacacatgtaatacaaagagaaattaattattttaaatttgaagaattgtataaattttactaaatactatgaataaaatgtataaaataacttctgtgtgtaacttattagtatgttgcctttcttctgtgccttacatcctgaatataaatcagaagcaatcacttttgtagttgtgattcttaatatgactaatatcaaaattctactttaaaaccaaattaagtattccgttcattatgagtgatttacttgtagttatttcatgtattccatggctaattcaatgttttatttatagtttcagaataaaaatattgacagtatattgaatttctgaatttactgggaaattgtccatcaacttgtcaagaaaaacaagtctatatgtggactttattcattagagtctgcttcagtgaattaatatattttaaaataacattttttctgatttttttccraaatttaagtacccatttctcatataattattttttaaatcaagaaatatataacgaagaaaatgcagaccaccgtcccaaaactaataggaatatttagtgtactggtttacagtataaggtatagaattaagcaactcagattcaaaatatagtcattgtgacctcatcacacccatttgctcaacccaggaccttagacaagttttgtaacctcctagcacttgtgtgttcctatctataaaagtagtacagtaataatgccaactgcatagagttgatgggattacatgaaaatattcaagtaaagctcatagaactatgtttgatatactgtaaatgctaattattattctcattttgagtatttttcatatgcatatattggggggatcttgtttttatttttaatttggcatttggatatgacattaccaggtctatggaatctagaaatgcaaatgccaccagtactaccaccaagattgttaaaatcttttcccttttgagattccttgtatataagcatggtattgaaacacttccattttttcaagtttgccagtactttgcagtttctaaaataaatgggcctcattcagattactaatttagattatactagccttcttaagtcatccttcaaaaaggccaaacaacaacaagtcatcactgacagtgcgttttgtattgggtgcctgatgtgatggaccacgtcctggattaaaacagaagacccaaggtctggtatcatctcctgggttcatccagcaaacactgattaggtatctattatataccaggcaccatgctgggaacacaaaggaattaaataagagattgtcatgtcactcaaaagctcatagttcagtagaaaataagaaatataaaaaataaaggaaaagctgtgaaatggatgcaatgatgaagatagataaagggagactgtgaacacaaagaaaaagtagtgtcatgtctagctgatgtggtcaggaagggttcacggaggaatatttgaacattgggcaggatctttagagtattagaccttggatttcctcctagacaaacaggaaaaatgaatccgtgccattcacttcaccaagctgtgagattgagaaagagaaagtctgtgaattagctttgtgaatttcagtcttgtttaagatgcaaggaattagggattatccatagcttttacctaaacatctcccctatagcctttcatctcagcatttaatgatgcttacttattttaactcctctttatggaacattttttcttccattttcacctactaaccccaaagactttggggtatcctcatcagtcaagttgggcaagagaaaaatgagacaaagaaaatcagctgtattgaaatattttctttcttcaatatgctatcatccaactcgcaatgaaaataatgttgtgtttattcagattatctctttaatttgactcctcctaattcatagctggtacataaacaatgctaagattttagtaaagcatattgttctatcaaattatgtgtcaggactcttacgtaaatgatgttagttaaatttgatatttcaaaggaaataacagcacatgcgtgctcgctatccatttctccacacttctcaataaattacatccattcatttagtaaatatttatttatacctactgtatgtggcacactggaaatagagccattaacagacaagacacatatcctagctcgtgtacatctgcagattagcaaagactagacagaattgtatagctgggagcacaatacattgagtgttgaaatgtgagacatgcaaggtgtgatgtgtgcacaactggaagacaaaatccagttcaaggggaaggcaaggctttccagaaaaagaagttataaatagacgggaaggaaaagagaggtcagtaagtgaaggatgacaattattgctatccttagatcaaattaatttatgtgtacgttgagtgaagttggtgaaagggggaatgaggtgaactctttttagtagggaaaataggagaacacccttggggttcataaaatccagtaaagctggaggcacttgagttggccagcagtgccattgagcatgttcttgcaattgattttaaatatttctcttccttgtgtctaacagccaatgagtatggtagatagggtcattttcatctattaaaaccatttacagagctcctggtgtccacttagagagagggtggtactgaaaagtgagcactctccggctaaagagatttctctctttctataaatcaagaggacttttggaaacctgcttgcaggttatacttgttccctttttatgaatggcaaaatactaataaaacaattcacaagaagtccccactgctcttggatttgaccgcttgtgcttatttcaaagtttgtgcccaagtagcccaagttataatgatacaacacatctatgtataatgattcatgtattgttcggttgtctcaaaattctgttttgcaaaatagattttttctatctctgtaaatggatttagcaaaggaaatattacttcattcattcaatccacaaatacgggtcttctgctgtctgccaagtggtgagctaagttctcctatctgtttgcaagtggtgaacaacttcagacaataatttttagacatttgtataactgtacatttcaaaacctatgaaaatagtcaaaggaagggtgtgttcttttgtttaagggcttgaaaaataaaaataatcacattaacacatacctgaaataggaagactgcatgaaaaatgtctttcctgttaacaaaggcttgaatacatgcttccggtttccatggcagcccaaccaaacagaaaaataagtcatagaagtggccttttatatcaatgacttgcttcctaaacaataggaccaggagcagtcagtgaaaaaataatgactggtgctgtcctacttatgaaaactgttttacaacttatcagattatttaaaccagagggaacatagtttgaaaataattgacacaaaattggaatttatgttttcattttgactatgtctgtctctagggtcattacttaaaaaaagaaaaaaaaagattcaagtaggaaaaaaaaaaaaacctaaaaataattctgtcaaacagactatctttcctagatctaacttgctttagaaaatgtatataggaaattgcattaacatccctttagcaggagacaattcttaaacttaaattaaactgaaaaagccacagaaaaaagggtttgacaccctaaagccagtgtccaaatgaacgctacggttgacmtcataggtgtgttatgaatgtttaccctgacctcctagaagaaaaggaaaaagaaaggaaagagagagggagaaggtrwgggaagggrggaagaaaagaaaggagagaaaagaagacagagraaaaacagggagggaggaagctggggaaggaaaaagaccatttgctgactccgttgttttatttcccagaatgattcaatacctcaagaagatttcactccagaagtgtacagagttttcctcaacaacctttgccctcgacctgaaattgataacatcttttcagaattgtaagagtacacattttaagccatatctttttcagcttgcattgattctcaggtggctagagcaggacttggagtggtaattggagatggaagaacatcatacactgtgtctaaaagcaatattcctgtgtgatgttttggataggatcacacaatcttgcccctgaggtgcaaccactgcttttaatgagtacaagtttgctgtgatatattgctggaggtagttgtttttgtatgctcagataactttgtatggttgaaggattatgggtagaacagggagtcatcttggcttagcagaaatagactcatgtcgcaggaagaactctggattgggaaccagttattttatctctctgagccacattagcgacatgagaagtttggattactaagaaccctctcagctgaagaattatttgcttttctgttagaaattataaacttatatcaaggcattacctttttttgaaagattagaagaaaaaaggaaaaaaaagaaagaaaccaaagcactaaggcaaatgtggggaaagtagcagtttacctttcttaaaatactgaaatccacatgacagaaaatcaatacaaaatgtggtaaacaaaataaggatttcttcaaatggaagacaggtaaacagtactgctgaaaatgacattgcatattcttgctttgtgctgttcattgccatcatatatttactgaacatctgcaacatttgtaccactgaatttgtctttagatggtcaatacaattgaaatgggaagtttgaacaatatgttgaggaattatactctcttgttgaagcctaactgtaacttttaaaaacrctcaaacgggttgtttactttaagtaatgacaataaatacatctttaaatgatyacagatatatggagttggatgattaaatcaaaaatttactgtcataataaaaaaacctctgtgttcggtttagagtggtgcacccttatgcacatgatgcagtgttttcccactgtgggttttcttacccatttggtattttgcaagagcattgggttttagcggtagcaattgcacaagatatttgtagcccatagaggtatagaaattatggtggagaagcacagtgttttcagggcaagataggagtttcaatatagcattttcttatcaagtataagattttatttccctagagttaaatgcaaatattagaatgaaacttagtttaaaaaattcttattgcttggtttttcattgtttttagtggtgcaaaaagcaaaccatatcttaccgttgatcagatgatggattttatcaaccttaagcagcgagatcctcggcttaatgaaatactttatccacctctaaaacaagagcaagtccaagtattgattgagaagtatgaacccaacaacagcctcgccagaaaaggtcagtactttctttcacaccaaagggaagctcttgtttctgattgggggtagtcacacgctgggagttaggaacaccagtgatcgttaggytagtttcctctgtttacaaggcattcctttmggtctgaaatcacttggtggttcagtgcactaggtttttctttaaactttggtgtgtgatttttttgtcattgttgttatatgtatagatgcatgtaacatatttttaaaatgtctaatcctttattttgtttcaaattcacgcagtgactgaatgcatatttcatacaggaaatcactatctttaggttacccttttgtctttttctagtaagttctgtgaagtggcccacaagtttttctaacgttctaaaactgaagggaatatttagtctgtgagacccttatctttttccagtatatactatctgataaatactatctgataaatttttctacttggggaaatagtctaaaatttggctgtctgtgtaaaaaagcctagtgttgtaaatacaaaacaatccaaaaattgatagcccaaagacagctctaagttacctggaagtttttaagaaatttatatttttgattctgggaaaatgaattgccaaaataagatcatgaagatgtaattactgcaaattttcaactatatgtggcagcactgtccctgaacaagatcttccactgagaagactaactctcatctggattgaaatatcttcaccaagaaaattagtgtgttatcactgatgttattgcagattgcctagatattccatagggaggaaaataaagtacaattaaccaattattgaaaagaaatcaattatatattaatatgcaggcattttctaaagtaacagaaatagctctagcaagcttatggtcatcaataagaatgattatcataaaagtaaatttaaaagtcttttaatccattgtgtttaatctggaactggtcctctaaattgaaaatgaaatcatgaagtataaatgggcccaggcactgtggctcacgtctgtaatcccaacactttgggaggccaaggcgggtggatcactttaggtcaggagttcaagatcagcctggccaacatggcgaaatcctgtctctattaaaaatacaaaaattagtctggcatgatggcgcatgcctgtagtcccggctactcaaaagactgaggtaggagaattgctttaacccaggaggcagaggttgcagtgagccgagattacaccactgccctccagcctgggtgacagaggaagactctgtctcaaaaaaaaaaaaaaaaaagaagaagaagaagtataaatgtaaaatctaaaaatctattaatcatattctacatgctactagttgggaatttttagatgcaattttttagttttcatttgttttcttggtgaagaactttgcctttgttgttgttatcattttcactgatgctgtgaaggtgagattagttaaaggaaacaactagcccaacagtatgtcttggcatggccaggcctgcccctccaaacctacttaaataggttgcccttccttccctagtacacaagagatgagatttccccttatcatgaagcagggaacatcttggaggttttgcccatgtagcttaggagttctcttctaaaatccaaacttctccaaaaataacgaacacattgttataacaaatccaacaacacttctaaaaatcagttagcccacgacactaggaaaacaaaaagcttttctgaaaccagtgaagcactccaaagtgtaagccttttccttttctccttccttcacaccacactgctgatggcacaggcttcagctggtatccaatgcctccatacatcatcctctgatgacttgcacgatgtagagggtacaaagagaaaaaattgtgatagattactgtaaaaccccataatcctagaaaaactgattttgattctaatggaaattaagatgatgtctcctagcatttgcaaaattatttagtgccattttatgaatttcaaatcgaaagaggcacacaagatatttaaaaatttaaatatttttaaaggcaactttatctgtttttctataccttaatatgacattgatcacaaaacctctgtgtcaaccttaatagcagtataaagaagcaacatagaataatggttccacttttgagtttcaaagctgagatccacctcactagtttcatagccttatgcttaacttctctatgccttaattatttcatcttcaaaattaaggacagaagaattcttgatatgcttttcatagatttgaattaaataatacctgcaaagcatttggaaagaagaatctgggcctgtgtaatgtgataaataagtgttaactcttctcaatgttttgaagtgtagtatgttggttttcattcctcaggtgtcgttgtccattttttctaggagatcccatgatttctgggccttaaactttcttctgttttccccagcacctagaagatgcacctgctcatgatgaaatccttaatgtagacttgtagttgtgatctaatcagtgacccaaagcatttgtgccccaacttatcacttaagaatattgcctagtggtctctgtacagaaaaattttggctaatgctgtctctacctaaagccttatctagcacgtgggaaggacagaggctttggagtccaacggytagaatatggctaaagggccagccacctgctaccrtataacgtgcatcctcagtcaccccaggggactccagcacccgttcagaagttctggctggctgtatttgtagctccttcttctctagaatccatatgaaagaaattcaactcttgaggagttaaaagtcaaattacaaagaccttagtagggtcacttcagctttaaggcatgtacacaaaaacggactcatgatagctgccttgttttaggataaagggagattgtgcctgtttatgtttagttcagcgcacactagtcattcagtaaatggcctaaattgttattatcactgtttaaagcaggccaaatagtactagaggaagcacacagtctctggtattctagtcttacaaactcaaacttacaagccaacctacgttaagtaattcataacttcagtattcaataaatcttcagtgaaaggcaagaggctacacacagtgacagacccagagataaaccctgtgcccctagagatttgcactcctcttaaaagtgtatatatatataattatataattatttattatataattatatataattatataattatttattatataattatatataatatacaattatttattatataattatatataattatatatttattatatttattatacagttatataataaataattatataattatatataattatatattatttattatctaattctatattaaatataattatttattatctaattctatattatatataattatttattatataattctatattatatataattattatataattctatatataattatttattatataattctatacataagtatttattatataattatgtatataattatttattatataattatgtataatatgtaattatttattatataattatgtataatatataattgtttattatataattatgtataatatataattatttattatataattatgtataatatataattatttattatataattatgtgttatgtataattatttattatataattatgtataatatatatataattttttattatataattatgtataatatataattttttataattatgtgtaatatataattatttatcatataattacaatatatattattaacataatatctaaayatattaataatctaatatctataattaatataatatataaatattacttcttgaaatccaacgtgcacctgaatcacctgagccgttgttaaaatgcagattcgagatcctgcatttctaacaagttactgggtgaggcagaagatgcttagcaaaggcccacaccgagtagcaaagctctaagaagtaaagagaaggcgcattaagcatgaagataatgagatttcttcctgtaggggacagttcatggaagagataacatttgggctgaattgattttaacacagatgagctacagactttaaaactttaaacttttagtcaagtagttaatacatttggatcaataaacacataagaaaataagtagggaagtttagtattacattataatttattcttctgctgctttcattttaactgttttcagatgtgcccaggtgttagttaaattggtgttgatctcagtgctgatgtggaaattgagtcttatttacctgagaaaggcacttccatatagcctatacttgttataaaatgctaagcataagatacacacataatatacataatagaatataaacatatatataacatatatatacacacaacatagatatacacacaacatatagttgtgtgtgtatacacatacacagagacacacacacagtctctgatatcaataaacatatcttaaagtaggtgttaagcaaataaataatatacaaacctgacatatgctgtttagcttttatgtacattttacataatttttacataaaagatagacttgaaattaaatgaaaaatttttagtgtcaccaaaagcccaaatgccaaagccgaccatagtttagctgactaaaagtgtgacacatggaagtatgaaatgaaactccagaagagacaatagactttgatcttctgaggacctgctgtaattagcatgtcagccacatctccatgctggaatttctgttttgggagatgtgtatattggttataaataatcagaggatttctgtgcagtctaaggccaaatgggtcatgtatgtgggttccagaaagagagaatttgaagcttgtcacagaggatactattctcctgggagtgtggtttatttttactatttaaaaattacacattgaaaaatgccatggcctctggtcagcaaaagttttttcctttccatcttgtttgcactgtagacttaaatattcctggcacaggaatatgcaatgacccctgcctcttccaaacaaaatgttcatgaatatcgtactttcaagatcagtgtctccaaaacagttattttttatcacttaaactcttcagatgaaagacagtgagtaaaattagcatgaaaaatagaatagctctataggtacctttggtaacagaatgcagacttcaactgatatatctataaatgaagtccaaattttacttaaataaactgccaaaccaaaagaaagcagtaatttttttcatgcttttattctgtggagatcaggtgttcatgagtgtttgttaaataattgaattaatgtagcagattataatagcagatgtttcaaactacattccttttatcatcagttcttcctcctaaatttttataaggtatactatacaaaagcgtccccactttgttgtaattaagtcataaaaatgaagctctataatcccttttagtgatcactactcgctgagttaatagtttaatagttgaaatgaactcaagattataatggcgaagcaatttggttttaggcaaagttcagatacagcaagtgctttagctttttttcctttaaatagacctaagccaataatgattgtatcagtaggaaaaaaaaaccctattgcattttcaatatagttttatttaaagtattatacaattaagctatattctctcactgtcaacaccaagaaataggctgagagtgatagaaagagactggacttgggaaacttgaaaactgtagttttagttgagactccttcagttgaaaaacggcagaaacttaactcaaactaaagcactgaataaatttgcttgtgcatataagcaaaaagtcaaggtgttaatggtttcaggcatgactatatccaggagctcaagtcatgttatcgataattgtcttttttcatctctcatcattttctcatactggctctagttcttgggcagattttcctgaatgataagacagccaccagcagcgccaagcctatagctcaccagtcctagtatacagaaatcctttttactcatggttcctgtgaaagtcccagaatccagggcatggcttcggtcactcaaggccacttctaaattagaatcacagtgtcctgaaggatgggataaaaataaatggacaggcttaagtcatatgactccccctagagcccataaggggtcaactacctaaagcacaaaccacacggaccgacaattggagagagatggttccctaaaattcaaccaggatgtgcttcctaaaggaaggaatagtggtctcttggcaaatgaaaagagtagatcacactaaaactagttcagaaatcattcattcattatgactttttatttggccttataaagccatttaacttctttgactagccctgctccctagttttctcaactttgaaattatttcctgacagaattactggaagaattaaataagatgcttttgttaaagaggttacatatatttattgttgttggctaaattgtcatttacctgaactaatgaaaagtgatcattggcatttatgccaaattattttaaaacatttatgagtctagaagtgagactcagagccttgggctgaggcattcctgaacattgctgtttctcatctaacagccttatttaatgtactgcaattaaggataagtataataatttattaatgaaacttgaaaaaaatatggcatgtcacatctgtgcacaaatggtcctttctgactcaatcattcttttctatacctttttattaaaatggaattataattatagtcataagtgtaaggatgtacacttgactcttactatttacttcattatcacttcaatttcctagtaaattttttgaatcatatttttccagcaccatttcgctttactaggtagamgttataaaaactaatgatggtgatgattataatctctattctccatccttgaaagwtcaaacatgccctaattaaagaaayaggctggcatagtgtcatgatgaagccagtaaacctcaggcaagagacttgacttgtgtgagcttcaggttcttcatctgtaaaatgggatgagaccagcaatgtagcagacacctgtgctattcccatgtcccttggcaatcatggttccaacccagccacctacacacttggcaactcttcagggccttctatcagtccatccacagccaggctacaattcccagggactgcatgcctcaggagtagttgaagaataaataccttatcttccatgccccttgggttgcaaagttctgatgtgtgtyctctgctttctcccagagttcctcggtgagactgagccctaactgcccacagctgtaacctgcctgatacccttctccttcttagctgcctttccttcttgtctcacttctcttctctactgttgtttcatagggtcaactcccaaaaaaggtgcttgcactcaaatccttgtctcagatcctgtttttggaagaacccaaactaagacaagcacttttctataaatggccttaagggaatcaaaagtgaaagatgggtaaggtcagagttgctgagcattgagagaaaaaaaaatggaaagaggctgtgcctcatcattcctgccaacctatcacgttattgtcttcgttgtttccaatcacgaagccctggccagtggcctccaatcatagatttccagtctacaaaggacttagccatttagcttagtcaaactgtcagtttattagaagaggcagtttgcagaaatggcaatgttgggaccaagaccatgttttctttgtcccgctactccagacatccacctaggcactccaacaggacttgcttagaaaaaagttgcaacacagaccatttagaagttagtgatcgatgtctrtagcagtggtttccaagctggtcctagacatagcaccctttgtttgtttcttctaacaaagtctcgtgagaaaggccaatrtgtagggaaaagctttaaaggtgctgtcttggtggaatagaggggagcctggagtacaggtgatggtggctgttgccctatcactctttctcctcctgacctaccccattctctgcagggatgtctgcccaaaccctgggatattcaggatactcagtttaaaaaccactcctctgaaggaaatactgactagtttaaagatctgcctcacaattaaggtggcatccatttaagtcattttatatagattacctacaaagtagttgaggaaacagaaccgacgtgaatcaacaaagtcaacacaaataagatcaattttctcccaaaagacaaaaacagaggaaaactatatgatgtagccaatgctttcatgccttaattaagttactacactgaaaaagctgctgaaaagctactctaggattttattgatcgaaatctcatttaaattcctcctattgactctctaacctctgcggaaggttacagaaaaatggcattgtcgtccccgagtgcrttccaagttcttcttaacttcatgtttggtatgttcatagacttctctgaaatatttcagattgcctaagaatgaaaaaaaaatttttcaagatcgtcattgtggatctattgttcattggttgacttggcaactccctttgctttcctttccgttattacatttcctttattcccagaaggcagggcctgggcctgaggaaaggcaaaggcctggcctaggaattctgtttcttttctcctttatttcagtgacctcagtgtctgctcaggcccacagctctggccagaaagtcacagccctgtctactcacagctgaaatgtcctttgttcagaaaataaccagacaggaaaaatataaacagtaaaaggcaaaatcaaatgccagtccacaggatagataagtgagcttggtagcctcatcaaccccatagtctgctgagtcttgttaaaacttctttccttcatcayacctttcagaggtgccttgccatttcatgggagagctattgggacagagcagagaatggcttctttccccctagatgtgacctcccagcagaacacagcattgacaattgttggctagtatagctttccccttgtcagcagggtctaggagcaggttgcagtgcgtgtggggtggggtggaggggactctggctcagtcaaaactgcctggcaggttgtactgtgttgggagggagagaggccacaggcgtttggctcctaacttcggcattatccagggtcttgtcaatagtcaatgtgatacaacagataagtgggagggaaataggtcgaatgcagaaaaaaaaaaagcaaaccacagggaaaccagattaagtgagggatggaccttccaccctaacccttaatagaaaagctgaaaaatgtaccatagtagggaatcctgccaggaagtggacagtgaccaaggatttcaaaaatctcttatggagattctggaaggtctgtcttaactctgaatcactacagtctctaggatgccagctgtgacagcaaagattatctccaagctagggatagcattattttaacaggagagttaattgagaatgatggacaaaatcaagcttcttacctaagcattctaccttatatgtagaaaatgagcccaaaaaatgcttctgaacaatgtggctatatgtctttgttgagggttttcccagaagccaactttgaaagaagattcaagtccatagagtttggaaggtgattccaggaagtactagtagggcagtagggagtgtgaacgaggaagagaaagcagcttacaaaaaaatgtgttgtcaaggcagtcattcccaaccacagccattgttggaggatgctcttagaaagtgttaattcttaggcctttccagcctgcaccacataaagtcagccatcaggcagagatgcagatacaagtccagcccagctgtatctcctggagcaccagtacagtctgctatgatattattaccagcaaaacactattcacgatactataaaaaggatattcccacctcactttgcagctttaacaagaatctccagcatatcaaaaaagagatccttcaaagtacctgatgcttattgaacgcatttctttattctaacatatacctaatgcagttgcgtggacactttaacaatcatgtattacccatctaacttatgaactgctagaaaggggaacaaaatccagataagatatttgctctcaaggagcctataattacaaggagaaaattctaatatcacaaataattataaaacaagttataatgtgattcacttccatttcttcatctagctaatattcattcattcgtaaatatacttccattcattcatctagcaaatatctattgaataactatgtgcgagggaagcttgaaggwaaaggaaagttttgtttattgacattgtggggagtttccggaattgctctaagctctttacctgcaaattgccatggtacatttttcagcttttctatttcttgtacaaaacctcagacaagtcttcaagtgcatattattattcccattttacaatgaggaaagcgagtctttggatggtccagacatttgacttgttatactgtttgggaatgagttgagaggtaagtctaaaaatgtaacatttgtgacctgaatggaagccttcatgctattcttgacttactcgttggtttatttactcagcacacagttttttgagtcttgctacctgtgtcaacccttgagtaagacaatgaaaaggcaccattcttcacctatctgggctctcaatgtagtagaacctcctctgtagtcagtacagtggggaaggatgtgctgaaggcatctgaagaggaaactggcattccatgctgtgctttatgctgcagagcagagggccaaatgagagacaagaggcacttagggcactaaaagataacatgttttaagtagctcatcagaaagcattaatgagaacataattatgttctgggtctgcatttatgctagactatggaagagatgtaaataaagtgaaggccatggtccttgctcatacaacgccaatgtccaatttgatcaaggaacataacattctggtgaaggagctagaacatttttcctcccttgcattacggtcaggaaccactgtggagggtctcctctcataaagcactgtgacagtgtactcataaaaggcaatggaattggtttcctaccctctgagaacctctaattttaaatgataaatcagtacttatacaaatccatgttccaaacacagctctaaagctgtacttaagagagacaggttctaatctggattctgttcttatctttctatgtcattttaaaggggctatttaatctctcttgggacaactttgcttatctgtcatgttaaataataaaactgtcttctgcctaccaaatagaatgatgaggagtaaataaactcacagatgtgagaatactttgaaaaacggaaagtgctaaatcaaagtaaggtgttattattgagaattttcacacaaaaccacatcaaatagtacaacttaatacagggaaactgcaagcacacagaaagctgtgagcactgcgtgaagagctaatctgcaggagcttttgagaagagtacatagccatttaggggccattatcacaccatatcttggagctgtatttgcacatagttatggtaatagcacagtttttgcaatcaagatggaataacaatatatgacacttttcaacttaagataaaataataacacatgaaaacaggtgcagaacatactgactccagatttaggggaaaaatggtaaaataatgaaagaagccagtgaagttcatgtaatgtacaaaagcacagttagctggccagtgtgataggaaagtttgtgcccgggcaaagataactgagaagggaacatttagattatttcttaaaataggcaaatagactttggtgagccatgggatattaatgccatctgcacttactttctctgagctgatctagcagaattcgcaagggccaaagcaccaggaaaaaacgtgagccgagaaattgcttttcagtgctgtgcttagaagtgatttaaggaggtgctaaaccactgggctggtagctttccagtatgctctggtattattgcattaagagtgaagattgagcaatgatgaatggattctcaaccacctaatcccagtgacatccaaacatctgagtgccagatcctgcctaattggcatttggcacagtagaaggaggctggtgtccatgcaagctggcagacacattgtccagttttcccatcttgactgtgattattctacgtggatttatgggccatctgtcttccaaggcaaaatttgtagatttttctgtgctgcagagctctgaagatgttatttgcatgtgtttagctgtttttattttttaaagctaacctgcatattttttgcaaagcccacaaaacaatgtcacttcttgtgttcagcatttctcttgtcctcatgttggcatgayaagttttctgttatatttcatttttcttcctaaaattcagattcatgggttgagggataaaaatgctagaggacatctttaaattacttgcagagattagaatgtaaattaagtcgggaaaagaatttggaccttgatagacaaattcaaatcaaagagctaatcctcacgcctctgccagatgggtcatttgtccaccggagctcagcttctttacacagaaagattaaagtaacacgttttagagagataagtaaatcatgggaaaactctgccttggtcacatttaggattatttttaggaccaatgcagagtgcccagattgaagccaactgccaagaaggcaggatacctttccttcccatcatccatgccccctatccaggccagtgttaggaaagttatgtggataagcaccatcaaccacacccaccactatctgtctttccattgcccaggcatgatatccagatccatttcacaccaaataaccccgtgccctcagacaagttgctaacatctctaagcctccgtgtactcaactgaaaatggtaatttaaaagtacgtctctcataggatttctatgcctggcatgtggtcaatgctcagtaatagtagctcccattattatgataattattgttatttaccttcttctatcactagatgatgtgtgatgtctacagcaagcagcatagcatcatgtttaatggcatgaaacacaaagactgactgcctgggctcaaatcccaacttactcacttatgaattgtataaccttgagcaaccttatctttgcttgggcacaaaccttgagcaagctacttgcctcaggtttcccatctataaaatagtcataaaagtacccacttacagagttactgtgaggataaaatgagttaatacttgcatatagcaagtagcatatcataaaagattgttaaacaatatgctggaaatattttaaatcatgaaactcttctaaggctctcttcttccttgcactttcctgttatactcttttttttttttttttagtactgcatgtgtaagcatggcctgccacatgttctttccttgatcctttttcctttagcacttggctactgctgccttaaactgcttttgggactagctcaggagcagttccatgctagttctttgatgccatgatgtgggcatttcctagctaaccatccagatatgcataccgagcagggaagagcctcagtgggggcccttccagagaccttagcaatgtgccatgagttgtatttagggattagtttttgactatgccctatgtacttttttcttgccctgattcacagagctcatgcaaagtgtaatgagagaattacgtgctgaggacttgctactgagctcagaaatttcagttaaatgaggggcatcagcttgtgttaccagaccttatttaaagttacattcagctgggcacggtggctcacgtctgtaatcccagcactttgggaggttgaggtggrtggataacttgagatcaggagttcaagatcagcctggccaacatggtgaagccctatctctactaaaaatataaaaattagcctagcatggtgatgcgcgcctgtaatcccagctactcaggaggctgaggcaggagaatcgcttgaacctgggaggcagaggttgcagtgagccgagatcgtgccactgcactccagcctgggcgacagagccagagtccatcccaaaaataaataaataaataaataaataaataaataaagtcacattcatgaactcagtggaaagtgagagcctattaaattatttcagatactttacttgtgaacctaataggaaattctaccagggctgagcaaattcggaagctaagaagagatggcactgatggagcaggtggctcgcaatgtgcaataccttgaagtacagccaactctgctgtcacttaaggattgatttggcttattctgaattattctagtccccttttccagtctattttgatagctttgagcatttaatgctgtctggttagcacttcttctaggcagaggtagggtgtaaggataaaactttcaatctctctaagactttgttaggactcagccccccaaatccctgtctttcttccgcatatttgttggacttcagggtaccgttagtcagtgccagcgaggcctcttggttctgttctgtgagctgttcattgcatttcttcgatgttttcttcttagtccttcctttgtagtgtcatttacggctgaatttggaattgccgtttttagttgtctatgatacaatatcgtttgagatatctggttgccaagatgaagcacaaaaccactcacaatataaattaatacataaatgttaatatttggggacaaaataatcattttttcaattaatatttgttgagcatttacaagccaggcactgttgtgagttctaaagatcagcagtgaactagagaaacactgcctgtctgctggacttcccactgagtgcctgcatctctttgctgacagctctctttagctgccagagccccctcttcccaagggcgcagttggccaaagagtattggggaattatcccccggaagcagtcctcaaacaatgactgatgggacttggtataaatactccagctccctccccccttaaatgggatcaccttcaagtacatgttttgtctcatttccttcaagggaaacacaaactaagacactccatcctcatgaaactcacaatccctggatgaagagaccaaaactagcataccagcaaatatatctattagtacaatgacagatggtgataaatgctatggagaaatataaacagcatatgagacaggagtgccagcaggagagattgctatttgtatgggctactcaagaaagacttcatgttgtggtaatatttgaggagactctcagtgcactcaaaacaagtctctctctctcactctcaatttctattttgaaataacctagagtggtggctaagcactaagagccttccctagtgcctgggcatcagagagggaatctggtccaagctggtagcgctgcattacctcattcttttctggtcttggtcattgaccatccttttcataaccacagactcagctccatctttgccacccttgagtggaccgaggaggaactctctaaggctcaggcccatctacttagacacttctgcttcaataggttctggctgcttgggaataccagcagcaactttctggaacaccttctgggaaaggagccacagagcttctctcttcaggacatcaggcttgtctgcggtttctcctagacttgaggacaaggaagcctcggtatgagaatgtcctcaggaccaagcagaagaatgtaccttttcattcttctttctctgccatccctttcttccctaaagcaaaaggtcaaatgctttgttgctgcttgttttggaaaagagtaagagggactggtgaaggataaaggaggaaatatgtcaactctcaaatatgacaggattgaacacatgatttattttatcaccttagaatttagttctagaagtctccttattttttttagatttgatggtataatttctatggcagtgttttgaattcaaattgcaactttacatgacagacttagggtacagaattacaaatctggacataatttcctggcgattgaatcaagtatcaacatatctgatgaccaccatgacgggagttggacaagtcaccagcactcagaaaatcaaaggtcagcttgactcaatgttcactcctttagaaacgtagggagttgactgcttcttgcacgcaccaccgcacctgttccacaaaagcggccttgtgagattggcaagagaagccaagatatccaagctatttcccacctaataagtacctgggagctcaagcttcctctgtggctctgatggcactctacctgggagaagatatagcaaggagaacctgacagatcatccatatggtgccatctgtggtaagagattagtcactgcatacttctcattagaaaaaatataaagaaagccagggaatcccatgataagtcccagccaggcaaagcagaagaccttctgctcttcccatctgattcaccattacctacaaatacaagatcaaagataaggaacgtaagatctgacttttaaacttaatcaacaaaaatatctgcagtatggtatagtagaaccatggaacttcaggataaatatggtagattgaacatattcaactaactgaactttcttgaaaccacaccaaaactccattaaaagagacttttaagggcataatctggcaagggtgagggataatagataagaaatgaccattacataatttaggtatctggctatatgtttacagcagttgacagatctgagaacctgatcattgatcatccgtgtgaaaacctggaaccaatccaagttattttataaaaaaccttaaaagtctcagaaattgatgatgtttgtttcctctggaagtgggattcaagataaggcataaaacaaagaggagagttgacagctacttaaggaacaatcagaactcccaccttagagggactatttatgtatttattctttggagtcaggaaaacagagagtgtgaggatgacacaaagcccagatgaaagcaggctacaggccgggcgcggcggctcccgcctgcgatgccaacactttgggaggcttaaacaggcggatcacctgaagtcaggtgttagagaccagcctggtgaaaccctgtctctacgaaaaatacaaaaattagccgggcgtggtggcatgtgcctatagtccctgctactcaggaggctgaggcaggggaatcacttgaacccaggaggcagaggttgcagtgaggcaagataacaccactgcactccagcctgtgtgacagagcaagactctgtctcaagaagagagaaaaagaaagaagaaagagagacaaagaaagaaagaaagaaagagaagaaagaaagaaagaaagagagaaagagtaccattttgaaagcaagaagataaagtaattgtaagcatatgaaaaaatgctgagacctcctgcattcttctccaatcttgctctagaatgctggcatccaggccttcactctatcctggcaagagattagatagaagttctcccaagaatctaatctgcctaagaggaaagacctaaagatatcaatattagggattactccgaaagatacaaaggaagatccctctgcagtgatgccttaccaactctcatacttttcaagcacagcaaacacatccagaaatccaatcagctttttagtctgccaacttgaaatatgaacagataattaagtgttactagacatatgaggaaaacttccttaaaaacaggaaaaagcagggaaaaaagtaactttgtaggaaataatgactatatagtgagaattcgttaagtatacacatatcattaatgtccatagaaaaataaccaaatatattatgtccatgaaaaagaacagaatgctaattttttcaataaatgtcagagaacataaactggctgttaaacacaaaaacaaagcactccaaaaaaaggtggaaatacagttgaggaaatcttttagagagtaaagcaaaaaaattagatggaagattggagagaaaatgtataaaagtttaaaatccggtcaggcatgttggctcaggcctgtaatcccagcaatttgggaggctgaggtgggtggatcacctgaggtcgggagtttgagaccagcttgaccaacacagagaaaccccatctctactaaaaatacaaaattagccgggtggggtatggtggtgcatgcctgtaatcccagctacttgggaggctgaggcaggaggatcgcttgatcacctccacctggaggtggaggttgtggtaagccgagatcgcaccattgcactccagcctgggcaacaagagcgaaactcagtctcaaaacaaagtttaaaatctggacaaataatattccagaatgaaaaaacagaggaaattatcataataattcatgtttttttccaaacaagacaacagctttcagactgaaaggtttcaaagagtgcccagcataggggatagataaacctatgccaaagcacatcattgtgaaattttaagaaacggggaccaaaagtgctagaaattgccagagggacaaaaaccaaaacaaaacaggccacacacctgtttttaggatggtgaatcacaaagtcttcaaacctcttaacagagctaaaagacagtggagcaaatttttcccacaaaaatcttttaaaaaaaaatccaacccaaaatactgtgtccagcaaaactagcaatcaagtgtgcaggtgtaaagaagtcatttttagacatgcaagcctcaagaaacttaacattcatgaatgctttctctggaagctactgaccaatgtgctctaactaaaattaaaaaattaacaattaaaggggaagacatggcataaataaaagagatttagcacagaatagaagtgaagaaaacagaaattaatcaatctagattggagcagataaaaggctccagaaaagacttcaagagaatctaaccaagagaacacttgttatatttgtacatattgcaaaaacatttagctaaccgggggatactttggagttggactggagatatatgcaaaaaattaagcaaatgataaaacaagataattaactatagggaaaattttaaaaaattgtgcatgaagataaaaataattgttaggttactgtatgactcaaccctgaacacactgtgtagtcatgataacataaagactgaacactgtaactaaattatagtattactgtctctgaaagaatgagagtaatgtatacatgtgctacaggagtagagataagaaagagcaatattctcatctttcatggtggtaagtcaaaaatagcaatacatgcrtattattttgagatacagaagtaaataccaaaagcttctgctaaaagatttgaaggtgtttgcttctaagtaaggagacatgaggaagcgtgtttctattaaccatcctagtaaaagtggtgctggatggcagccatagaataattctaaatttagcagataacccttggcttctcgaccatgttgtttttcctnttcttgtctcctgaagtggtatctgcacatcaagagcaaatcacacaggtggcttcttagctccccttggtgactccacacactggagacattcagcccctccctactccttccttctaaacttagcccatcggcaatcaacgctgactgatttttcttcatcttcaaccagacttgggcagcagaatggtagaaaggaaactggagcagagctggatcaaaatgaattgcttctttcagaagagtcctgaaatttacatccccaagaaggttcctatctggccaacatgaaattagtgtgtccactaactgattgcatgggctgcaactccaaactctttcgtgttatatgcactaagaactacactaaatgaatagaaacctgaactgatcagcaacaggaatcaaggatgaattttatgtgccatgtttttaagttcttgaaaggcaatgctctgatggacacatccttggttatttccaacccttgacacatagagatgcaccctcagtaaaaacgtgttcattggtaaccaccagtaaggaataccctagctccagggtgcgttcaaaacattttgctgttgctggagaaatatgaactgaaaacatcttttcccatgtacctgaaacaagagagtcaacccagaatgtctccttaaaagtaggtttttagaagctaatagataaagggatccgaacctgagaagatgagagaaccactccacaatgctcttctagaccattcttcctttctgttctccagggctcccttttctggatacagatcttcctcattcttaattgttgcaaggccaatgggatggccctgagtgtagaggaggcatcagagtagcccatagcccagtaaatactcaagggcctttgtatgcatttgcaagcatgatggcatccagctgagtgtcactggatacacttcagggttttaaagcatgattttaaagcatccctggaaggtatcattacgtcatagcagaattttgaattgatgtctttctgacatctttaggagcattgttttttccattccttgagggatttacatgttttgtacttcagctggaagtggtacaaacactatgtttgtttatgaagacttttaaatgccattatatgagtgacatgtccaatggcatactgatttattattaacaaaatatataaggtaatttatttttagcctttgtcaactaactttatccttctgaactcaatttctctttctggtgattttatttcagaaaacagtagcattgcttttactgtttcataatctcactcaaatgtgggacattttgttttaatttagctagaaataattcctaatatattagcctgattgaattcatagacttttagagctagaggagactgaggcatccatatagtttactcatcctataattaaggaatttgtccctgaccagtgaccactggcaagaatggaagaaaactggatttcttgtgctgttactaagttttttagaaaagcaatgtgttttgttatcttaattctcaaggtttttcattcttctatgtgcctcagtggaccagagtggatcagaaaaaaaaattgtaaatttttcacaaacagtgcaagtttgatagaaaagggctaatgcattttagtcaatggcgacaataatattccagctgaaggttatatggaagggatatcctcagagtttgttctctgccccaagtctttactagtcagaactattttttaggctaattcattatgacaaaacatctgtatttttgcaaatactcttgaccccttagctgacacctacaagattacaaactgactgctctttatctttacattttattggctttccttgactttgacatatctctgcctaatcatttaatgtatcaaaaatcttcagcatttgctccttttgttagcaaggcaaagctttgggattgaaaagttgatccctggttcacagttacagttccctgattgcacagttattttattgctatgatatgcatgtgtttacaagaagctcactggtagtctacaatcatattctacccaaactacccttcaaactcaatctttgttcttattcaagtttaggtaaattccttcaccagggatttttaaattctttaatataattataaattatcctcacactcactcaccaaactattgttgtttgttgattttaatgtatactaaaaattctgttaaaatattttattccaatgagataataaaggtagagaaaataaccaaaaaggttatggtttaattgacctgtagggtattaactagtctgtattcaatttagtaatatctgtctagtttgtgtttttggtttttggtttatttgcttggtttttgttgacaaaaatatacaaatacatacatacaaacacatacacatacaaacacatacatatatttgtgtatatatacttatatgtatatatgtgtgtatatgtgtgtgtgtatatatatatatatatatatatatatatatataatatatataaaatcagtgtctcatagcctcctttgacctggctttgacaacttccggattaaataaaacttggatacacattctttgcatgttccaaattataccttgaccttgattataatatcttcatttgagtatgacaaatatatgaagtgtacaccttcacttttctatcctgtacccaaggcagacatcaaaattaatcacaggcatggttcagaatctttctcaacacaagcacccagaagacattaacaataaatggaatttggagctaaagttaaaatccatttgtcatttctgccctattggcctatgttgttgttttttcttgcttttaaaagttgctgatcaaaccaaaggatgtttattcttgcatttcattcttgttcttctttcatgttcaataaaccattgtattagattgcacagttattttattgctatgatatgcatgtgtatacaagaagcatacacttgccagttttccataccctgtgactcccccagtatgcacactcatccagcagttacattactttcctttcctggcccctgaagatacttgcatttattgcctgtcttttaaggaattgttatagttagagattgggttgtgtgaaattgccttttgcataggtgraaaacagcaaatattacaaatttcatatcatttgacctaatcagaacataagaatcaaacaaaatgctgctgtctttggtgatcttccagtttcaaaacaatttattttctattttgaatcccaataatcatccaaaagaagtagtgatttagcacccactgtgcacaaagcatctagtagacaccagggacgacaaagatacatgcacattcagcttttaaaggtgctcgtgcctgggtttcaaggggtgaatggccttattttctattagacggtgagctctttgaaggcagaggctgtgttttactgtgctttatttttctgtgcatttatcgtatggtagatgttcaataaacctttgtgaaattagtgaaaggaaaagagataggggagaaggaaaggaaatagagagaaagggagaaatagagattctggtgtgaaaagcacgtgcccaggcccagctcagcggctcacgcctgtaacctcaggactttgggaggctgtggtgggaggatcgcttgagtacaggtgttcaagaccagcctggggaacataggaagacccctgtctctacacagagaaaaaaaattacctgggcatggtggtgcatgcctatggtcccagctactcgggaggctgaggcaggaggattgcccgagcccaggaggaaggtttttcttttgcgaaacagctcctctcatcaaaagagccaaaacaaactttccttcttattttttattcttggacaatagtaaaagcaatttagctattgagtttccagaacttgggaaaagcagtcatcggtcaccttgagaaatgtattgaatgtgaaaagatttttactgtggtaaataatcagtgctagctttgccatttacaaatggcacatctcttagcaatcaagaataaataatgtttaaatcagtaaaaattagaattgttaaatgttgtcattttactgataggtttggcagtaggggagaagagaaggaaaacagatacttttatatamcattggtgaaagtcaattgctaggactttaacagaaagaaaattggttatgtgtattaaaatcctcaaaagtatgcgaagtctttgaatcagaaattctatttctgggaattcatcctgaagaaataattaagtatttatacaaagatgtaaccatcagagcagtcaatgcaatgtcatttatactagtgaaaaaattagaaacaactttaatgatcaatgataatagaatattatttcatattatactgctatattttatgatataaaaatatagatagttgcatattttatgctatagttaaatatccgcatagaatttatttttacattaaaaatgttcataatatattgctcagttaatacaaaggttactaaattatatatataattatatgtatgtgtgtatatgcatgattacagcttcataaaagaattatacacacacacgggtatttttctgggaggatacacaccaatgttttagcagtagttatctctgaaagaaaagttagggatgttcaaaacaagttttattttttctctctgtttatctcatttcccaatttttctttaatgaacatattccacttttatagtaataaaaactgtttcaacaagaaaaaaaaaaagaaatgctaccctccgacatttgttggcaacatatttactacccgcaaatatgttgtttgaagctttgattgtcaagattgaagaaacaaattgtagtgatagaccaaaatacttaagatgatcctatgtatctatgaagattatgacaaaaaattgtctcaatacgtgtatcaaaacatccagttgtacaccttaaatatgtagttttttaaattatacctcaataaagttgacaaaagaattttgtcaatatttagtattagtcaactcagaaaggttacaacatagaaaaatttctaaatagaatctgagtaaactaaattacctgtgtcatatttctgccatctgaagtaaaataattcttaatatgagatttaaagatcttttttcatgagcattcaaatttttattttcaggaaagactcatttgtgggcatctttattttctgtttcagagaaaaatatcattatttgaaaacacctttttttttttgagacagagtctcgctctgtcacccaggctggagtgtagtggtgcgatctcagctcactgcaaactccacctcctgggttcaaacaattctcctgcctcagcctcccgagtagctgggactgcaggcacccgccaccacacccggctaatttttctgtatttttagtagagacgaggtttcaccgtgttagccaggatggtctcgatctcctgaccttgtgatctgcccaccttggcctcccaaagtgctgggattacaggcgtgagccaccgcgcccagccccaaaaacactttaacattattttaaataataaaaccacttgtaaattatttatttatttatttatttatttatttatttttattttgagaaggagtctcgctctgtcgcccaggctggagtgcagtggcgccatctcggctcaatgcaacctccacctcctgggtgcaagcgattctcctgcctcagcctcctgagtagctggattacaggcgcccaccatgcccgggttaatttttgtgttttgggtagagaggagacttcgccatattggccaggctgatctcgagctcctgacctcaagtgatccacccgcctcagcctcccaaagtgctgggattacaggccacttgtacataattttgattataaagtaacatacattaataagaaaaaaaattgaaaaattaccccaaattctattacacagagataagcactgataacattttagtgccgatccataaagttaataccagtcttatattggaaaacaggaggttggtgtttatttaaatcctctgaaaatttggtggggctcatgtaactacatgttttctctattgtctgtgacatttggaaataattgtagtgaaacagaataatcctacactcttatttatccatactaaaatgtcttctaccttggacactacaagatatttytggaaaaaaaaaaaaaaagaggcgacttgacacccataaaagaatgcattcacatcctttctaacttcatttcctccaggacaaatatcagtggatgggttcatgcgctatctgagtggagaagaaaacggagtcgtttcrcctgagaaactggatttgaatgaagacatgtctcagcccctttctcactatttcattaattcctcgcacaacacctacctcacaggtatgaattttctagttctttgttastttagccagtctcaccaaatttcaccaacctctactttctgytgttcggaagctgaagtgtgttttcttccatttcctgcgaagtgcctctgagaactctggggttccaccactaaagcctcccgcctcccataagcagtcatgtccacatgtgtatgaagcaatagcatcatttctccacagcctaagtttttaagtcttctaaaatgcaaccacggctgacattttcagatcaatgggatttttgtgtaactgaactcattcttcagtgtacttgaagccatgtccagtcctacccggttctctgggctgtgttcatctacatgacagctccgaagttcttaagtggtggctcatgcttgtaatcccagcactttgggacggcgaggcgggcggatcacctgaggtcaggagttcgagaccagcctgttcaatatggcgaaacccctgtctctactaaaaatacaaaaaaaaaaaaaaaaatcagccaggcgtggtggtgcgtgcctgtaaacccagctacttgggaggctgaggcaggagaatcacctgaacccaagaggtggaggttacagtgagccgagatcacaccactgcaccccaacctgggtgacaagaatgaaactttgtctcaaaagaaaaaaaaaagaattaagtaattgctttttgttcaaggtaggacagggctttagacaaaaacaaattgacctgtgaatgacaacttatactttattgtaaatattataataaagtaggataaaacatcaatgtgtttctaatctgatcttaaattaagccttgacctatttggcagtctggtgaagtgtatgcacccttctcagaatgctaaatgcataaattaagtacctagaattaaagaggaaataaatttcattgaaatatttttataaaatgttatgatatataaccttgtgtatctcagtattaacacaatttaaataagtataagtaaaatgttgtgataatttgcaacaattggaatataatacacagatcttgctagtgacttgtaaactacatacttaactgaagagaatgttaaattttgtgtagaggttaaaattaaaactgtaaccattctttctcatccaagttcaaggaggttcayggaatatcactttaacagtctagatctttgacatgataaaattcaaagaagtataatttttaaaatctgagcacattatagaatcttacatttatcctatatttaggaccacaaaactcaaaaatacttaaatatatgtccggttgaattttgggtattgtgtgtgattttgtttaagtggaagtcacaatataragtagattttttacgaataatcttttgagtccaaaataccttccaactgatatatttatattcattacattctattttatttgtcatataataaatgagtcagtaataccaaaatgattgaatgacaagactgattggatatacattttattttttcaccttctttcagagtatattaatttttccctttctgactatcactagggttttcagattttatgtatgttcattcaatcgcggctgccattctccttttgagagaccaaattgtctcaactttggttagtaggagacatttttaggctatcatctgtgtcctcttgacatgacctattaatctttgaaagtgttctggcacatagagatcttccagactcaccttattcctttctgctycagagatggaaacagactattctccagtgagccctggttctttttgatgggaaagaaaaagtatgagtaacagcaatttggaccctgaacattgcctggactgtttcagtgaacaaaggaagaaaagataatttttttttgtctttttaaggcacgagttcacataaatatttctacttctacctaccaatttaaattattattattattattatwcttgagacagggcctcactctgttgcccaggctggagcacagtggcatgatgatagctcactgtagtcccgatctcctgggctcaagcaatcctcccacctcagcctcctgagtagctgaaactacaggcacgtgccaccacacctggctaattttttatttcttgtaaagacaaggtctcactatgttgcccaggctggactcagactcctgagctcaagcaatccttctgcctcagcctcccaaagtcctgggattaacgacatgagccactgtgcctgtccccaatttaaattatttttttaaattatttttccataagttataagggtataggtggtatttggttacatgagtaagttctttagtggagatttgtaagatgagatcctggtgcacccatcacccgagcagtatacactgaaccatattggttgtcttttatccctcaccccctgccccaagtccccaaagtctattatatcattcttatgcctttgcgtcctcatagcttagctcccacatatcagagagaacatacgatgtttggttttccattcctgagttacttcacttagaaaaatcgtctctaatctcatccaagtcattggaaatgctgttaattcattcctttttgtggatgagtagtgttctatcatgtatacataccacagtttctatatcyactcattgactgatgggcatttcagttggttccacgattttgctattgtgaattgtgctgctgtaaacatgcgtgtgcaagtatctttttcaaatagtgacttattttcctctgggtagatacccattagtgggacggctggatcaaatggtagttctacttttagttctttaaggaatctccacactgttttccatagtggctgtactagtttacattcccaccagcagtgtagaagtgttccctgattgctgcatccatgccaacttctactgttttttgattcttggattatggccattgttgcaagagtraggtggtatcgcattgtggttttgatttgcatttccctgatcaytagtgatgttgagcattttttcatatgtgtgttggtcatttgtacatcttcttttgagagttgtctattcatgtccttagcccactttttgatggaattgattgttttctccttgctgatttgtttgagttcattgtagattctggatattagtcctttgtcagatgtatagattgtgaatattttctcccactctgtgggttgtctgtttattctgctgactgttccttttgctgtgcaaaagctctttagtttaattaggtcccagccatgtatctttgtttttatgcaattgcttttacccaaaagcaatttttggtcatgaaatccttgcctaagccaatgtctagaagggtttttctaatgttatcttctagaatttttatagtttcaggtcttagatttaggtccttaatccatcttgagttgatttttgtataaggtgagagatgaggatccagtttcattttcctacatgtggctagccaattaccccagcacactttgttgaaaagggtgtttttcccccactttatgtttttgtttgctttgtcraagatcagttggctrtaagtatttgggtttatttctgggttctctattctgtcccattgttctgwgtgcctatttttatgccagtaccayactgttttggtgactatgcccttagagtatagtttgaaatcaggtagtgtgatgcttccagatttgttctttttgcttagtcttgctttggctatgcgggctattttttggttccrtatgaattttagaattgttttttctaactctgtgaagaatgatggtggtattttgatggagattgcattgaatttgtagattgcttttggcagtgtggccattctcacaatattgattctacccatccatgagcatgggatgtgttttcatttgtttgtcatctatgatttatttcagcagtgttttgtagttttccttgtagaagccttttgactccttttttaggtatattcctcagtatttttttttttttgcagctattgtaaaagggttgagttcttgatttgattatctgcttggtcactgttggtgtataaaagagctactgatttgaatatattaatcttgtatctgaaaactttgctgaattctcttatctgttctaggagctttctagaggcgtccttaggattttcaaggtaaacaatcatatcgtcagcagtcagggacagtttgacttcctcttcacttatttggatgccctttatttctttctcttgtctgattgctctggccaagacttccagtactatgatgaagaagggtggtgagagtgggcatccttgttttgttcccgttctcaggaagaatgctttcagcttttccccatycagtattaagttggctgtgggtttgtcataggtggcttttaattcattaaggtgtgtcccttgtatgccaattttgctgagctgtgctctttttagtaatcttgatacctaacagattatacatactaactcattttctttactgaaaaccttataatagtattaagaaaattttcaatattaatacaaataataaaactacaaaatgtagttcaaatttgtgtatgcagtttttaaattacatttcactaaaaatttacaatcaaattaatttcttcttctaaattaatttcttctgaagtcattcatatgcccttcctatgtataacttggtaaacacagatgtggtaaaaaatttggctccattgtgtcaggttagtttaaatttgagggtgttggcatattaacagctaatcagactaaaaagatgatgtgatactttcagctattaggaaagaaaagggtttaccttttttatgaagaaagaactctaatagctgtctccaaatttctgtacaatggttttgtatcaacaccatctgattcatatacctcgtttctggtcaattatctcttcaattatttaatttctagtactgttagaatccacatattttcaaatactcagtttttaaaactatattaactatgttaaattgtattctcatctaaggggttttgtttttgctgttgttttttttttttatcttgctcccttttctgagctctgtattattataccaaggtttgcattagataaatctgtaaccactcaactgggttcttcttgcctgctgcctagaaaaagccaatacactgagaacagcaggtgttacarcagagaaagtttacttattgcaaggcagtggagcagaaggatgggacatatttctcaaatcagtctctctgataatccagaagctaggatttttcaaggatagttaggcagcagggggttgggaagtggttagggaatggggaatgctgattggtgggtcaggaaagaaatgacatgggagtcaaagctgtcttcttggactgagacagtccctgggagaagttaagtctgtttcttggcatgggtcacaggatgggtggcagtagttggtccatgagaattcaaggcctgaaaaataccttaaacaccagtcttaggttttataatagtgatgttatatataggagcaattagggagkttacgaatcttgtgacttcagtcctaaaccataattccaaccttgtggttaatttgttagtcttacaaaagttgttttggtccccaggaaaggaggggattagttttggaaagggactgttatcatctttgttttaaaatcaaactatatactaatttcctcccatagttatcttggcctgtactcaggaatgagcaaggacagttartttgtgaggttagaagcaagatggagtcagctatgtcagatttctctcactgtcatgatttttgcaaaggcagtcaaatctacattctcacagtattaccttgccccagtaccagccatttattttcctgcaaggaaattaaggagaattccatataattagaaacaaaactatataaaaatataaatacaggctcttgaagttttgcctgaaatgctgttttgactcatgggtcaaaatttggttttacttcacatattattggtagaatcattgttttaattacagatgaaactaatgtagaagtcctgtttctcagaagcctttggataaactcaaatttctatgatataaacattcaagctaccccaaatcaattaagaatgttataaaataaaaatayaaccaatgcctaatccaattgaatcctattaaatttttaaattaatatctagaaaataatttagtttttatactttacagccattttcagaacaagtaaaaactgtatttatagaaacattatttcatataaagagtggtggaaaaaagaaagttttcctatttaaatgagtttaagaaatgctaggtgcaaagraaggttagcacctaccgtaatgtgttttgaatataaaataaaaggatcagagtctcacagtcatcaactcttcatcctccttgtcaccacccaacttattttcttggagcattttaaggactaatattcctgaaaaatgctatctaaatccaaataggaagaatttcaatattcaggatattttctttgagcatccaaagggactgtaaaaattaaatatacagaatgaaaccaatcagtttagcaatgcattattattatgtctatttctctgctcattattgcccctttgttgaatatcaagatgcccagaagtaaaaataaattgtatcattgagagaaatagatgcactgaatgagtggtttttaattatcatggtcactttttggatttggggtgattttggcagtaccctcagtactgattatgttttaaattattgcttttccttgaggaatctgccctatgactcaagaaaaagaaatcttcctaggaagaaacactatgcagtaaatacaacctatacttgtgcacctcttcataaaccttcccatactcccaactatttgggagataatggcttcagaaacactggaaaggcaaagcaatctatctccggacagctaatatcttcattcagataagaaagaaaccattagatttgagggttttgctatccccaataatctgatgaattaaattatctgactgaatgtttctgataattattcaactcctctcctcatgtataagttcttggctgaagaaaagttctaaaaatgatttaagacctagctgtacccttsccagtcatctgctacaaacccagactttgagcacccctcctctctttcccatctctcccactcatttagcccttagcatatgcaacgttttatcatttgtttttgctttagagcacacacagacctaaaaagtcaggtggtagaatgaaaagaagatgagcttaggaaataaacagggcccagtttaaaatggcctttaagtaaatgacatacttaactcatttgagccttggtttgtttgtaaaatgtagataaattaaaacagccagggttcttgtggctgaaagtaataggatgctattatttaatggcttaaagatttaagcagtgtattccctcacacagcaaggcacccaggagcagagtggttgaggattggttaaatcaggaattcattaatatcatggaagacccaggtggtttctgtctttttggtctccttatggtttcaagatgactgtgtaccctaagcattacctccctgtgaaccaagatccacaaaggacatggcgaaagttcttgtgacccttctaagagtgaagaaaatgttcctagaggttccctgacagccccccacctccatcccctcaatctggtaggcattctttatgccatgttatatatagctcagagtcacaccacacatcaatgcccacagtaattgctaacatgggccacagaactaccatgactgactgagaagaatcaagatttaccccaaggctgcagagaagaccctgaagcatatcagaacctagataaaatattttactggcaaggaaaaagagaaagaagagacagaaagggcaaccagaagtgtaagaatgggaagaaatttatgtttgcctccctacctggatggtaagggtaaaggaatatgtctcatatcactttcatatccccagtaaccagtattttgcctcccacagaaaatgttttggggaatatgtacaaacacataatggtgaagctcctataatcagtaaagtatatacttgaagtcattttcttaagagtggaaatgactttaggctcttacatagacactttgtctcctaagccatctcatggcaactgctctgtgttcaagaragcaccatggtttcactggggcagcaggcagataccatgtaattgagaaatcagatcaaacagatgcatctagagagggtcaagacaaataatacattctctgcattttggacagtttcctcaggtgtagccatgagattatatgccctgaatggctgtcatagcattgaaagcaaggaaatgtagtcctcatctccatctgttgaaggggacaataactattgaagaaggccactgaattaacaaatatatcacattctggaamcttcttaccctggaggttgaagggaagacaataatgataaatatgaaaacaggcaattaatcatcagccactgcaagatgaaaaattcttcagaagtttgtgttaatggaggaattgctatttttgatcttctggttttttctatcccyrgatgccttgggtaatctgagacaaagctcaagggaatgtaaccagccacccaaaatgaatgcastcaagtgagaagttgcagagctgtgacttggggcagtattatgaattactctgagaaggagcttcagctcccaagttcaatcatggacttggaatgtattccagaggatgttcagagccagggagagatgatgtcaaatactagtttcagaaataccaaaggttgaatgactcatgacctatcactaatctcaaccttcagcgatccgctagccccagaagctatatttattcaatatattcaaatggaaatataatgggtagatgagatgtaataatgagttaagaattttagggaacaaaaataaatcagctttgaggcttaaggcagaaaagagagtaacagagaatatgaatacatgtgtttgaaaaatatttccataaatgaagtaaaacatacagggaacctaatatgcattccaaggaataggataattatggataaatgtgggttttctcaaagtatgctttctttgggagggttccatttctaataaaaagtattcattttaagaatgaacaatgagtttaccttggagggattctgttggtcttaggtggacaataaactctttctcttttttattcttcagtttttttccccacattcctttgcatctcacaaacccaacctcatgccttaccatggttttcaaaacattaactgatcaacattcaaaaaatacatcaaattccttctcattgttctttgattaaaaatattcacaagaaaatctaaggaaatgtttctcaaaactttgaacctcttattacagaatgctctagtgtctgttaggtatttatctactttgatacactgttaaatctgattaaattcttcacactatccttactaaagttagtaacattcaactagtattaatgaaattgattcagaaattgtacaatatgtaattgtgttgatatagtcagtgatgtgcgtaaacaattctctaaacagtacacacaaaaatctgctctattctttaataccggtgcaattttctgcaggagcaagcattttaaattaaataacctgataatatttgaattattcacttcctttagctatagtagctcctctttaagtttagaaataacatataaatgtttgtcttttcccctttactcccactgtccccttgtccctaatgcagaaaagacctttgtaaatctttgccatgacaatgtactttgaaaaggcaattaggaatggcaatttgattatccagcatcaggaagtttctagatcattttgtcagcatttctgcttttccaaatgcatctttgtgttgaaaacatcccatttttccagtagagaaaagttattatgcagacccacttaatcagcctttcagtgcatttaccagggctctatagaactcaaaaatgtcatccttttgttatgctggtggttgagtattatgacatgcatataaaaataaaattaagctagtaggcttaatcccattttctttgtcctgtgtgtctccacggggcacatcttgtccatgtcaaagtcattttaacagtttgcatcaatatgccatcttttaactggctatttaaaaaaatgatggtaggccaaatgtggtggtttatacctgtaatctcagcacttcctgaggcagaggcaggaggatcggttgagcccaggagtttgagaccaacctgggcaacataaggagactctgtctctaaacaaaatacaaaaattagttgagcatgctcgtgcacatctgtggtcccagttacttaggaggcttaggaaggaggatgacttgagcctagggggttgaagcttcagtgagctatgatcacaccactgcactctagcctcggtgacagagtgagatcccatttcaaagaaaaacttttaaaaaaatgattggggcttatagaatataaatcaaagaaaatatttaatagggaaaaccaaagacttcaatttgtgtgttgctaatgggcctgttgcaagagctatttattattactctttcaaaaatagtttatcctgaaattagtgacttccactgacttaagtaaaataggagcttttggcttccatgccctgtgtattataatcaaggccctcagacctttcaggtgccttcattataacaattctcatcactttagtagggtatgttagttctattcacagaagtcccattctggtaaagtttatctttttcttccattgcttgtgtttttggtgttgtatctacaaaaccattgctgaatcaaggtcacaaaaatttactgctgtgttttcttctaaaggttttgtagttttagctcttatatttgtacacttgatccaatttgagtttagttctctatggtatgaggtaaggatccaagttcttctttttttatttttatgtggctatccagttgtcccaacactattgaaaagatggttctttctgcacttaattgtcttggcaattgttgaaagccagttgaccataaattgagggtttattttggaaatctcaattctatttccattaatctatatgtctgtctttatgccagtaccacatggtcttgattactgtagctttgttttaagttttgagaagtgtgattcctccatctttgttcttatttttcaagattgcttttggctgtttcaggttccttaacatttctatatgaactttggatcagtttgccaattttttccaaaaaatcctggtgagattttgataagaattgaatctttaggccaatggtggggagtagtgtcatcttagcaataccaagtcttctgctccatgaacatgagatgtatttccatttatttgggtcttctttagtttctttcaacaacattttgtaattattagagaataagttttgcgatcctttgtttaatttaaatttatttatttatttatttatttttgagacagagtctcactctgttgcccaggctggagtgcaatggcaccatctcggctcactgcaagctccgcctcccgggttcacaccattctcctgcctcagcctcctgagtagctgggactacaggcgcctgccaccacacccggctaattttttgtgtttttagcagagatggggtttcaccatgttagccaggatggtctcgatctcctgacctcgtgatccgctcgcctcagcctcccaaaatgctgggattataggcgtgagccactgtgcctggccttaaatttatttttttttaaagagcacttttaaaaacagaatgtttagcttttctcagcatttgtgcctttggcaaacatgtcagaggcagctgacttatataatagaacagtctcccaacaataaattctcatcaggaggcagtcagaattaaaagagtgagttttgatgctataatcctggatcttctacttcctagcattggaaacttgggcaaccgaactctgtgccattttattatgtgaaatgggtatttttttattaaatagttatgccacagagattttttgtgaagattaaatgtttagtatatatacagtccaaaaacctgtaattggcacatggtaaatagttaataaacatgcatcgttgttattgttacaatgccctatcttttcccaaagcactactacagattctatttgaaattgagccattaccttctggtatgttgaggcagaagaaaggcaaagaataactgstgcagctcttagactctttgttttcctgttattgaggagcctttctaagaaagcaccacggtcatccttgcttcatgggaatctggggtttgttttgttggtgttttatagctggccaactggctggaaactcctctgttgagatgtatcgccaagtgctcctgtctggttgtcgctgtgtggagctggactgctggaagggacggactgcagaagaggaacctgtcatcacccatggcttcaccatgacaactgaaatatctttcaaggtagagyatatgaatnttactaagagrggcagctggagacacctgattccttttggttaaagcctcctaaggtagaaagtcccagtggtcacaattaagtccaaaggctgttaatcatctttgyaatttcagaggctaaaatttggctgtttattcatgaataattggcatcaggtgaattaattcatgctaaccaaattctaaggaaactgtctcgtgaaaggaaatatcaaggtatttgtcttgtcctctttagcactcttactcctaatttcttgcattttatttttgtgaaatatccataaagaatacagacaacttatttctatgctttaactaatggctataaagtatgcatccatgtaactaccatctaaatcgagaaatagaaacttggggagtacctgaaacacttccatgtatccattcccatcagaatgtcccrtttaccctcagaggtgactaccatcctgactattacagtggtccctactttgcgcttctttagagcacaaagtacaaatttatatgcagccctaaatgatgtagcttcaccaatttttttcacttgtaaattgattcacactatagtatacattattttatgacttgcttttttcactccacattgtttagaaggttcattaatattgtttcagataactctagatttgttggctttctttatcatgatgatagtattaattattactgttaattattatrtaagattccattctgtgatgctatcttttggaatgttgacgtctatcagtcaaagacccctaggaacatacctatggtcaagttgggtttgtttgctcatacaacaaaggagaacacatgttgtagggagctggagtgtctcagtaaaagtttattagagaggacttacaggacttgggcttatagtaggtgatttgggggacggttcaaaggagaagggttttgcagtggattgggtgctgtcaggaggcacaaacaatcctatgagagggtatcttagtaaatcctatctaggaagcaggactaaagctgttactgataaagatgcatcagccattcttgttagtgagaaatgaggtgcatttggtctctctctttttccacccttagctctattttgcaccacaaggggccacacattcatgtgtatggacacccaagcccaaatatctaaagtctgtccacatgtcctgcaaagagccttccccagggggtaggggccattggagtaggggaaatctggggtcctaggtacttggagagtgactggagaaagaagttgtgggcttcagggaacatgttctctccgctgactccggctttctcacccctttaaatgggaatcagaagagaagggccagaggacaacctctcgcactaggtcccaaggcataagccctgttgcctgggatacctgggtctcagggaagtgtcactaactcttatctgaagcaaccaaggaaacagagtccaagtaagtaattaaggtgagtggagacaaggccattgaacatgggagatcagagtactgagaagcaagaatatgggatgaattcaatgttaatatcaccaaggttagtgacgaagctttggatgaagaaactgtgtgccacttgccaactcttttctgaataagggtggctcagtagatggcagaagtgaagaagaggtaaaaactcttttggctgcctcatgggaactaggatttttttttaaagaagattgaaaggtagtgttttagaagtagcattgagagcaaaaagatcccaaaccccagcttcttaatgtgaaacacttgagatgtgagaaaataaacagtgatcactgaagaaagcagctaacaagaagcaagattttcaagggacagccaagtttctgtttagacaaaaggatttttctgattgaagttgctgtattagacaataataaaaatgttttcagcagtaatatcattcacacctaaaaatatgtgtattatgttgtgcctaaggaatacgacttttcatttatgcaacttagcctacaatgcaataattagagaaaatagcacccttcacttaaattttacaacaaagtttaatacagggttgacattaattctgatcaaaatctttaaaagctgtgtctgttcctgaaattgagcatgattatgacccttgcattttcttaagtggaaaatcaatgtttaattcatttccatagtcccacttcttccctctcagaccttgctatggtcctttgtcaactacctaagatgcagtctaacagttgggctctttaagaaaaagtggagacaggttacccccatgtggaaccagtgcagcttgggctcatctgtctgttgatggatgatgatgctcctggaatggcagacagcacgccctgatggagctgagagctggtggcaccgcacactgcccatccgccaggaagacctgccccactccctccccaggccactgccctgtctaccctccagagacattgtgagaagcaattgttattttcttaataatttaaaatcctccaagttctctgagttccttgtgggagaataaacaccaagcacatcctaaggcatatttattttatgtggagcatttgcttcttggcctctgcctgccattgagtcaacttggagtgactctccttgtgcactcgatcatagaagtggttcttcaattacatctgtaatcccagagtcacgggctgattgaacatctctttctgggctctggaagcatggcttctcaaccacgtccatacacttgccagtgggtgagaggcttaaagactaaaatctaacccagaatgctgctttctctctctgcctgctggagttgggagtggggaggtgaccaggatggctaaagacaggagtgaattcatcatcccagttggtttttccagctattcctcctgctaatgcacatagcaggatagacagttctggctgagatgtggggaggtgaccaggttggctaaagacaggagtgaattcatcatcccagttggtttttccagctattcctcctgctaatgcacatagcaggatagacagttctggctgagatgtgggtaggtgacagtgggtgaggatggatgtggggagtggaaatgccaacctattttgcagactgatatgcagtagcaaggatgctttgcatcaggactgagactaggaaagacaagtaagtctcctagcaagtaaaatttaaggacgtctttgctctcagggctgtgtaagcacagagctggcactagagagtgagtgtctctttaaattttgcacatagtcgcctctcttgcctcatcctagtcccaacactgcttgcatgattatcagcatgcagtctgctttccctgaacccagcgtgtaaagtgactttgtaataagaaagagtaagaagagaaacagggcacaaggccctacataatctgcaatcccattaccttgtttcttactgctttccccctcatccactgggctccaacagtactgaccttgctgttcatgggctgtgccaggctggccccgcctcacagcctttgcacaggctcttccctctgcctggaatggtattctcataggtatctgcctggttcttcccttgcctccttgaagccttcctcaaatgtcaccttctcagtgaggcctcctgggacccatctatttaatactgtcaccagccaccactcccaatccccacactactgacgtaacccctgacacccccactttttagtaatgtattttcctaaggcacttatcatatcaccttccaacaatctgcctaatttgcttaattcctatgttccttgtttattgtcccttctactaacgcataagctccacaaagacagggctctttgttctgttccctgatctgtcccaagttctcttctttgagcagaacctgacatatagtagatgctcaataaatgtttttgaatgaattttcccttcccagagcaagtagatcaaatacagcataacctccattttcagtctttcttgcctctgctcatcagataagtgaatttgtctttctccatcctacacataatatgttggtagaggcagggaaaacattcccccaacatttgccagttttagctgccctgaacatttgggccagatattcacagtataattagactatattctatagctacactgcatagtgcagcagcaaaataaactgattgcagagttcatttttatgtcacccagtgtatctgctttcagtatgtgtgacctggaaagcttctgtgtgatagatcccaaaagcaagagatcctattggcatttgctccctgtttactgtatgggtcaaaataaaaagttacgttctgggaaaggagacattcagctcctttatgaagggctttttgttttgtagtctggctttattatttatcccatatatctgtttcaatgcctcatcaccttagccttcctggtggccatgacatagcaattcaccacttagttttttcattctctcttctcccacccaatatcctttctccttacgcttgacaccacctacccacctccttcccagggtggtttttctccctttaggcagcttccttttaaccagcaattatataagatggaaaactggataatgtaataaaatatatgaggaaaacatattaaattagagtaggttaaatccagcatttctgaaaataaagtgtcattcattccctgagaaaaacaataatttaggatgcagtttcactgctacctaaatgcacatataaaatggatatccaaatacaccctactgttgtctgtcgaggataaaggatttcaaggccagtttgtctcactggagtttagtaattgaaccatatggcttatagattattgaatctagtgttacaagtctctgaaaaacaattttggcttgataaagagcaatggagcattaccgtactttcacatccaatgtccaccaattayagcaagtatgaaagaatgtaacttaaaagctataactggttttctcatcctaactgatcacgcacaccatacaaaatatttcaaaggcacaaaagcatgaaagttctccagtggaacttctgaagttttcagttgctcccaactaaaattattagatgaaatttagtaattttttttgctttaataattggaaaattttcctaagctgctagctaaagttatggtagagatggggagaggtggacagagagaggagggagaaggatgggtgagaaagagagaaaggtgaacacagaaggtaaggatgctactctggagatgactgccaggggtccagtacaagctcttccatttagtcactgcaagaccttggagaagcttccttcccagtgcaagtctcctttgttatcagcaaactggagatgataatagtgcttacctcctagggtggttgtaagtaagcattcaataaccctacttaatacacaaatattgcttaaactatgcatggcatgcagtgcctactctataaatgttagctttggatgttatcattgaaattcataaaagccaaatgttagctttctttctgtaaatataatggttgtgtgttacataggcatggacttattaagccagagtgaaggtggggggctaaattaagtcatctgtaaggctaacatggtagaaggtgtgggcatcctctacgctcaacccatggcatccacttcacctccaggaaggtaccagaagcccaaattgtagtaaactaaacacagcccaggccttggttaggggcccagtaggagcagagaagggaacagcagatgagcttggatgctccactgcaaacatgagtcytaagccaagcacacaagatcagaagtacacaatgtcagaggcaggacaaatggaaaagcaggggaaacaacacaggaagatctaggaaccccagtggcccagctgtagttcagaccacactagcatccccactgtgggaagagagaatgaaacccagggagccaggaagatggggggcatggactccctacaagtctaagaggcccagagaaacactcacattttatcaaccaaaggaagatacgagagagatttgacctggagctaaatacccacttcytaaattagaggaggggaggaggggtcttacccaccttcagatttgactctccttggccgaaataccaatgaggtgagcctacaatccactttcattattaaaggcagctggagaagttctcaaacagacaatgaagacagccatcatcagaaaagttagcaaagatggccaggcgcagtggctcatgcctataatcccagcactttgggaggctgaagcaggcagataacttgaggtcagaagttcgaaaccagcctggtcaacatggcaaaaccccatctctactaaaaatacaaaaaattgtctgggtgtggtggtacatgcctgtagtcccagctgcctgggagctgaggcacaagaatcgcccaaaccaaggaggcagaggttacagtgagccaagatcatgctacagcactccagcctgggcaacagagcaagacttcgtttcaaaaaaaaaaaaagaaaagaaaagttagcaaagactaattacacttttatttacatgtgtatttgcaggacttttgtaatgtttattggaaatttcagccatgaagttgttaaaaagttaatctggctattaagtatgaatcaacattcaatcttctgtaatacaaaattacatttatctttggttacaatcaagttttaagctttgcttaagccaatgatcagactagtccaagggtcaacaaactatcttctgcagaccacatttatcctgtcatctgcttttgtgaattaagctttattgggacacagccacatccaattgtttacatattatctgtggctgctttggggctatgcattagtctggactgtctctatctctagagagacagagttattaaaaggaactggcttatgtggttatggaggctgagaaatcccaagatctgcagttggcaagctggagacccagctgacctaatggcacaatatcagtcccaatccaaaggcctaagaataaggagagctaatggtgtaagctgcagtccaagtccaagtctcaaggtaggagaagaccaatgtcccagctcaaaaacagtcaggcagaaacagcaaattctcctttactctttttttttttttcctattcaggcttccagtgcgttgaatgaggcccatccacattagggagggcaggctgcttaactcggtctaccaattcaaatgttaatctcatccagaaacccctcacagagacacccagaagaatgtttaacsaaatatctgggcaccccatgacccagtcaagttgacacataaaattaatcatcacgagctacaaaggcagagttgaacagttgccatagaaatagaaactatatggccagcaaagcctaaaatgctacctggtcctttatgaaaaaatgtatgctgacctctgagctagtcaatagaagaataaatgggaacacaactagataaattctgtttctcttctgtcatatattaggagttcattcattcatttgaaagtatttcctgagcatctagaatgtgccttagcagaacagtgaagaaaacaagttcttacctcaagaagtttacactgtctagtgaggaaagatagatcaaaataaacacaaagatacggtacatagaaacatgccctttaaagcaatctaaatcagtgggcaaggaaaagagagacctgaattatgctgtctggatggtagaggcaggcctttggtaaggtgatgtttaggcacaggtgctgtacttactcccaaatcaatgcagtaaatcatgctttaatgtgagtatttttgactgaaggaacaaagtgcaaagatggtgagatgaaagcatgcttgatgtattcaaggaaaagcaacaagatcaatggactgtatccaggtgacagagagggagaggaaaargagatgtatttaaagaaatggcaggtgccagatcaagttaggctgtgtagattatgataatgaatttggatttcattccatgtgaaatgggaggtcattggaaagtttatagaaaggagcgaaactgtctactcatgtttaggagcaatgactctggctatggtgtggaatacagcggcaagtactagaagccaggaaagcaataaaaagactgtcagtcagcttctcctaggttttgctgcaataagaagaaaccctaggatcacagtgatttacaaccacaacggtttacttctcacacaggttagatgtcagctgttgctctgattgctattgtttggaattcatgttgaaagaacaacccacatctatgatatcactggactcatgggagaagagaaagagaaatggctggacaacaacatgatgggtctttaagactctactcagcagcagcacatgtcattttcatacacaggcccttggccaaaataaaaccacggccaagcctatggtcaacagggtgtgtagacagaatyctcccaaaggaagggggaagcaaatacgtgggaatggtgataaaatctaccacagcagtcactgcagtggtttttgtatcaggatgatagcagtggaggtgctgacacttgactgtactcgggacctattttggacaagattgctgatgaattgaaaggtgtgagagaaggagaggaggcgagaatggctctactgtatttatcctttacctgatacactagtgccaaatttatgaaataaacaaaatccagccctttttttccacacttagcatccacatccttgatgacctctattctcagttcttttgagggctttgctcttagctggctaagattattagctgcatggaagttactgcaatggttgggtattaataagctctagagtcagacaaatcttcctggggtttaatcttggattctcttctctatgacttaaggtaagtcagttaatatctctgcaccttagttgaatcaagaatakataaccatcatgagctgagtcctttgccttctcttgctgcatcttcacaacagatctgtgaagtgaggtttattgcactttatagattagcaaaccaatacacagaggcattaagtgattttcccaaggtcacacagcttgcaaatctcagaggcaaggattcaaaagtcggtttgaatccaaagcctatactcaaataaatcaaatatagcatttaaaatctggatgttgcttgccttttatagtgcttgctttttttgacagactcaactatcgtaaaagttaaactgattatgtatgaaagataatctgtgagttcatttctaagaaacagtaaaagtgattcttctcgctccatgcaggcaaatccttcttagaggatatatgcaaatgtagtacagaattagaaagccttacttatactctggggccagggaaatagctttcaggagtggatataaagaacgctatatattgaatggggaaggtagagacgatagcagaaaaggctcaggcataaagaataggagtggaaatccctatttaaaaggagaatatgaaaaaaataaatgtaactaaaaacaagtgtatgggaatatgcaacctcactactactgaaagtgatataattaaacaataaatgagactgcactttactaccagttaaataagaaaaacatttttaagaataatgcccaaaactggtgaatatgcattgaaatctggtcctgcatgcattactctgggcaatctaaagtgaaaagtaatttgaaatacatgagggactgtaagagtattcatattcttaaatcaagaattccccttctgagaattcattcccagawaatcaatcaagatattagggaaaaaatgaagctgttctctgtagaattatttgaatgacagctctgaaaatgtagctgtccaacagttggggaatggttaaatcaattttaatacctttactttctagaattttgtacatatattgaaacttgtgacatatacatttttaaaaatgcagattgaaaattgaagtactgatacatgttacaacatggatgaactttgaaaccatgctaagtgaaaggtggtcggcacaaacaaccatatattgtatggttacatttatatgaaataattagaataggcaaatctatgaakacataaagtgatgaatgattgcctgrgactaggtgtgtggggtggggtgcaggaatgaggagtgactgctagtgggtacatggtttctttttgaggygataaaaatgttctaacttatattgggatggtgctcgcatgactctctgaatatactaaaaaccattgaactgtacactttcaatgggcagattatatctcaaaaaagtcacatctcaataacaaagctttttaaaaatacaagttgagtatatactgtaattaaaactaagctacataaatacatgagagacagactagaagtgaatataatgaaatgctaacaatggtttggttcagaaagtggatttgtgggtgaaaatttttgccttctcttactgtcccaaatgtttataatatgattagatttctttgattattaaaaaatagatacaattagcaaacaggagaatcctctcctttgcatttctctctcccctccaccaaaatccaatcttcttataactttccagaatcaagagtcagaattagcaccgtccagcagccctcaaaatcccttctagccatttcaggccattcgatacaattctctgaatggaaaagacaactatattaatagatttaatacctttcaagaatatacagatgaaaaattctggcatactgaatatacatgtgttctcatttttaggaagtgatagaagcaattgcggagtgtgcatttaagacttcaccttttccaattctcctttcgtttgagaaccatgtggattcgtaagtattcaacacattcaggaatgagtctttttcccgaayagggcatactgagtaattgtttatcagatttaagattatttgacatgattaatggtgttcttcaatcatgttgtatattaactggcatgttttcatttgtaggtgatggaattcacttaaaataatcaacattaaaattatccgttggacttgtaggatctattttcataccatagtatggtttttaaattaaaaactcttctttttgcaatgcagtggaacacatttttctacacaatacatgtctctgttatagatttggggtgctgtgggccacttttataacccttcttcattagctccttctattgcacacaatttgagtccacttcatcactttgtggcaggtggggggagagctgtgaattccattttaccaatttgcacttacacagaactcagttcagcaaatctccatattcccccttttcactggctttcccctgtttgttaatatttgtatttgccaatttcaaaatagcctgcatgtattgctgagctacacaaagaaaaggttattttgacttcactgttttatattcattttatcacacattaccaaagagagacacatttatatctaatagatgtatattagtttatcatgtagttactttaaagagcttcagaatgaaagattcttatccatattgaatgaaagcctctctttcatttcaggaacctaagccagatttttcaactaaaagccagcagcacctgtcctaatttggattacgagtttctttttaccctccttcctattgggagtctttcccaggtcactgagcctctttgtccaagtaatttgtaacatgtgcttcaattctctaattcttaaagagttcactagatcttaaagatgcagattggtcatgggcaaatttcaacttgaagaatttctaagtagttaaatgtgacaattttataattatctgtattttttcagtttgcccgccagaaatccatattatatttaccggcttgtggttctgcttcattatgcaacaatcatccaatgaatgatgtaatcctttggcacatagtttctccaacgcttctgagggtcaaaggaagagaaaggaatttattctgttccatgctatttctgttcttactcaaaggggcatctctagaagcagtatttaatacctagtttgctttgcaactaggttctgctttgcaattgactctgttaaacaatttctcatctctgtcaattcatttataattggcctgtaacaatacgtatgagtccattcttgtactgctataaagaaatgcctgggtaagagactgggtaatttatgaagaaaagaggtttaattggctcacagttccacaggctgtacaggaagcatggtggcatctgctcctggggagtcctcagagagctttttactcacgggaagacagagtgggagcaggtgtcttacatggcaggaggagaactaagagagagtggggaggtgtcacacacttttaaacaaccagatctcatgagaactcactatcgcaacaacagtaccaaggggaatggtgttacaccataagaaatctcccccatgatccaatcacctcccaccaggccccacttccaacatcgggggttacaatttgacatgagatttgggcagggatgcagattcaaaccatatcacaatacttgagcacttttctttcaggtattatagtttcgacttgaggatgctttttttttttttttttttttttttttctgaagcggagtttcactcttgttgcccaggctggagtgccatggcacaatcctggttcactgcaacctccatctcccgagttcaagcaattctcctgcctcagccttccgagtagctgggattacaggcatgcaccaccatgctcagctaattttgtatttttagtagacacggggattctccatgttggtcaggctagtctcgaactcccgacctcaggtgatccgcccacctcggcctcccaaagtgctgggattggcatacttatgttcttaaagagaagtttctatttaaattagacaaaatgaaaggctatggttccattctatattgtcacacctgctacactgagcttccccttggcatagccagaaaaatatcaaccgccaccaccaccaccaacataatagctaacctttattaatagcgaacatttattaaacattttttgtgccaagcagtttttgaaatattttacatgcctcagctcatgtaagccttaccacaaacccaggtgcttctaagagtaaatattatgattatygccattttacagatgatggaactgagtcctaaagaggatgaataacttgctcaaggccatgtaactaaaacatgacagagatgggattccaatccagttagtgtggcttcaaaatgcacacttttaaccaacacatctcctacgcctaaacagaagcatcasgagccttcaaaacatcaaattcagacaacgagagcatccaccaggcaatggccagcaaatgtttgcctctgtggcttgtaacccttaaacacaagatgtgttttgcagttcttcacactagtcatttagagatcaaaaactggacatgaaaactaatttctgcactgtgcctaaaggcaaagagactagtgccattgtactgcccttatgggcttaaaaatgataaatttagctattaaaagttcattaataatttctatgtgacaaaagaaaacaggaaaacagcctttccaggatgccatgattgtgtcccaagccactgagataatgtaatggcagtgaaatactaaaagataaaattctattgtggaggaagtgggtgggagttgcttgcttcatatttcccttgtccttcagatatcaaaattgttcagccaccattctttcctgggaggctagcacacacccaaagaaaaccgataagctttcccttcgctggtaaaaccccgtgcttgacttgtgagccacttcatctagttcctgagcccatggtaggcagtagcagcactctttcccactaaccctagaaataacctcagaatccttctcaacacagtgacctcagactagaccagcaagacatctgacacctatttgccatctctgatgaactattttatttccctgtgtgctgcatgtatggaatttcagattcagaactctggtcccagctcacttgggccacacgtccaaaacaaatttatactagaaaaaaggagaaaaggacagggcacggtggctcacgcctgtaatcccagcactttgggaggccgagactggtggatcatgaggtcaggagatcgagaccatcctggccaacattgtgaaatccagtctctactacaaatacaaaacaggtgttatggcgggtgcctacagtcccagttactcaggaggctgaggcaggagaatcgcttgaacctgggaggcagaggctgcagtgagctgagatcacgccactgcactccagcctgggtgacagagtgagactttgtctcaaaaaaactaaattaattaaaaaagaaagaaaaaatgagaaaagccactgaaacttctggttttctctcccaatatctgaagtcacctatccatagacaataaaagggaatctgctattagctgctttcaatgtatcctgttgctacatcagaatcccatgaagtgtcttcaaaatgcagattcctgagctacacccttaccctgactgagaatttctagaaataagacttgaaaatatatttttaaaagccctacttgactctgacatcctacttgtgaactaacacttttataaaaagaattctacaccaaattcaatggaagtaatctttacccatgttcagccacagaaagctgtgaaattttgaacaaggttcttaatttccatggattgcagattcctcctttatagggaaagaggttggtttagttcaaactggaggatttgctcccaagaaatcaagtgagttcctcggtcagaaaaactgacctctgccccagacgctcacaccttgggagtattttattatgctcagaaatgtctgctatgacctgaagctcaaaatgcatttgtgattttttttccctctcactttgtccccatggtagctgatattgatgctctaaacacttcaggattttgttttttgctaattgcaattttaatgccttttatttctgcagttctgacctgcaattaaagttggtttgttttcctctgactttttcaattcaatttgctctctgctctgatttagttccatcaggtgggtgtgcatgtttattgagaacatgaatagcctgattaccaaatagctcattttactttttgctaggacacctacctcttgttctgtccatctcagttgattctgaggcaggttttgtttttgtttttgtttgtttgtttggtttgagggtctcactctgtcacccaggcaggagtgcagtggtgcaatctcggcttactgcaacctccacctcccagattcaagcgattctcctgcctcctaagtagctggtattacaggcacgcaccaccacaactggcaaacttttgcatttttagtagagacaggatttcaccatgttggccaggccgatctcgaactcctgacctcaggtgatctgcctgcctcggcatcccaaagggctgggattacagacgtgagccaccatacccagccctcaggcaggttctaaacgtctacattagacatagattcttgttcttaaaagtgtggtcctcagaccagcagcatctgcatcactggagagcaagttagagctgcagctgagtcctgtaccccaccctggactctgtgttggactcttcattttaataagaccccaggtaacgtgaatgaaatagaagagctaagctgtaaccaccatggtttattaaccacctgcatcagaattatctgcagtctggcttaaaatgcatgttccggggctttggtcccagctacatgaatcaggggactgtggacttgatcctgtcacctgcagcattaacagctcaggtgattccttagtggaattgagtgataatcatggctccagtaaaatctttatctgggcctgatttggggacttcctgacagaggacacctgtttggggatatttgggacatctcccttaaattcctctaatggaaagaatatggttccctggaaaatcctgagagcagggcattcaggtaaaatgccctgctttcactccaggtgtttgatcaaagataattcggggctcccaatttccaacagtcaggaaaaatgtcatctactttggcacatgctgacttaccttaatcaatygcagtggttttcaagcttgaacacacaccagaatcaagagggcttgttatgatgcagactcctggactccactgtcccggagtctctgattcagaatctgcatttctaacaagctcctggtgtgattctgctgatggttcaggggccacacttggagaagtaaagctccatgatactgagtagcatctttctgtgaaagggaaatggagggtttggccatttctttagtgcactctggaacatgtcgtcccagcacaactgtacttcttatcagcagcagccacagagcaggctgacctggtagaacccctgtgcaagttatcactggaggaagaagacttgaacccagggatgcccggggctggccctaccaaatcagccacttctctgcctgctcccaaaggtctcatagacacagtttctaatgacttgtccttcagcaacgacctccaatgcttttcaggatcaattctctgattagcagtttttcttctctccctaatactgctgaggaatgtggcagtgtattctgatggccgcataagccatttagtaagctcccatacagaccaagagaggcctggtgagaaggggcacggttgctgtggaggactttgcaaatcctttgaatctctccttagcctctccctgcagttccaagaaagcagtgactttggggtttcatattcaaatgccagagaactcacyttccacccaaagcacacacttggttttttaaaaagaaaaaaatgaatacaaaatagtgacttttcctgtggaccatttcaatatgatttgaaccgtcaataccaaccccctaaccccagtaaaaaaaaaaamagcccatgatccaggcttaaacattcatggaaaagggaatgaaaataagaataagaatcacattttatgatcaatttgaattttcrtcaagaaggattttcatcgctgttacttattcttagtacagtcacagtcctgctaaaatgtattatcattgcagcatgtagagataactattggaaatcaagttcgacagactgtagatcaaattcaaaatccataaaacccaaaggaactggataactttgtaatgatatttaacattccacgaaatgagaaaaaaaattattgctttttgaaaggtcaagggaagcagtagcattgaaacaatatgaatgttcccctatatcagctgtgtttacaagttactgggcgtaggatttgtctagtctagctggcggacgccgccttgtaacagtggaatcatcttacatttgccctgctcttttaatgtttcaaaggcgtttgcatccattacttcatttcatcttctcagcaccctctgtccctttccaagaacggttattattctcctcattttatagacccagagtggttcagaccctgtcgctcagctcagcaaaccctgcagtgccagcctttttccattataccaggtccctactggcaatatattcagaatgataccacctttgctattctgttatgtatatatgagttgcacacacctttccccaaggtgcctgctacttttatctttcctccaggaccccctccccaagtggacacactgtttgcctgtctgcccttttctacattttgagattctctccctctctttttctctctccgttgtctctctttccctattcagctccctccctgccatccttccttatctatcctctttcatctcctcataaacactcctttgcagcagtggtttacaaatttcacttgataatttacatggaaatatgaaagggttctttctccaagtgtcttgcaattgacttggaatcagcgagttaaacaaaagggactgagcctctaactctgggaatttcaaggctccagttacagcaaatgacatgctgtcccctccacctatgtctatgcaggtctgccttgggaaccacctcacacatcagtgccttygctgtccatctgtgtatgttattcaaattcacataagttaagataaagatccaggatgataaaaaccaatcctgatgggtgggattagagaattacttctttctgtagttaataacacaaagcaatcctgttcaggttctttggataagcctccctactttccttcttctgttcttgttctcccntagcccaaagcagcaagccaagatggcggagtactgccgactgatctttggggatgcccttctcatggagcccctggaaaaatatccagtaagcagttctgatgtttgtccttgaaggaatgtatgcattattgatgaatgaggttgagggaaaacttacttccttttcatatttatgtttcttggtaagattaatgcagttggtgatgaaatctttgacaaggaggataccagcaatgggccccactaagggtagaggaatgcctctgcactcttcctcttcccacactcttctctctcgctggctgcctgatgaaactcaatcaagagtgcagatttcccaacaattacaatcagccsatagagacagtccaagaggacaggcctctgctcactcccagggaacctcgtcacacctctttgagatgaatggattggcaaaacaggacactgcaggtggcacartgtcttcttggcctgtccctgctggctgttctctatttccttggatgcaccttttggtgtggcacaactcaggtcgcccattgcmwtgatgatatctctgctttgggaaggaaagcagcagaaatatcctaaagtagcattttccttccygcacccttttgcccaatctccatgcatttgtaagtgagtttataccagtccctccgctcattgcaagccaagaatagaggactaacttaggcattctatagattttcttaaagtaacctatcttgtggcttgcacacatgctctctgatacaatatctaatgaccccctcatgggaaattgattttcccgttagatgtacaaacttgaaacagtcaaaataaggcttgcaaatgtggtagcttgaatcttagggctgggaggaaatctgaagccacctcatccacttctgttgatgccagggacgtgcagctaaactacctagtaccaggatggggattttgctgattttaaggggcatctgaaaaaatgatttcatgggctcacctggaagcttctgcccgtctttaccaactcctcctggcagatgcctggcttccctccttcaaaaattcaggccagggccttcttatctgtcctaaatcaagatgattgggtttctatgttccattggaaaattcataaatgttcagatttagtacatcaaatctaccagtacatttctatggtcttcttcatgtagaatatgttgaaaaaaaaagtatagtaatgaaaatatatctttgatataaaaaaaaattagctcccatgtaagatacactaagagtttaatgagcagtgttgaaggtagggaagaagtctagacatttggtatccacagctgatctgggggtctggggaggggatctgaaagagggagcagtatttttaaagaatatgcctttcatttctattagctggaatctggagttcctcttccaagccctatggatttaatgtataaaattttggtgaaaaataagaagaaatcacacaagtcatcagaaggaagcggcaaaaagaagctctcagaacaagcctccaacacctacagtgactcctccagcatgttcgagccctcatccccaggagccggtgaggggctggtgggctctccccgtcatgttttgtgttggtttaagaattgctgctctgggctgtgcgyggtggctcatgcctgtaatactactacttttggaggctgaggcaggtggattatgaggtcaggagttcgagaccatcctggccaacatggtgaaaccccgtgtctttggtggccaacatggtgaaatcctgtctcttgcaaaaatacaaaaattatctgggcatagtggcacgtacctgtagtcccagctactcgggaggctgaggcaggagaatcgcttgaacctaggaggcagatgttgcagtaagacaagatccagccactgcactccagcctggtgacagagtgagactccgtctcaaaaaaaaaagaatttgctgctctgaaattagcttagaaggactttgaacattcctatttctgcacagttttgaactactggttttctcttgctgctacaaacttagcggcttaaaccagcacaaatgtattatcctctagtcctgtaagtcaggaagccccctgggtttcactgggctacactccaggtgtcagccgggctgtgttccttcctggaggcgctaagggagaagctgtttccttgctttttccagcttctagaggccacccacattcgttggcttggggctccttccagcttcaaagccagcaaggctgcatttcactaacctttctcctgtggtcacatctccctctgaccacaggcaggaaatgtcctctgctggcaagaactcaagtcattacattggatccatccagataatccaggataattgctcccatgtcaaggtctttaactccatctcacctgcaatgtcccttttatcatgcaagctaacatattcatggagcagagacatctctgggaggtcattattctggctaccatgtaagccaaatagtcttcagagtgaccatatgactttaagcttcataatgggaaatattaactatagaactgagcactggatgcattgtcattgatgatatgctgaagagttctggrcatttcaattttttcatgttttaaagaactttttaaaatctgtgacatggcaaaattacttaaattatcttttgaagctcctagaggatgcctaatatcatttcttttccttttaaattaagggtgaaatagattgctgtggttgatgagaaaagaattcagtggcactcatttccttgggattatttgtcatttagtctgatttatcttccaagttcagtcagaagcttggcaatctgaaaatcgcattatagacatctcctgattgcagggtgattaagtggaagaaacttttaagcttgactgtaggaagtttttcagttataagttaaacataggaacaatcaattggaaaactacttagcagtgtctacaaaagctgaatatatgcactccctgtacctcgggagttccattcctaggtatatgcttgctaaagatgtgtatttaggtttaccaagagacacgtacaagaattgcttaaagcagaggtattcagaatagccaaatactggacaccaaatactcgtcaacagataaatgaattatggtatattcacacaaagaaagaatatgcagccatgagaataatctataactaaatgaaaactatggatgaatcactataaataaacataatattgagcaaaggaagtcaggtacacaaaaactacatactgtatgatttaacctatataacacacaaaaacaggcaaaactaatttatgctatttattagaagtcaggataatgggttcccttggaagaaaagcaaccagcagggagcccaagagccttctagagattggttatattttgtttcttgatctggatatcatttactcagacacgtttatttggtgaaaattctttgcactgtggacttacgacgtgtacttttctgtacgcctgttatacatcagttataagattttaaaataattaaaatataaactctaggacaatcagggttaaaaaaaagtagcctgagactctgatttatcttttcttctatttttctgtctcaawtgcctgtttttttattgtttcgattaaaatctttatcaacagacgttatataattctttgaaagggttttgtcctgtagcttttgaatgtgtactttcatcattattgtgcatgtctttcaacattttttcaaaaataatttctgtactcagtaaaaatgttctctttgaagtttggaagtgagtatcattaacaggcctttcattcacacctatttcctaacacaactctatccsttgaatgatagcaagcaaaccttgtcttcctttgcatgtgggtgcttgtgttttttaccatctgcctttcccactaccagttctctgcctcttattaacaggatgcataacacaaatgacgatttttacaggcagtgaacattattgcttaatatagagaaagggcaacaatctgttagttattcagtagatttcctaagctagccctgttgtctattatgcaatcagtggaaacttttggacattttaatatgtaggtacctgaataaagagcaccgctaatttaccatttggttcgtagatgttcacagtactgggaactcaagtaacttgaaaaacgtgacaggtattgtatttcaaagctagtttacttatcatggcccctgttggccagatgcctcttgcaggattcagccctttgctagtagacttgtcctaaggaactagggtaacctaagatattttttatagttcaacaagattcccccaacatccctccaaagatttacaggagaaaaatcaggtttctgctttttacagtaaagaaagacaaattctttctttcccacagacactaaagaatgaccygattggctatttgaaatgactgcgaattgttgggtcccatgaagtattttatagaaagctctgccaaacaattttttaattayttaattaaaagaatcccctctctgatttttttttttwwaaaaaaaaaggtaataagaacttgggacaaaaatttcattataaaaatgcttaagtggcaataccctaaaagaatgtgtctctaatattgtagtaagatacgttttctatccaaaatataatcgattcaccttattaactaacacaatatcagcattataaagtggttgtatgtggctttccttaataaacaatccaatacataaaaacccttgctggtcccagaaatcttttttcccctggagatttttaagcaatacttttttcactrctgtcattcagtaattgaactgtgtcagccaaatgaaaacttttataagcttctcagaggacagtgcagtggtactgtctccatttatataaatcgagtagggcagctaactttcagaaggctggcagtgggcaggggtgcaagttacttcattgttgaaccattattgccatctattgggctcatcgtgctattgcattgtgtgagccctgaaagatagtagttaaatcaatttagaactttcgaaccatttagaacaacctcgctgactttttacttgaaaatcttttttatataacggatatttctgggtctgactgaagcccatagctatggaagaatgtaatgcttcatactgatatgaatatttaacctagcagaaatgtccattaattcttcaggggaaaaacaattcatttaaatgagtgtatattggctacatatgaagctgaattatttctgatggagttagatttccaatcatgctgatatttaaggasttacccatgttatcctgccctcttaaaaataatatcagcattttctacgatatgcacttcgttgtgatgacaatacatccatcaaataagcttgcagacaaatcataggataaagttggcccttcacgatttttatgtagtgactttgctgccaaagccccagagttcctgccccagctcctaacttctttgacttctgcaaggtcctctctggccttgggaaaaatgtcaacacaagatcactgagctatgtgctggccacgcattgcatggaagagtcgcggcttgggaaaggagggaaagatgaaggagggatagatagtatatctgttttcggggtcatagagaccctgagagagtgtttgtatatcaaaatagaatacatgtaccatagaaagcaaactgtattaaatgccagcaaactgttttcaatgccacgtgtttaaaaacatatagagaaaaaatattgacacgcattttttaatagaattttgaaattttaagtgctatttattaacaaatccagtttaggaaaaaatctatattcaaaatgtcagtataattttctataacgaataaaatttaaatccytgaaaaaaataattttaaacagcccaacttccaaggaaatctgtaattgattttaggtaaaatatgtgttacaaatgctgtaaagctaaatgttgaaatggtgacatgatgatctgttattaaaatttgacaggagaagctgatacggaaagtgacgacgacgatgatgatgatgactgtaaaaaatcttcaatggatgaggtgggtacttagggcttctggtccctaaggcattccaccaccctgtactctcctgggtctgtctcatggtcactttstgccatctagtggcaaaaagtagatttgtgccttccaattgccagcttcaatttttgaggcaattaaatggcttatgaaatgttccacaatccggagaagatatggcgtttagaaaaatgatcagaactgtgacattcattgcattgttttaattttggaacactagagctacctatttatataaacttaggcatcccgagtaacttgattagctcaaaaatattaattgcacagaacctagaagagaatcagaagcagatcaactggaattttagaattttgtcttaccaaaagtttatactgaaacaatctgggcaacagagagagacctcacgcctttaaaaaaacaagttaaaatgaaagataaaacacatccaggtgcagtggtgtacacctgtagttccagctactagggaggctgaggcaggaggatggcttgagtccaaaaatttgaagctgcagtgagctatgatcacaccactgtgctccagcttagaaaacagagcaagacactgtctctctttaaaaatacgtattttaaagtttatattgaatctgctttcaaatttgttagatatgttctgtctcaacgcttgtagctctacaatttagtaaaaatgaaacaaaaaataagctgctcttacttgatgtccttcctcttagaattattttttaatgtctaaagttttgcttaattatgttccctcactacatttcaatttttgatttccaggaggaaaacagcttaccatgtctggcaaagtatatgttcctgagaatgatttcaattgtgtataatttctgatcagtgattctaaataatttttaaactctcttactaattggatagtccatttgcaaatgaatgtttcccagttaacatttgacccaaatattactaccagaatttttaaaagaaactcatctccatgcattctctcttctaaaaatgtgagacaatattagatcactctacagaggcccattttgtgccaacactgcattattggttttctttttcattaaaaactctatcaaagtaatatgtcatagctaataatagcaaaagcaacatgagattgtagtaccacttgccaggcactgttctaagctccttcacataaattaacttattttttaatcaaaaacccctatatgctgtaggaactgattttatcctaattttacaaatgagtcaagtgaggcacagagcaattaagtaagttgcccaaggttgcccggtttctaactagtggacttgggattcgaaatcaggcaggctggctctagaacgcgagccattaatccctgcactatgctttcctgcttgtctaagacacatcaggagccaagaagggagggagggaagaatgttgatgaaggaaagcagttgtttacccaccccygcccatttccacaaagcaatctttttattattattatcaattttcccttcatttggtggtcacctacctaacaattttcttattgtacagtgaattcttaatttacgaatccgatgagaacacatggacacataaagggacatggggcctacctgcgggtggaggtgggaggagggagaggatcaggaaaaataactaatggatgccaggcttaatacccgggtgacaaaataatctgcacaacaaaccccagtgacataagtttayttatataaaaaaaaaaacctgcacgtgtagccctgaatttaaaataaatgttaaaaaaaattactaaccttagacaacacctatggacaccctgcaatggaagatgagctatagctcagtgcttctcaaactttgatgggcattccaatgaccttagtaaaatgcaggatctgagtctgaggcctgcagaggggctaagatcaggcatttctaaatggaaaggagggggcaggggatagggagtgattatgttggggccatgctgccagccaccattcaacctcccacctcccttcctccctcccttttataaaatgaggtgttgctgttgcctttctcctgtaatgaattttcattttgtaattttcagaaagggagggatgattttctgcatgcttgaatcatgttgtcattttcctgggaaaataactgataatataatgctgactctggaaatgttttcttttttattcctacttccaggggactgctggaagtgaggctatggccacagaagaaatgtctaatctggtgaactatattcagccagtcaagtttgagtcatttgaaatttcaaaaagtaagttttccctggagaaaaacccctcttgcagcatataatgattatattttaaatacggagtaatgggaccaaagaatgttacccttaatagagmgatttatgcttttgaagtcttaaatatatgtacattttgactgccttgttactttwcacatataataaatatgcatgtattgtaatatataaaaataaccatatgagaaagtattctatggtgttctccaaaaatatttaatagggctacaggccatacatggctatcggaaagacacatgaccagagtacaactaattgggaattgtactttgctttttgttcgcaacacacagtgagatccatctgttacataagtgataatgttgaaataaactatctacctgtttcccagaagggaagcaggcagagacttgatgaaccctgataattagaaatagaaccaatttatctatattccatttgtccatcacatgtatatatttagaagaaaatgcattaacttcacatcactttgtgttttccctttattcaactatacatccatacttgtgcaaagaaaaatatcatctttacccagacaaaagggttcttttatgaaaatgccccttgtatttgcatgaagcgtaagatgctatcagattaagggaatccttgaaacttactagccacttataagggtgtacccttaaaaacagaaatttgcctaaatgtactagcttctaatcaaggatggctttgcagctatatcaaaatccaagcctctaccaaacacgcttgtttatatttgtataatcttacaaaaagtcttcacttagtggtatatgcaacctagatctctacaacaaagaattcaacttccaagagtttatatataatgatttctcaacattgaattcgatgtcctaatttctgatgtttcttacaagttgttttctttgaaacatcctagcgtagttatttttatatcactgtaatttcattggctgcaatgagtttctctaactcattagttaaaagttccaagacaagtagccaagtgtgagaaagagccaatatatttagattcttcagaacctggaaacaacagcaccagctagactcacaaacaagcacttttctccttgtgtttaatatcattttataaccttgaaaaaagaatattcaacatattttaccaagtacctattaatgttgactgaattttaattaatagttatgcttaatttaataagtcatataaaggtagatttatgatggaccaaaataagagaagccaaggtttgccttagagtggattggagaaggtgagaagatggatgacgaagcctggaaatcattaagaagaacgaggttttaatttcgaaagagaggtcaaagagggaaaatatctcaaagataactcagtttaaaaaaattcagagctatataaccaccctgtgctatacttatctaaaatactgctcataattgttggtttttagtggggatgagggtagagaaagtgattctcggtctttctaaactaagataactttgttttctttctctcactctaattggaggcttgaatttcactttcaaaatgtttctcttgtgtttagcacatcctcctctctggcctctattttattttatactttattagtccattctcgtgctgctatgaagaaatatccgagactgggtaatttgtaaagaaaagaggtttagttgactcacagttctgcatggctggggagacctcaggaaacaacaatcatgaggcggaaggcacctcttcacagggcagcaggagagagaatgagtacaggcaagggaaatgccagatgcttataaaaccatcagctctcatgagactaatgcattatcatgagaacaacacaggggaaccacgcccataattcaattacccccacttggtaacccccccktgacactgtgggtattacaattcaaggagattttgtgtggggacacacccaagccatatcatgtatctaatatgaaaatgaagccatgagactggaaaatttccaaggacctttctgttttgaaagaccataattctgtcatattagttatttgaaccaaaaaagtatatacaaactgataaggtggcaatgtgggtatgaaagagatagtcagcacctagcacaaacattcccatggtctcttttgttaaaccccatattggccctaagaaaaaaatctgggtgaatttagaacaaaagattcccacggggtccctgctcttttgacaaatttttttattgccacactatactcatctagaattcattcatgtccctaaattacaaaagcataagtagctctgacccaagtagcaaacgttagaaaagacaactaacaagactcaacttttgttacaggtaaatagtgcactagaaaaaaaaattaaatattgaaattacattgaggattatttgccctcaacttcactgaatatttacccatttcttttataatgttataatttatancaatgaattgtatttctcaccttcccnttttttgttttgttgttgcttaactcagaaagaaataaaagttttgaaatgtcttccttcgtggaaaccaaaggacttgaacaactcaccaagtctccagtggaatttgtagagtatccttgatttgacgaatgactgcagaatgaacacagctgaagtcttgtgctatttgttcatttggttttttaataaggagaaagatgcataaaatggcttaagtatatagcctggggcggatraatagtttcaggtatcatatacaatgctgggcggggtagtctggcctatagaacaaaaaactggtcttggaataaaggaagcgtagatttcaaggttgccttcacaccaccaagctctgtgtctttaggcaatttgcttaatcctgactttccttgtctataaagcagaaataattatactagctttatggtttgctctttggattaggtacaacatatgtaacatgagtgtgcatactttacacatatataagatatatgtaaagaaatatatacctgacttggcatctcacatacttatatgtactatatgtccaaatagtagggatgatgatgatgacattgtaaatataaatatacattactaagactggatttattgatattactgacaacaaaaatttttgctactatccatgaactaaaataaagtgaaacaggctattaaatttctttcataaaattaacagtaaatatcacaaagtgctcaatttcatgtaataagtcccagaataaagttaacctttaaaattcatcagtggaagaagaaacaaatgttgactccataaataaagtcctgctagaaaattatcatcgttagtattccttattgactgtgtgatagatcttgtcttatctcatttaatcctcacaatagtcctatgacatagaaattgttaaatctattttatagatgaggagactgagtcacagaaagacaaaataatttgtccaaggttattcagctagcaagtttgagagttgaggttcaatttcattttgcctagctcagaaccctaaccaaccttcacctaacttggtgataggaactagtcagtcatgttttaaagacatagcatggtccaacaactacaagattcttaggatagaaaactgatratgataggaaccaaaatattaagcaagatcagaaacttccatggtacattgaccttgctatcaattataaagagtaccacagtcttggcaaatagcattcccagagaaaattaataaaaattagcagacagcatttcaaaaatagctatacagtgcatattatctacttctgccaaacacaatatcattctttcaaatgatttaacacattccagcctccttgtgtgtccttagtcattaagtctgtccttaatactctccacaaaatcacattgactttggctcagccactttttgctaccccattgacttttacccacggggctctgcaaaggtgatgctatgcctatgtgataagagcatacttattctgtttgtttagaaagctttttgcatatttgatattactgacaacaaaaatttttgctattatgcatgaagtgaaataaaatgaaacagcctatttaatttctttcataaaattaacactaaatatcccaaagtagcccaacgagatcatcaatatttacttcattttccaaatggagaaagatggaaggtagcttcttagttactattattgactaaatatttttataattgtattcactacttaacatgatggtccagatataacaaaatgcagcttagcaggatatatccaaaaggaacacgtgtggattcatccaactatatgcctcagctcttctggaatgcaggttgtcagatggtggcacttaatttccagacaatgggtaagtacatgcttgttcccattctgctatgaactcacattgccaagtgtccaaaaaccattcttacataattgggggagagaaaattgccagacttcactgaaaaaataaataaaagcaaatttcaatgaagggaatatcaatgcataaaaaaagtgaattttgaaaatcgagacatgttcttcaattattctgtaaatggatctttatttctacaggctttgcattatttttcaaacaaaaatttttatgctttttaagataatacatatttattttgaaaataatggaaaattcagtaagtattttaaaaacaaactgccaggaatgctaccaactcagagattccacagtgttgacttttagctttgtaatctatgtcttttttgtctacatataaatgctttttttatgtaactactcatttaaaataaatacatatatattcatatatacatatataaacacacactcacctaagtgccatagagagacatgaatttcaatagctgcatactaagcatatttcacaattcgctaaaaacttatttctattccctaaatttcttttggaaaatattttaaaaacagaattactaacgttaaaagatgtgaacagtttaagtacctttatgaatattgccaaattgtctgtaaaaaatgttgtgctacattactccgctgtcagcaatgtttaatatgacgtggcctctcatttgcgatcttggttaagtattatcgttaaataataataataattaaaccagacaaaaatgtgttatttcactgttattttaaattcatttcttgaatcattattaaggttgaactttttaaaatatgtttcttggtttttgtatttctgcttttatgaattacatattcaggactatcgtcaattttcttgttgatttataacagcactttttatttaaagggtrtattgtcttttgtgaaacagagacaattcagtggatcaggtcaggctgattaatgtttaattaaaagttcttggtttacttgtatgattacagcctcctcaccccaggatgaaagccttgtgctcccatttttctsatggtttcttttttatttaaccttttcaaccatcaaaatttaattttggtccatagtctcagtgagatcaatccttttttttcatcctaaacaatcatcccactgaactggaattacacgttaatagatacagcctttttcattgttgttaattcagacccattttttcactttgtatcttttccattaataaatttgtctgccttcctggatgcaataactcactgtttttactgtattttataatatggattaatacctggaagtkgtgattctcctttactactattaattttcaattccttttttgccattgccagtggaattcttatttcaaataaacttaatttaactgtattatgttttccttgactactaaaaaaaaactatttttaaaatcatattaactttataaatttatctgacaaaaactgacacctttttaatttttagtttttctgtcacaggaaaaatgcttttctctttactttaaaattttttgtattaagtcctcagcaaaatcacttgtcttcattagaggtctagttttcttagactgaatctttctttttatttatattatatttttaacagattgtttctggatatttatatttgtatatttgtttattttataaatgattgtattttacaaatgatcatcttyctaaactcttataatagcctattttttgcagtacattccgttggaatttttagacacacaaagacagtaatttaatcatatctcatttctccacctgccttatttattgctttggccttaccgttctcaggtattaaatgagggttccgagtgggcatctttcttttttattcagtaggaagttcaacattatgccttttattaagtatctatcaagctctaagccacgattaagagtaatttgctagatatttatggctttttaaaatcaattaatttatttttattgatacataatagctgtacaaacgtttgcagtacgtatgataatttaatacatttatataatcaaatcagagtaattgggatatccatcacctgaaatatttatctttacattagaaacaatcgaattgctgtcttctagctatttttaaatgtacaaactattaatgttaactatagtcacctccttgtctatcaaacaccaggtcttaacgtcttctatctaagtgaagagtgggcatctttctcttcatcctgatcctaatatargtttcactgttgtgatatcatcaagtcagatattggctgtgactttgagtcagatattctttaacatactaaaggacacgggtcctatttgactaatgttttagaagttggtattgaatgttattaaatgtctcttggacatccattgggatgatcatatgttcatttttcagacataaatgtgataagttatcttaatagatctcatttcctaatatataattatccttttgttcccaaaataggctctacttatttgttgtgtattatttttagaacatatgacttgctaatgtaatttttaggcttttgaagctaattttttcaagtgtcataaattcattattgttttgaaattttgtccaattttgacatcatagttatgtttataaaataatagtttaataagagagaaaatttcactgatttttttctgctctaaaaatgatttgttaaatgaaactttagaataattctgccatcacctctttattatgcacatagagatgagtcatgacacagataatctggaactgttgacaacttcccagattctttacaactttaatatgtattctttcactctatcagttgcaatatgtgtgaacgttcatctgatgcactgagtctgaggaaaattttgaccagtaacctttgtccactggaaaagagtctatgtagaattagatgttmattgtaagtaatcacagaagtgcaaattataaaaaagaaattttttgtacaaattaaaaagcaggaaaaggaataatagaatcctcttttaatgaggcatggagaagtccattctcaaaaacatggcttagtagtataagctggtttaagctttctgaagggcattttagcaaggcatcaaagaaaaattttccaatgaggacatcatttgtcccaggaattcctctcataagaaaatcactgatcatggcttcaaagatttcaccacaatgatgtttatcaaaacattataagggtgaaaaattagaaaaaacataaatgtgcccaaaaggggaatggttaaatacattatattctaatatattgtattagatattatattctaatatattgtattagatattatattctaatatattgtattagatagtgtatcatattagaaattagatattagaattagaaattagaaattagatattagatattgtatcataatattctaatatatgctttatatattagaatgatatatttaatatatcattctaatatatctaatatatattagaatgatatatttaatayattagatattagatatattagaataatataaataatatatctaatatatgttagatattagatattttgtatatactatatttatatataattatatattatatattagatatattatattatattaatatttaacatatattatacaaatatattattctaatatatttaatcaaaggaatttgagacagctgttataattaaggcagatacatattaaatgaaatcaatatactgtatgtcaacaatatatttgaagtggaaaagcagactgcacacccaccagttggcagtgattatttctggacttggggattagaggtaatttttttcttatctgtgtttcctgcatttctacaatgactctcttccaagggaatacagtcacaaaagtggactgggatcaactttactttacaatcttactttcttaycccaantatagataaactcacaataaggcttgtgtttttgatactcagacctggctatgcaaataaatatggggatgtatgaatacaacgggaagagtggctacagattgaagccagagttcatgaggaggcctgacaagcattttgatccatttactgaaggcatcgtagatgggatagtggcaaacactttgtctgttaaggtaggtataccccatcacaaaattgttcctaacaatagtgttgaatttatctacattgcataaagaagtggcttagtcattaaaaatttagtaactaggaaagattctactttcttcctacattttttttctctaaagatcaaatacacattaaaagttttcgtaaggggtccgtgtgttctcattgttcaattcccatctatgaatgcacacgggaaggggaacatcacactctggggactgttgtggggtggggggagcgggragggatagcattaggagatayacctaatgctaaatgacgagttaatgggtgcagcacaccagcatggcacatgtatacatatgtaactaacctgcacattgtgcgcatgtacmctaaaacttaaagtataataataataataataataataataataataataataataaaagttttggtagggtcgggcgcagtgactcacgcctgtaatcccagcactttgggaggccgaggcaggtggatcacgaggtcaggagatcgagaccatcctggctaacacggtgaaaccccgtctctactaaaaaatacaaaaaaaaaacaattagccgggcgtggtggcgggcgcctgtagtgccagctactcaagaggctgagacaggagaatggcgtgaacctgggaggtggagcttgcagagagcccagatcgcgccactgcactccagcctgggcgacagagcgagagagcgagactctgtctcaaaaaaaaaaaaaaaaaaaaaaaaaaaaagttttcataggccacatgaataagataaagcgactgaactttattcttaatgataaaaatctgactctaaatcaataaaatgagttggagagactcatcataagcaaacctcttttttggtgtaactaacctactatgaaatttacatgataattagtggcccatattggagagattttccggtctttttttccccgtttggttcttagaaaattagagacagaacattccctcaataaattatcaaatgttaaacaaaagctttcaarttactttaaatggtttttgaaaatcttccagagtattcagagattttaaaacacatattaatgatcattaaataaaagagttgctttattaaatatatatgtatatatacawgtatgtcataaatatataaaaatcatagatatatwcacatacatatgtatatctgaccctaaacaattctaaatttttttagtctttgaaattgattttatatcagatataattttttagctaccagaaaatatttttaatactatgaaaggaaaatcaattttttagaatacattttacatggattcttcatcgttaaagcttttcaaaaatattgtctgttttctgtttaactgaataactatagaactaagaaatttttttactggacataaatgtaattttttgattaaccttaaacaaaggcatttgaaaaactatgtaaaaagctttctataacagcttcactaatttctttctaccctaagcagttgagcacatttttaccwtaaaactttcgtcactttatatcaagggtttaaagaataaaatttcagtgaagtgtctcataattatatcttttgaaattacttcaagccacatgtataaagagttcaagttggcagaattagagtttattttaggaaagtattttcagaaaaggctgtttaattcctgtcaggtgtgataaagataaactcataagctccatgtactgatagaatgctacttttagaatccttgtcaattgttgttatagttcggttgaattaataatatttttgctttgcttgcagattcgtcttgttttgaatgtatttgtttgcttatttctttttttgtcttgaaaatcctactgtgacagtaagcaattataaaacaatgacacagaggcaggaaagtacattgagttgtgaaggggaaatagttgatccccagacaagtgtaacctgctgctcctgtccagaatggagacgctgctccagagctgtcagtctcccctgaatggacagttctcactgcagtagagtcctacctttgacattatagctagagccaagatacagatcataactttccaattatgcctttgttttcatcttctggcatagattttataatgccagaatggacttgtgagctcacatgatgttctaccgtcctatgttactgacgagagcattgtggttttggtgtcatgaatttagtttaggactctgctttggtcaaacatcttaaacatacaacatcttctgtgcatctgaattccaagtaggacttgcataacttagaagtttcaaacatgttttgaaatgcttgcttatttcatagacatagttctcacatagaacctcaagttaaacaaagagattgttgctagcaggtcccatgcactcaagccaaatagaacatacaggggaaatgagttgtcccagggcaaattcagagagccttcctgatgactttctctctgaattactcagaatttctgacaacatcagcatatagctgactttgactttactcagcctttgatagctattctcatgccaccattttgtctgatttctggcccagccataattctgtcccctttcacaatcttgagctcagattgtgagcccagccataatgctgtccccttttcacaatctggagctcagaaagttcttgaccagcaggcaattttcttgtaaccacataacccagattcaccaggtttgctctgtcagcacttgcttcctgctttccccttcctggtatacagcagaagcacatcttgtttgcctccgctaacctttatgacagctrgtggatagttcagattttgaaaatttgcatagaaacagaggcagacatggaagacatttataaatacgtaatattaaaaatctcttttaagtctataatatccattagttctgtagctagacaaagatggtgacaccttgtgagattaggggtaatgataaacttatcttgatggtttaaagtgaatacttgttcatttattcctcctacaatactgtgtcttattaattgactacttctaacctcaccattttcaatatccttctaccaacctgtgtttgtccattttcacactgctataaagaactacctgaaactgagcaatttataaagaaaagaggtttaattgactcacagttctgcatggctgaggaggcctcatgaaacttacaattatggtggaaagtgaaggggaagcaaagcacacctcacatgaagggagaagagagagagtgaggggggaactgccacacacttattaaaccatcagatcttgtgagaactcactatcatgagaacagcatgagagaaaccactcccataatccaatcaccctccccaaatatgtgaggattacaattcaacatgagatttgggtgaggacatagaaccaaaccatatcayaacccattaagtgaaagggaartcatatttctactcttgcttctattccattttgcttataattcaacatttgctgaagagcatttgtggctctttaaagtattctcttatgtctttgttatttgcatatcaaaattccttatggattgattgatttattgattttctagattatttcaggtcagtttctttctgataagaaagttggracttacgtggaagtagatatgtttggtttgcctgtggatacaagraggaaggcatttaagaccaaaacatcccaaggaaatgctgtgaatcctgtctgggaagaagaacctattgtgttcaaaaaggttggtcacatgttcttgatatgagttataactgcatttttcaggtgttttacactgagaaaataatgaaatggtgaattatttgttatttaatttgaaaatttacacacttataaagcaattaccttttgaaagccattctgaaaacccttcaagaattctgttaatcactggtttggattttcagaattgtattgtaaatcarttcattctagtatgcctcaaatggacggccataaaaacatatacatttaactcatatcatctgatagtacaaatgataaatgatacattttaattataactcaaagaagtagagtggaagtagggaataatatagtggctgagataaagaaaattcatatttcctttaaaaggaatattatttaaattccccaaaatctctagcctctgagagctggtcattcaatcttgtctgggttctatctaataaagttgaaacctttcacactcaactgggcccttctctttcttcaccaaaaagcaaatcttcacacatgcttatcatgtaaaggaagaaagtaggttcagtgggaagtagactttttagcctactctttgcttttttctggccaaaatatctacaaatccagtcttctgcaaagagaatagctatgcggaaactctctgtgctctgggatttttccatatgttaactgagtttaataataatgcttactatactgcttacttcttacagttattatgaatattccataagtaaatacattgaccacacttaagaaatatctagcacaatgaaaatattcaataaatgtgagtttgctgtttttgtaaacaatacatttttaaagagatagtcgacttcatgttcttgacataagatataactgcatattttagatgtttcacactgaggaaagaaatgagtagttgctctttgcttactgtgggaatttacaaatttataaagcaattgtattttgaaagctgtcctgaaagttattcttgtttttcagtggtggttgttttcactttttttgctttcactttgaagatgcaaaagtcatttgctttgaaaacataaacgacttccacaatggttgaactagtttacagtcccaccaacagtgtaaaagtgttcctatttctccacatcctctccagcacctgttgtttcctgactttttaatgattgccattctaactggtgtgagatggtatctcattgtggttttgatttgcatttctctgatggccagtgatggtgagcattttttcttagtgggtgcagcgtaccagcatggcacatgtatgcatatgtaactaacctgcacattgtgcacatgtacccaaaaacttaaaagtataataataataataaaaattaaaacacaaattaaaaaaaaagaaaacataaatgaaatattcacatggtgataaaaccactaaactctttttgttgaaagatagaacttttgtcatttccacattgagaatgttcatgtaaaaataaaacagcctatttttttaacaaatgcctcattaaggcaaggtgataaaacatagatgaagccctatctctggcaacccatgtcttctcctctgaaaatgaaatttatagggcaacatctcaactttttgtctaaagtagctaagtagaaacttctagttggatctgaaaagctggtcctggccaggcgcagtggctcatgcctctaatccgagcactttgggaggccaaggtggtggatcacctgaggtckggagttcgagaccagcctgaccaatatggtgaaatgctgtctctactaaaaaagtacaaaaattagtcaggtgtgggggcatgcacctgtagtcccagctacttggaaggctgagacaggagaatggcttgaacccagaggcggaggttgcagtgagccaagatcacgccactgcacttcagcctgggtracacagcaagactctatctcaaaaaaagaaagagaaaagaaaagctagtcctgattgaataatacctttctaattatttcttggaattgttcattcttataaccaggtgtgtccttaatgtcctttgtaggtggttcttcctactctggcctgtttgagaatagcagtttatgaagaaggaggtaaattcattggccaccgtatcttgccagtgcaagccattcggccaggtatgggtagtgtgctgagaaaccttttatcaaagttgcaaaraaaatcattactgcttaaaatattactagaaaatgacttaagaaactattttctgctttgtaattttgttatgtaacaagggcgatgagatttagttacatgtttttgtgacatgttgtagtattaatgttagtyaactctttcaacaataattatgtgtaacaaayaatctgaaaacttatatgcaaatatttatcttcgtgctcataggtctgtgggttggccgggtttggctaatctagcctgggctccgcagcatagctgtgcttcaggttctgggttgggtctatgtctgtcccacatgcgctcactctggggtccaggctgaagtggcagttgcttctacaatakggacttctcttggcagaacactggaatgtctaactctgcatgtgcattttaagcctctacctacaccaaattactaatatactgttgactaaagcagagcttaagcacaagtcaagaaatcacgtcaaggctgggcatggtggctcacgcctataatctcagcactttgggaggctgaggcaggaggatctcttgaggccagaagtttgaaaccagcctgagcaacagaatgagaccctgtctctacaaaaaataataataacaattttttaaaaaaagaagtcatgtcaagtataattctgttatgggggcaagtttggatcaataattcagtctatgacatgtgatttggaattatcttttgtgggaaaaatcatacggttggaaaggaaaaaatcacattgaatgttttcttgtctgatgagaaaaataatgccttatcattcataaatgttattaaaatgaaaaaagtgatttgtttttcatctaaagtaacctgaaatacatgctttcatcacatagatgcgcataattataactaacattggaaaggaaatatgtgctacacagcattmttctcaccttccaggctatcactatatctgtctaaggaatgaaaggaaccagcctctgacgctgcctgctgtctttgtctacatagaagtgaaagactatgtgccagacacatatgcaggtaaacaayttaactcaaataccactttactcaaaggggtatttctgtctgagtcaccatatatttttgggttagtgaaaggaaaactgaaccaaacaaagcaggagattctggcttcagaatcacccctactttcgtatgtatgtttagaggtaaattgcttgagccattgtgaatacattttaatttaacgtattttaattaaaatcacaacacctcagttttttgaatatttattcccttttagtcttattctcatgggcccagcacttaccaactcatgttatccattacaacaaatgtctaggtctgtacactgaatttgtcttccaccaattttagaatgctgattcttttcaygggtgacatcctaaatttaaggaattaaccaagaatcataagtgtaaatgcttatagtgccaagtagcttgggtgtaagacactggggagtagtggagaccatggtaagcttggggctgtccatccaaagctggcagccataactcattccagctaggcactgcccttcaaataactatattggcaaatcattgggttatcccaacagtccggaaagcaggctttttatgtaaaatgtctccatttatgaaacgtcatttgggccaaataggacaattgggtgggccattgccggaatggatgggaccttcaaaaagaaactaaggaatcaagaatattcagggatcctgagttgaagcctgtccagtttgactctcagaactaaactcttaatttctctcttcctgaagtttcaacagagtcctaacccttgtccatgttcaaagtgttggatagaggagtagatagttatatgggtagacagaagaatggaagatggataatgactgggtggatggatggatggatggatgggtgggtagatgggtgatgaatgaatgcatggactgatggtcagatagatgagtaagtagatgaatgatggataatcaatacttccaggacctttgatctaaaatatctcttccctatttagatgtcatcgaagctttatcaaacccaatccgatatgtgaacctgatggaacagagagctaagcaattggctgctttgacactggaagatgaagaagaagtaaagaaagaggtgagagggtgttttaattttacatatagcattaagcatgatcaccacacctacttgttggctttgcctaagtaatatcacataccttgggagaaggaatagcacattggaacaacactttcatgcagtttagcatcatgtcacagaacatctagatgattgacttaaatttttcacatttcattttcttttggcattctgtggataccacgagcatcttatcttgtgataaaattaaactgcacacatcttgctatttcagatgaaactttctacatgattccatgctaattaaaggtgatgarcgcatttaaaaaggaagataatcatcaaatcatttagggtttccctttrtctttaatgtagcatgcaggattttcaaagtgcttttctgatttttatagtacataaaatatttaacacaatacctggaaaatagtatgagtcataaagagtctactgttattattagatggtatatttatgtattataatgtgtgtcctgcaaataattgatatattattccaaattagatgtcacaatgcaaagcataattaaggaagggtctaaaaatagtagaaatgaagtttaaatttataaagcttctatgtagactggcagtctttttgcttttaaaaaaagtgaattataacttgattattaagggtgacactaatattaaaaatagtgataaaaatttgctattttcatattttattcagaggaaaaactcgagaaaaaagatagaaaatggagaactgtcartattgggggaaaaaaccttgaaaattgttttaataagtataactaatagttatccattaaatagtccatttaaatagtctattaaagttgacattgttaagtaatgtttttcttatttcgaaagcatcctcgatttattatagaaaatttaaaacgtaaaaatgacaaaagaaaacaacaaagaaatcaactgtaattcaaacatcccatccgctcagagatagccacattaaatgtggggtgtatacatatctagtctttttatgcacaattgttactctttcataaaatgggataatattcacagtctgtgttttaagtgaaaataaaagtattaagtatctcattgcccatgtcattaaatattcttctatgacatgacttttaataactcatagccttctatcatatagctccaccataatttaattactaagtccccaattattggatatttgcaatgctgcactattttattttatttgtgggtacatagtaggtatatatgttacggggtgcatttgatattctgatacagacatactgatttttgtacactgatttttaatcctgcaactttactgaatgttaatcagttctaatagttagttggtggagtcattaggtttttccaaatacaagatcatgttatctgcaaacaggaataatttgactttttccagtttggatgccctttattttattttcttgtccagttgctctagcttggatttccagtagtatgttgaataacagtggtgaaagtgagcatccttgtcttattccagatctcagaggaaaggctttcagtttttcttcattcagtttgatactagctgttgaactgttatatatggctttcattgtgttgatgtatgttacttctatacccaggtggggtttttttgagggtttttatcagaagggatgttgaattttatcaaatgctttttcaacatcaattgaaatgatcatatgggtttttttttccttcattctgttgatatgatgtatcacattgattgatttgcatatgttgaaccatccttgcatctctgggataaatcccacttgggagaatcatagctcagtaccttgyttgtggtgggcaacttctrtgttgcaattcatgctccagagmaccctgtgggatcagtctgagactggagtttgcctgaggccacatttcgacttatcttcttccctgtcttaacctgcttgcctcacctccctgcagttttttcctgagaccattctctcagttactcatgtgctcaacatgtgctcaagaatcctcatgtccacttctgcttctagggaaaccagcaatgctaagtagcttgctgttttataaataaatacaagaatgagttccctatctgaattaattcttaatcaaaattaagaatttaaatatttgaaaatagttacatctctcattctgatatttcttcagttataatagtgctttttctcttttccatggcctttaaaagattaagaaagactgttctatgagtttctcattttactcatatgaacatcagtatgaaattaatttctctttggaaatccaccaaaggttctcaaattcttttctctttttcctgctttacttaatagcatatttaataaactataattaaaggtaaagataatttacatagatacaaataaatcactattaatatcattcttctctaaatagaaaacaggacctattaggtacaatgcatattacctgagtggcaaagttatctgaataccaaacccctatgacacacctatatgacaaaccctcatgtgtacccctgaacctaaaataaaagctaaaaaaaaaagaaaacagaaatgtcctttttcaactggatgaattttattcygtaagaaatagaggttaaacaaaagcattttcaagtgaaattacatgtattttcagtatttagaggaaatactttttagattatcaactttaacccattagttagccattgtctctaaggaataagcacttgcttcaagagaacatttcaacactaccatatttcagcctactttttctattgtctgactcacatgttcttgtgagtgagctgaaatttatctaaaattgtttcaaatagctgggtgtgctgacacatgcctgtaatcccagctactcgggagcctgaggcaggggaattgcttgagtccaggagacagaggctgcaattaactatgaatgcactactataccctagcctgggccacagagaccatgtctcttaaaaataaaataaataaaataaaataaaattaaaataaaataaaataaaataaaataaaataaaataaaataaaaaaataaaattgtttgtaaatatttcctgattcagtgtatggccccgattcgatatagcaattgagctaaaggtctcataatggaacattttactaatggtgcttcagagatcatttctgtaatgactaggggaaaatgtcactctaaagaatgagagacataaggcctttgaggttgtagggctcttttcacaaattgatgtcctttgraaaccttatctttgcaccatcaaaaagttattttaggaggataaaatgtacaaaaatacagaagtagagttttaggtcaatcttatttttgtttttcttttcttaaaggtgatcagaaagcatttttagaaatgtataatattgtttaaatttggacagtatttggacatttttcagttttagaaaaaattttagaggcatggaatcacatggagtctatattggtctaatagagaaaatatgattttttttcctttgacatgtctaaactcttaactggcctcatttttacaactcaaggaaaaaaaatcatttgcccttaacatgtaatgctaggaaagaaaagtcatttcacactttgagcatcagtgtgtcttttttcttgtcttggaataatgtaagtttgtttgaatgatgccactgaaaataagtaactgtggttttctctaaagaaaattctatctaggacatggcaggcactgggacactgttttagcagcaaagacttttttagtatcatcattttaatgtgatgcttgtaaaggtcatttctatttgaacattaaaaatgtcattggactgcaaaatattaccagatgtttaatagtcctgtaaattatctttttagagtaatttataaaccaaatagataagaaagtggaatttcccccatgatttgaacaatagatatttatttcagataaggcaaaaatacattattcagattatattatacatatattatgtgtataatatatgtataatatttaggttatgtattatctgaataatggttggaagttaaggaataataaagattcgttattggatttattttgtctttgtaaattcagagtggtagattagtcaagttgtagagtaagtgcctaactgaatcctaacaaagtataacattcacagttaattcctttaaataaaaagtcacgtagaaaaatataaaaacatagtaaactaaagaaataaaattttaaaaccctctaattctgcaaatactggtaacatttttaatgtatatccttctagcatgtttcctatgtacatttttgtttgtttgttttttgagacagagtctcgctctgtcgtccaggctggagtgcagtggcatgatctcggctcactgcagcctcggcctcccgggttcaagcgattctcctgcctcagccacccaagtagccgggactacaggcacccaccaccatacctggctaatttttgtctttttagtagagacggggtttcaccatgttggctaggctcttctcaaactcctgacctcaggtgatccacctgccttggccttccaaagtgctgggattacaggtatgagccactgtgtctggtctctgtgcacattttttaaaataattttttaaatgttttacagaccaaataatgtaattacagagatgcctagtgaaatatcataacactttttttctatttttaaaatacctataaaaggaaaaagtaaatatccaatacatttattaggaaatattatgtgataatgtcataaatgcaatatttgaatatgacttttttaatgttagagaagtaaagaaaaaaataatgagcatttactgagtacttactgtatatctgacactatgttgagccctttattttatttttcttttctcaagacagggtctcaatatgttgcccaagctggtcttcaactcccagctcaagcaatcctcccacttctgcctcccaaagcactgagattacaggggtggttcaccatgcctggccatgaagcttttactgtattcactcacttaagtcttaaaacctccggatgtcctaattaccattatttccatttaacaaatgaagaaactaaggcactgaggagttaaattgcttgccctgtgccacacaattagtaaagaaaggagttaggatgaaaacccaggcaatctggttctgcaactcatgttccacatcagcacttctgcatgttamgtgtgaagaccagggcatcatgataaattgctgatcctggttcactggatctggggtagggcctgggactcagcatctctaataagcccccaagtgatgggatactgctggtccttggagcacagtttaacaagcatctccacmacacacacgcactacctctgtaacaaagctgtaattttctggtaacctttagcaaggatgggcccttcattcatctttctgacctccatagcaggttacctgaatgagtgagcacaggatataagacctttaccttaaayagtaacatcttttgattgaatttttagttgaatgtcaagaacttcccccctttaatcactggatgttgtcagaacttattyttcagaaagttaggtttatctttgtgggttctatttgattgatttgtgcattggctggccaaaatacatatccctcaacttggaagttacgaaagctgtattcatttgccaagcattcatttccatacttgggaaagttgtcctctaagacagagtacctgaaactacaaatcttacccagccctcaaggccaaaattgttcacaagaattcccaacatcgtctgtttcatcctgcaagtggaagtgtgtgagtggtcttcgtgtaatattgatgttgaaaaggaaaagttgtttggtaatactaaaagtttatttattccaaagggcctactttttgtattgtctgactcacatgttcttgtgagtgagctgaaattcatcaaaaattgtttgcaaatattagctgggtgtgctaacacatgcctgtagtcccagcttctcgggagcctgaggcaggagaatcgcctgagtctagaaggcagaggctgcaatgaactgtgaatgcactactgcaccctagcctgggcaacagagaccatgtctcttaaaaataaataaaataaaataaaataattggtaaatatttcctaattcagtgtatggccccaatttgattattttaataatgatatgaattccaccaataaaataatgtgacatcaaaaaaatccaaggtastgcttttataaggttacaatgttttgcccaaggccttggataccatttaattattcaaaacagaaacttgatatttcattcacaatataagaacttgacactaaaatcaaagatgaggtttacagcttattttggattctctttaaataaaattcttcctccttcaaatcttcctcctcaaataataaatttgcaagatattaatttatagaaacaatagtttatcaaaatccctgaactttaaagcatccaatacagtaaaaagaaaaggttttcctttaaatagtgatgctatctctttcatttctatactgtacagatttggcattcacaatgcactttcattggatgccttggataaaactgggtcctaactaggaaaaccatagtaatccccatttttagagaagggaacaattgctcattatggtagagtgatttggtgcctaatatcaacggccaatgagttgaagaactagggtctttttaaatatgtatcaagaaaagaccattcattcacttgaattgaaactggtcaatgattggttcaattcagctgcttttacgaatatcctccataaaaatttctaaaatttcaatggattctaatgaggggctttgggttcatctgcctaaaatagggatgagtacaataacttcaatatccatgtcatgtccaattataaaatcatggctcccaattaatgatgaagtttttcactttgctttagagcagggcttctcaagttttaatgtgcatacaggtgcaggaaatggggaggtgygggtcaaatgatacaaagcaggaaatgtgtaggatgaacaagtaaaaaaatctaatgtacagcrtgaggactataaktaacaatcatgtatcatagtcagaattttttctaaatgagtagattatagctgttcttgccacagggggacaaagcgggtaactatgtgagatgatggatatgtctatttgttcccttatagtaaccattttactgtacataggtatcttataacatcatgttgtatgccttgaatttacacaataaaatttatttttttcaacgtgcatacagatcacttgagaatcttgttacaatgcagattcagattcartaggtctggcacagatcacaaaacaccgcatattcaacaagcttccaggtgatgcttatggcccatggaccatatttggattagcagggctctcaaactttagcatgtaccagaatcacccagatggcttcctaaaacacagatcgatgggtgtcgtagccaaagtttctgattcagtaggtctggggcggactcaagaatttgcatctctaacaatctgcagtgaagctgatgctggtctggggaccacacattaaaaaccgctgctttgaagccctgcatctttctttcgcaagagtgtggctctccccagatgaaacccattaattccatccactctaaaatgacagcttaatcacagaaacctgggaagggctccaggagacacttttcctgggaattatccagaatttgtcccgcaagtgattgaccatagtccgtaccaaaygatttgacttaattaatctcaaagatatatttccacaaaattaacattaagagttgttggtctactttcctttaaaaagagaaatccatgatttctacctagcagccaagagttcattccttctgaattctttgtaaactgtatcaaaacacttctaataaattcaagttggtaggaacttttttatatacatatattaaagtttrtatatgtaacacatataaaagggtcagcagagctatgttcttttaccctttgatagcctgctgagtaacctgctgttattatgcattaaatacaaacttgttacagacagcagaaagcagcatcttcactcttttcattcattgatttattcattcattcaaatttgttttattttagcataacatttaggtagttctttactttcaggactttgccattaataatagagctatttattatgtactaacaggaaactaaatatgaattatgcattcattcaatattttttttttaaaaaaacccaactatgtgtcagtcactctgatggccattatatatgtaatgctgaggaaaatcagatgctctcatagcccttacaacttggaggaagagagtgacattataaaatttatacatctatgtgtaaaattgcagctgctactaatgttcaacaaaatgataccatgtgaatgctgttgactcatgtgagtgcttatatgatgacacacagccatgctgtgtcargattcacttgaacccatgctccagttaccgctggaagaacttgctggacattaactgtgcaaaacaccaaaagtactttacttggtgttaatgaagaagctcaaaaaactgaagtcaacagatgaatttatccagctcattaaagctgtctcttgcttctaactcaccctggtagactcttcaaaattaggagttttgacatatttcattatgaaaaattctaagctaacattgaaagagctgtacaaggaacacctatatatcagccacccggattccataattaaaattttgatgctttcacttgatcacatataaatccctctatccatttatctatccatcttggttcaataggatgcattttaaagtaggttgcaaacatcagtatacttcactcctaaacgtttgggagtgcatacagcaggacaaagtttgttaaagtgattctgaatttcttagaaatatgaggcagatacattatctaatttcattcaactaatagaaatttaaggtacaaattgtgctcatgtttgaagaagctcctccttaagggaaaggctggctctaacaaagctactttctgacaatatttgtcctgagtagggtggatttctgcatgatgaaattatgagactcacccgtaatacgctggaaaaactgatggccttacctcttacccatgtggtgcccatccaaagcaagatgctgtcataaggtaaaaagaactgcactcttttttttttttttttttttgagacggagtcttgctcagttgcccaggctggagtgcagaggcgcgatctcggctcactgcaagctccgcctcccgggttcacgccattctcctgggtcagcctcctgagtagctgggactacaggcgcccaccaccaagcccggctaatttttttttttttttgtagttttagtagagacgggatttcaccatgttagccaggatggtctcgatctcctgacctcgggatccacccgcctcggcctcccaaagtgctgggattacaggcatgagccaccgcgcccggccggaactgcactcttcagatgactcagacaaggaaagcatgatccaacacctctaatagcccagtaatacatatgatatttgaaaggcccttcacttaccatgttaaccattcagttaaatcctccaaatcctaattctctgctgctcaaccatcagatccaaactttcaatgcccaggacggaaatcttttcaaccagcacatcaaatggcttttcctccttctatagaacttataaaaatgatcttttcagttaccattttactggtccatctgtattctattttcagtgcacttctgttcattttggaattaggaagcgtacaaattctttttatatttaattttaacattcaagttaggcatattttgaagaaaaagatattgcaatgattgcatttgtccactagagggcaggaacttacttctgtggttcattctgcactttttttttcactacccacctaagaaaaatctagtcaatgcgactgaagtactaccaccttctgaaycttctttccttgataattgcttaattggaatttaaatctttgaatcaaattaagaaactagacattcctagtttctgtttctatcacaatttccagtaccagatttttattcactcataaaaacaaataatgggggagaaataaaatattgacttctgctgattctcttgagtgggataaggaatttggtttttgcactttggcttacagatccatatagtggaattattcgatctttcaattataatatcagaaagttcaattttagtattgtactcctataggtgctttttttcatttttcagccattgttttgcttaacttatttaactttgtatgtacggatgcctttttagtgcaacagggtagttctttgagaattatgtttacatgtagacatctctatctcagcagcaagttaagttattattacggttccttaagctgctgttatcatagagtggactgctgtaatagaaaaatttagtctttagcatatagtccatattcaaatacttgttcacagtttcctgtgtgacctctggcaagttacatgacttttaataaagtttttagtaaagacttttaataacacctccgattattttgctttattatggtactgtgcgtgttgcctacactgactggctgtgaaaaagctgttgtatataacagtgtctaacccaggatgatctacagccacttctaattgcagtctccattcggtaaatggaatcaattaaaatgtgtacctatgggctgggcagggtggctcatgcctgtaatccagcactttgggagaccgaggcaggtggatcacttgaggtcaggagttcgagaccagcctggctaacatggtgaaaccccgtctctactaaaaatacaaaaattagctgggcatggtggtgcatgcctgtaattccagctactcgggaggctgaggcaggagaatcgcttgaacccaggaggtggaggttgcaatgagccaaaattgcactactgcactccagcctgggtgacagagtgagactccatctcaaaaaaaaaaaaaaaagtgtctacagcccttagcaaaaaagtttaaacattagtcacatgtatatgttatagaatcttacttaactcaggcatcccaaccagtactggtctgtagcttattaggacctggcccgcacagcaggaagtaagcagcaggtgggcaagcaagcaaagcttcatccccatcactcaaattactccctgagctctgcctcctgttagatcagtagtggcattagattcccataggactgtgaaccctattgtgaactgcacatgtgaaaaatctaggttgtgggctccttatgaaaatctaatgcatgatgacctgttactgtttcccatcacccccaaatgggaccatctagttgcaagaaaacaagctcagggctctcactgattctacattatggtgagttgtataattatttcattatatagtacaatgtaacaataataatagaaataaagtgcacaatacatgtaatgcacttgagtcatactgaaaccatcccctcaataacctcctctccccctggtccatgaaaaaattatcttccatgaaactggtccttggtgccagaaaggctggggaccactgacttaacttgtatataacatctgtctccagaaaatcatgaggtccctgacaagagtcagactatgcaaggatctccaaattccttagcccagtgtttaatgtcctcattactgaccctcttctctatgcctttgcttggccactggggcgagaaggtaagaagctcctggcccaccgagttcccagcacagtcctgtcacttcagcattactaaggatgcatrgctcactcttgcaccatctcagaattccaggcaaactctgctcctcctggcagagggtacagattggcaacttctgggccaaatgcagtctgaagatgtgctctgtttgtcttttcagtgattggaaactgggagagttcactcaaaactttcatttttccatttttctcaaaacctgggtggaaataggctaaaaatgaacagcagccactgccccatttacaggctgtctctctcctgctctggacatgacctcactttgccctattgcattaaatctacttcactggtttctatcatttccactaactgcctattactctacagtgtgaatagtatccttaggggttgtgtcccaagagtgacacagtccactctacatggagacatcaccaggtgtgacccctggactaagcatttctctaaagcctacttcaaagtccagcaccaacccttggtgcccactttatccccgactgcaaccataaagtatttgcctgaatgtttacttaacatctatctgctttttaaaaatgtctttgattttatatagtacgtccctttttggaaggtggaggctttgtctcacatgcccttgataagcagagatttattttttcctttatttgactcaaattgacaatcgaacttggtttcccaagggcatacagctacatggagtatctgaaaacctaatgcaaatctaaaaataaacttgttggatccagtttgaatgcacctccagtctaacacctcaagacactaattttagttgccaaaaaaaaaaaaaaagccaccattattactttcacagaagctggttttccctaacttccattctttcctccatcaaaattttctttttctctatcctttttcagagggctaattttagtgagctgtcacattgggaagaatctggttcattccccacatggttttagaaaccaacttggatataatgggraaggtcagatccccacggaayagggacatcttcctacctgctttctaaagcagctgagtttggtaaccatgggcaccctcttcagctgggaggccagsaaagygttacccctgctgtatttaagccaaagarccacccactgtgggtgtataggtcccatgtagtcaaatctagtttttcaagggaagtaagaaacccattgtttcagtataagatcaccttaattaaaagatttgacaacactggttgagccaaagaaaatgcatccatgtactccattgggaccatgactttccagtttgcaatgtcttgctgaacaacacatacacaatcctttccctttgcatataattctagggagaatttttctgatggatgtaactaaatagtgtgaccatactggcacttacccatcagaagtagtcatttttcaaaagaaagattctgccatagtgagctatacaggctgccccggttacttgtttagtctcctgtctcccctaactgatgtccagccactgctactaagggctcttccagcattgagtagggtgtagtaaacaagcagggatgatttgttgaattaaaataagttctgccatcacttaatgcagttttggaagatggtttaaagatgatttgggaaacagattaaaagccactggtgacaatcagtgtcactattttcactcttatcttactttttataagaaagttattataggtcaatttttcatctgtaatcacatgccaaaatgtcacaatgttaggctccaaaagacttctggaaaaatatatttcctaatgtatttttaaaatgtgctacaaagtagaacattgggatagcctcattgtcagtaaaacctgccagggacttggaaggcaattctgataaagagttacagagaatttagcatattgaaaagcaacattaaaagagtatgtaggcaattattttataaggatcagcatttattcaacaaayatttttaaactgtttactgtgtataaggtatgtggaattagctgctggagggtgtcgaatgaagattttacgtttcaatgcatttattattattattcattggtagtattccacaagcttaaaggttttatttgttttatgtcaacataaataacaaacagatgctctctaaaagaaaatggtattatttaagaatagggcatactaaattatgtgcttagtcagggagggaaggaagacaaaggtttgtaaaggataaatgaggagggttacataattgttttcagatgattagccttggctacaaggatcaataacaagagtgacctcagtctgacgttggacagggagttgctaggcaggtgtcctcacagaagtattttttgtgtaaagttgctatggcctttgtacaaggtgatggcttttgcagagtcttttgtgagagtttttcttatcaggcatttatgagtgagaaccttctctttatgacattccctggctctttttgtcagggttttttgggtttttgtgggtgttgttgttgttttaatataagggactccatttagattctgacaactttcacattatttaacatccacatatttactctgtgccagaaacaattctaagtactttataagtattaacttatttaatcatctaaacaatctaacaagataatattatgatccccagtaaacacctgtcttcatctataaggataaagaaattgaagcacagagagttaagtgaactgcccaaaatcacactgctggtaaattgcagggccagaatctgaacccaggcaagctgtgctccaaaatgtgtgttcttatccatcacatcgattagctcattctgtaaaacaaccccaaacttggcagcttataacatcaactagttattatttttcatgcattatctggtcagctgggcaggtctgcagatccagaccagactcatagactcagctcatctcagccgggttcactcaagtgtatgtgctcagctggggactggctggtccaggacatccttgaccaggatgactcagctctcttccagaagagctggatgacagaccaggatgactcagacctctcatcctccattgctataataggaccctgagaaacagtggaaaaatttgcaagggtcttttgtatcaagtttgctattctctgattaaccaaagcaaatcacatggtctggtccagagtcagtgtggaagggcaccaccaacgggcwtagacataggttggtgtaaaaattggagactttaatacaattaacctcccatagtcatggctcaacactatgctgttttaaccctgctttccagggagtatcaaatttgatatttccaactccaaaagaattgtgaagatgctrtaaaatgtagccttgttggtttaggaaggcaagaaaagaataaaaagaaatgtggaaaatgaaaggatatttataattttaggctgatcctggagaaacaccatcagaggctccaagtgaagcragaacgactccagcagaaaatggggtgaatcacactacaaccctgacacccaagccaccctcccaggctctccacagccagccagctccaggtaagccatctggaaagagctggacaacatgagcaagatcctccagttcattagtgccactgacggaggcgctgtgatgtgggtagctaaagcatcaagtggggaaagatgtgtggacttaggaggagctccgtcaatgtgcaattaatgaatgaaagccagaagagagtcatatgtgctcatctggctctacagataacttatgaaaccacaacaaaaaaaatcacccagatttccggtgtcctttttcagtgatgagttatgamccatctgctggcacagtttgagaagaattctccaagcagcttataaacaaccatgccttagaagtgcattcttagtcytgcttcattaattctgtgccaagggctcctttccctctttctccaactttcttttcaacatctttgagtgtctgccctgtgctggacacattgctaagcttttcatatggatcatttcaattccccccataccaggcccaagagtagattctattattgtccccattgtgcagatgaataagctgccattttcaggtgataaagtacttattgaaggccacagtgccagggaagagtgaccttaggcctgatgcagttcccaatgatactaacattcttgcttttagctcctatattacagccaaagccacactcttgtctcatttctcaaaatgaataaatgaataaataaataaataaataaataaaataaaaatcctttgatttctacgcagctaactttgacatttaatcttatgcagctttgtgtaactattccttgtgtgtatgtcctgtttaccccagtagatgggaggcttcctaggtagacttcaatttgatgcctcctctgtacatcacacagtgctggggaatagcatgtacctgataatttcttgttgaattggttaataaagtaaacaaaagggagcagaatttccttccatgaaggtgtggaaaggagctcctttctttgtcatactagatcagggtgccagtagatccagatcttttaagggtatttctcatgggagagaaagagaattaaaaaaaaaaaaaccaattatatttaatttgtatcagacacgcttgaactgctttttaaaaggttgctggccaggcatggtggctcatgcccgtaatcccagtactttggaaggttgaggcaggtggatcacttgaggtcagcagttcaggaccaacctggccaacatggtgaaacccccatcgctactaaaaatacataagttagcctggcatggtagtgcatgcctgtagttccagcaactcaggaggctgaggcaggagaattgcttgaacccaggaggcggaggtgcagtaagctgagatcgcaccactgcactccagcctgagtgacagagcgaggctccatctcaaaaagaaaaaaaaaaagttgccaaagtcaataatagtaagaagatgacgttataaacaagaagtaaattttcaaataaagagttttatataccaaatacaaacatcttgaatgcttctgaaatataaatccatcatttaaatgtgtgagtaaatagtcatgtgttcctgaaagtaaaagagaatttagcattttcacatttaatttttttaacttgatattttggaataattgaacttacagaaaatattttttaaatggcacagaatacattgcaaaaataacctcttcttcccctaaagttaacatctcacgggatcatggggcaatcatcaaaaccaggaaagtaacattggcatgatactctgacctaaactgcacamtttatttggactaacctgctttctacagtaatgtccttttactgttcaagattccaacgcaggatcccaaattgtattttattgtcatgattctttagtctcctttaatctatggcagtcccacagtctttcctgtctttcataaccttggtactttggaagaactctggtcagttattttgttgaacatccctcagtctgggttggtccgatgtttccccatgattaggttgagggcatgcattttgacaagagcaccatgcaagtgatactcgcctttctcagtgcatcacatcatggatatatgatgttgctgggtctcatcactgatgatatgggatcacttggttaaggtggtttctccactgaaagttattattttcccctcttagatatattgggagagctactttgagactatgcaaatatcctgttcttccttaaacttttgcttactgatttttaacattcaccaatggatctttcctgtaacagttattactgcctagtggtcaacatttgacttttatttttattttactttattttattttgagacagagtttggctcttgttgcccaggctggagtgcaatggtgtgatctcagctcactgcaacctctgcctcctgggttcaagcgattctcctgcctcagcctcccaagtagctgggattacaggcgtgcaccatcacacccggctaattttatatttttagtagagacggggtttcgccatgttggtcaggctggtgtcgagctcctgacctcagctgatccatctaccttggcctcccagcgtttgacttttaaaaggtcacttgtcattcctgatttagccagaagatggcgatagcattgcctaaactgaatttgttccaagtggatgtcttttctcttttctctcgttataaatggggcatataatatcacatttttttttttttttttttttttggagacagactttcactcaatctgtcacatagggtggagtgcagtggcatgatctcagtccactgcaaactccacctcctggcttcaagtgattcttctgcttcagccaaccaggtagctgggattacaagtacccgccaccatgctccgctaatttttgtatttttagtagagacagggtttcaccatattgccaggctggtcttgaactcctgacctcaagtgatccgcctgcctcggcctcccaaagtgccggkattacaggaatgagccactgcacctggcctaatgttacatttaattaggtttgtctcaaagctgcaaatgaagactttttaagaataatttttataaagaattttctcacacaatttgtcatttctctgaaaagagatttagattcaaggcccaaatatgtttgtttgtttacaggaagaataaaatttaaaaagttgaagaggytatttattttatcttttatattacaggttctgtaaaggcacctgccaaaacagaagatcttattcagagtgtcttaacaggtaaatgccaccctttccccccatggaattaagcagctcagtgttacacagtggaagtatttagaggagaggmaatttccrttcatatctgaaaaacaacatcattaatatttcttcttctaaaaaatctagagacatayacttttagtttagtctacatgatatgatataatcacagagaagtaaccatactttgtagctagaaccctactggcataaaaataatgtagtttcacaagatagctatttcagcatcaaagaatagtttcatgctggaaatgtaacccagtgaacaagaatgcctgtcttcccaaattgccaataataaactatattttagatatgcagaatatgatccatttgtgagcataaaatgcacagtgtttaagaactgtgatacagtttggagttattttatatttggttagtcacataaactagtggaactaaaattggtacaagctttgtgcagtacaattagcagtatgtagtggaatcttaaaaatgtttataatacttggttcaatatacaacagaaatgtacacacacgttcaccaaaagcagcaccactggtaagggccaaatctagaaacaacccaatgtccatcagctgtaaggtaggtaaataaattgtgataaattcctagcatggaacaggaggcaactgcaggaataaataaactcaagtcacacacaacatggataaaactcaagcataatgttgaggaaaaaagtcagacacaaaagaacatattctgtaggattccatatacaccaacttcaaagacaaaactaatctgtgctgtagaaacctggatttggattatacttggtgggagacaggaaccaaaaaggaaggcttctgggatgctggccaaattctaactttgacctaagtgatggatattgaagcacattgactttgggaaaatttacaaggctatacttttatgatttatgcactttgatgcgtatatttgcatttcatcaagaaatgcataaaatatgcgtagaaaaattayttgaggaaagtattaaaagaaaacaaaacatggtttggttttgttttgtttttgagacaaagtctcactctgccacccaggctggaacacagtggtacaatctcggctgaccgcaacctccacctcccgggttcaagcaattctcctgcctcagcctcccaaatagctaggattacaagcacgtgccaccacacccggctaattttgtatttttagtagagacggtgattctccacgttggccaggctggtctcgaactcctgacctcaggtgatccacccgctatttttagtagagacggtgattcgccacgttggccaggctggtctcgaactcctgacctcaggtgatccacccgcctcggcctcccaaagttttgggattacaggcgtgagccactgtgcccctcccaacaaaacatgtttttaaaagatttagttctaggctgggtgtggtggctcacgcctgtaatcccagtacctggggaggccaaggggggggcggatcacctgaggtcgggagttcgagaccagcctgaccaacatggagaaaccccatctctactaaatattacaaaattaaccgctgtggtggcgcgcacctataatcccagctactcaggaagctgaggcaggaaattcgcttgaacccaggaggcggaggttgccgtgagccaaggttgcgccattgcactccagcctgggcaacaagcgcgaaactctgtctcaaaaaaagaaagatttagtttcatgggaaacaacaccatattaatgcatacaacaagagacagcagtgttcctagaatgttgtttaaaataacgtaaatgaatggacaaaaggcaatggtctgtaccaatacattagctgtgattatatcttggtggcttatttataaatgatatttgtgtctttatataagtgagcattacctttatacttaagagcatagtctaaggaacagcctctctcatctacagactttttaaaaataatagtttatgtggatttatttctaatcgtaggttagaacwwctagagccttatttccaaactgcctatagctgatatgctgtaaaccacttttaaagaaatagaattgcatctgcctccaagaatgcagcaattccttgggattataaattcttaatgtaataatttattatgcaaccataatgagtcaatttgggcctgaaggaaaccattaaataaatgtacctggttttctccatggcctcattctcaaaagagatcgaatgtcaggagaatagacacagtataagaaaaggaaacatatttctattgcttaaagaccttaacatttaataacataacttattattctagtctcaatgtttattcactagacatcttattttctattcaggtctcttgttattcacagcatatattatttctgaatctcttgatagtttcaaatatttatggtaacattttttgttcccagaagcaggacattcaattcaaaccatggaaacatgtgaactatgacttgatctaggtccatataaatgataattcactggagttaagataccatcagttgtaaagcatcctacgttcatgtattgctaaaaaagaaaagcactgaccaaccatcataccccaccaaccataagatgcatcttgatttcggaaatgttaacatattttttaaatgcacattctagaattgattgaatatatcagtaaaatacagattagttttgttttgttttgagacggagtctcaccctgtcgcccaggctgcagagcaatgatgtgatcgcggctcattgaaacctccgtctcccgggttcaagtgattctcctgcctcagcctcccgagtrgctgggattacaggtgcctgccaccacacctggctaatttttgcatttttatttatttatttatttatttagagacaagagtctaactctgccacccaggctggagtgcagtggcacaatcttggctcactgcaacctctgcttcccaggttcaagcaattctcctgcctcagcctctcgagcagctgggattataggcatgtgccaccatgcccagctaatttttgtgtttttagtagagacaggagttttgccatgttggccaggctggtctcgaactcctgacctcagatatccacccaccttggcctcccaaagtgctggacttacaggcatgcgccaccacacctggcctaatttttgtatttttagtagagatggggtttcaccatgttggccaggctagtctcgaattcctgacctcaggtgatcctgcctcggcctcccaaagtgctgggattacaggcatgagccaatgcacttggcccagaatgttttaaggtcagactctatcacattcaaagttttctcagcatgggataaaaaaatcagccaggcatggtgactcatgcctggaaatcccagcactttgggaagccgaggagggcagatcacttgaggctgggagtttgagaccaggctggccaacatggcgaaaccccgtctccataaaaaatagaaaataattatccgggcatgttggtgcatgcttgtaatcccagctacttgggaggctgagacatgagaatcacytgaacccgcgaggtggaggttgcagtgagctgagatcacgccactgcactccagcctgcgcaacagagcaagactctgtctcaaaaaagaaaataataatcataatcataataatatagtaaagtgggctgctagtaagcctctggtgactttgtgcaaattatattaaggtatcttccctcaagacactttactgctatatgcttttatgataaatgtaccagcttatgatgtttatactgtaaatgataccttttagaaatgrtgttgtagaacctgcacagttattttctaagcctccacaggcacagtgccagaaactgagttaaatactttccatgagttcttttatttcatcatcttaacaaccctataaagttatagaagtattataatccttatagcaatgctgttggtgccctgcccagattccttgtacagctggtgcacccgtctcctggctggtggtgagggttggctgttaacagytcataacttctccttctctgcaaaattgccctcaaccaaaaggaagccccctctccagatggttatgcctccctgcactgaatgttccaaatatgcaagaagcttgccttcttgcctcaagatgagaccagctcagtggtacaactcacactccagcacttccccatgggatcaggcagagaccagactccatccttctgagaccacacccttgctcagctccttccccagccccgtctgctttcctggctcccctactctgagartccctcagtaaatcacgtgcacctgaatccccatcttgcattctgcttctagggaacccaaactaaaaatatatgtattcgaatgaagcaattgggtctctgagaagtttagtaacatagtctcaaagttagcaagtgatagagccagactggaacccaggtagagctgacatcaagctttgctcttaaactctagctgggcaagatcaaccatttcttcctaagaaggtagccgctcttctttccatctggatgttcagccctcccattcccttagctttcatattcatttgttgcagaagtggaagcacagaccatcgaagaactaaagcaacagaaatcgtttgtgaaacttcaaaagaaacactacaaagaaatgaaagacctggttaagagacaccacaagaaaaccactgaccttatcaaagarcacactaccaagtataatgaaattcagaatgactacttgagaaggagagccgctttggaaaagtccgccaaaaaggacagtaagaaaaagtaagttcaatgaatatttttagttggtttcatagcatgaagagttgttaacatggatttttaatgttttatatcatatttttggacctgtaccatggcaagaaaaccacctaacctccrttctccatagcttttgtggcaccttagcccagatttgcttgtgaattgaatttttttatttaaccaaattctgagaataaatatgcaggaagtcctcctgtgagtctagcctgcgatcccaattccagttaactaacttcctatattacagctgccaatctcatgggtatgagactttgcctggagtacctagaacctagttggagaggcagctgatttttttttttgagacagagtcttgccctgtcacccagactggagtgcagtgacatcatctcggctcactgcaacttctgtctccagagtttaagtgattcttgtgcctcagcctcccaagaagctgggattacgccactacgcctggcgaatttttgtatttttagtagagatggggtttcaccaggttgcccagctggtcttgaactcctggcctcaagcgatctgcctgcctcggcctcccaaagtgctgggattacaggcatgagccaccatgcctgcccacaactggtcttatagaaaagagaagcttactatcctttgctaccctgtctgaaatccataatgccctacacaggtgactctaatttgggcctgggttcccacagccccatatacccaaaccttgatgatgagaagcatctctcacacattcacttaattaatattttttgagtgcctactgtgccctggggacacagcaataaacatgacctacccaatcatctcaaatagtaacatggtaatgtgggaaacataaataataaacaacaaacacacagcatcatctcaggctgtgatgaggactatcaaggaaagaaagaaacaggaccatggggtagagaatgactggagataggagatcccttctgacatgttgatctgcaataaggtggcacagaaagaataaagcctggtcagctatggaaagaactagggagacttactccaggctgaggaaacagcaagtgcaaaggccctcaggcaggaaaaaaatgtgcttgtgccaggaacagtaaagctggcaaagtgggtgaaacattgtaaaccatgagaggagtgaaacaggatgagatcagagaaacaggagggaatcccactgctaggttctttagagctrgagcaagcaacagttcaaaatgtatcgaacgtgcaataagattctactgaagaaagaaattgatatggcgaaatttgagagtctcagagcaatgactctagctgctgtgtggaagagggaccctcaagctgtgcatctcaaatggacatgagtcactggggatcttgttagktgcaggttctgctccatgtctgaattggggcctgagcagcaccaggtgatgctgattctgcagttccatggacaacactctgagtagtgaagatcaaggactcagagtgaaagcaggagaccagttaggaaactttttcatgagtccagctgagtaatgatggtggtttggtctaggatgacgctggtagacatggagagaaggggatgaattcttgatttgttttaaaaagatcgtaaaatatggggtcagaggcctggaagagagaagcctgcttgtatgtctctgcaattcccaggtgtcctttagagaatgaaactcatgctgttacccacaccaaatgtgttcatgaaactccattatctagcctagatcagtgcatctcaaatttcagtgtgcatgtgaatcacttgcagcatttgctaaacacagaccctcgggacctgaccctagagtttctgcctcaggggcctccttcggtagggactgagcttctgagcttctaacgagctcctaaggtttgctgatgctgctggtccacagactttccactgatgggccctggtctataatcattcaggagcatcctagaaattgaagggtggctgaaaggctttctttggtctaatccctgcctcccttcccagctgccatctcccagcacttcatatgaaaacctgtactttctsccgagttcccaccatgatgagatagggcagttaggattctctgggctcagggcccttcttcaattgcaagactcttgtgtgaacaatgcagacgctgcctctaaactccaacaaagacctgcttccaaatgtgaggwtgccgtgtggatttcagagtgtcacccgctctcagaaccccacatgtggactgcgcatcatagcttatcatgggactttgtggacacagggtctgrcggaccacagggggcttcctctcttgaaccctgtcgagggctgttcccagttctggaatagcatttcattgagtgtcaacaaagtactgggcatatgtgtcatatcagtttcctaggattgctgtaaaaagtacagcaaactggatggcttaaaacaataaaaatgtattttctcacagttttggaggctaggaattcaaaatcaaggtgttggctgggcgcaatggctcactcctgtaatcccagcactttgggaggctaaggtgggaggatcacttgagaccagcctgggcaacatggtgaaaccccayctctactaaaaatatgaaaattagccaggcatggtggcacacacctgtaatcccagctacttgggaggctgaggtaggaggattgcttgaaccaggagatggaggttgcagtgagccgagatggtgccactgcactccagcctgggcaacagagaaggactctgtctcaagacaaaacaaaacaaaacaaaaaaacaaaatcaaggtgttagtggactatgcgctctctgaaaagtctaggggaagaaacttttttttttgtttcttctaacttctggtggttgctggcaatctttggcattccttggctgacagacatatcactccagtctctacctccattatcacatgaattctccctgcgtaggtgtgtcttggtccaaatttccctcttctaatgacagacaccaggcattagattcaggtccaccctaatccaccatgacctcattctattacatttgcaacaacctctttccaaattagatcacaggctgaggttctgggcagaacctgaagtttaccgggatgttatttaacccagtacatgtgctaatcacttctatgtactattccatatatttctcacagcagcactgtgaagtaagtacaggcatcacccacattggataagagaggacctaaaactcattgaggccaagtaacctggccaggggcacatgcaacacacaaggccatagtgacagtgaggtcatggcgtggtgccccctgagatactacttgtgtcagatgacatagcagatctggaatctgcatctctgtagacctgtgactgcttctggtccgtatacttataatcttctatctctatacaacaaaacaaacagatgcatgaaataaatatgcccaaataaattccctcgttaactatccctaatgttaggagatttctcttctaaatttagattcctgaaatttctttgaatatcttttgcaggtatatagtatgaacttcttgacaataaataatgttttgcaacatgaagttctctaatcaacagcattaatttttacataaaaatcttttcttcaaagttgaataattagggaaatggaaataaatgcagtggatttaaattttgttgctatcttttgaggtcacagacagttcttgtcttcctcagggcttatttagctgtcaagaatatttttaatttcagatatttagtgagcattaacagagcgttgtgtaagacattgctcttaagtatctttaaacatcaactcataacatttttaaaataaaaattaacattttatttttaaaataaaatgttatttgtggttttaaaaaaaagtgtatcgtttagaagacataactttcaaaagcaaaagtatcccttagttctatttctatatatatatatagcattttaatgaattgtagcatcaaragaagtgaaaaaaagccttttaagtttaaattattgctccacttaattttctatactatagtatataaattactcttatcagatagcctatttttcatatgttggctaaccaatggacaacgtattgccaaagataatccaacgaccttcacagctctaggaaatcttatgtagaattggttgtacatttactgaaaacttttttggaatcattgtcatcagctgtctcagtaaagattatctcaaaagcttgactgataataattgccactgagaaataaaatttcattctttaactgaaaactttattaattaccctgaaactatgtaagtatgtaagtgacctgtcaatgagcaaagtataagacatattacatccttcctttactgaataatcttcttttgatgccaagttatagagataagatgcattttttagatttatattgtgacatatgatttaacacatgcttaaattgaaagcactatcaaaacctaatacttgggctttaaaaagtaataaaatcatctcttttttttttgttttttgtttttgagatggagtctcactctgtcatccaggctggagtgcagtggtgcgatctcggctcactgcaagctccgcctcccgggttcatgccattctcctgcctcagcctcctgagtagctgggactataggcgcccrccaccacgcccagctaattttttgtatttttagtagagacggggtttcactgtgttagccaggatggcctcgatctcctgacctcgtgatccgcccacctcggcctcccaaagtgctgggattacaggcgtgagccaccacgcccagccaaaatcatcatttcttaagcctggaggatccttaaaggccatctaggtgatatttgtcactttttcaaggaggaagctgaaagctaaaggtattaccatttacctgtagttacacagccagttcaagcaaagcttggcctaaaacttctcctgaatttctgctttagtcttatgtactatgaaccccaaaaatctgagacagttaatttagcaagtttatttagtaagttcatttttccaaggttcaggacrtgcgcctgtgayagcctcaggaggtccagatgacatgtgcccaaggtgttcagagcagtttgtttttatacattctagggagacatgagacatcactcaacctatgcaagatgaacactggttctatctggaaaggcgggacaactcgaagcaaaggcaggaagatgggaagccgggagggggtttccaggtcataggtagataagagacaaatggttgcattcttctgagtttctgattagcctcttggaaggagacaatcagatatgcatttatctcagtgagcagaggcatgactttgaatagaatgggaggcaggttggccctaaaccattcccatcttgacttttccctttagcttagtgatttggggccccaagatttattttcctttcactgtacatatttgtttattcatttttgtatttacttgtaagtcatatcctgcaaacttccagtagaatattgaaggtaacatcatagaagatttgtatgtaaaaatcccatgaaaatagaaagagaaacaacacacatgcgtagactaagctttggacaaattatctagacctgctgcccaatacaggagccactagctacctaccagtggctcttgagtccttgaaatattgctcgtgagatgtgttataactacaaaatacacaycagatatctaagacttcacttttttaaaaaagaatgtaaaatagctacaacatatctgttgattttaattacatgttgaaatgatattttggatatattaagttaaataaaatatattattaaaattaatttcactcacttatttttactttttaaagtgactactaatagtttgaaattacatatgtgaagggaatcacatatgtggttctcattctgtttctaccagacagcgccagccatttaatgtcatctctgtccttgaacactgaattcagctcttagcttctgagaaaaggagtatgggtttgataattctcctcatctgattaaaggaaacttgctgactcttccaagagagacaagcgttttcctagtattaaattgccagagatttaatttcatggatcttatacaagcagcagaggggataatgccttcaactttgtttttatagaagatgcagagacgttgttcacttgtttttttcttgtgttgtcctttaaaacaaaacaaaaccaaaaaatcccttagtacatagtatctaaagatacgtcatgaggagcttttcttcaagtggcaaagccagtgggtctgattatgtctacctgtcttccatctctcttgatatgcaataaaatcctgaaaacacctcagataaatgaatggatgggcattatgtacattgaatttgtttccttccttccttcgttccttccttccttcgttccttccttccttccttcctttcgacagggtcttgctcttttgctcaggctggagtgcagtggcatgatcacaactcactgcagtctcgacctcctgggctcaatcaatcctcctgccacagactcccgggtagctggaactagtcgcatgccactaggcccggttaattttttttttttttttttttttagaggtggggtctcactacccaggctgactttgaacttctgggttcaagtgatctgcccacctcggcccccaaaagtgctggaattacaggcgtgagccaccagcacaccaggcctgttcctaatactctgtctttccctgtttcctacagatgataatatagagtacaaaattggaatgaatcacaccaatttctttaatattcatcatctcaagtgagctttctacataatgtgaagaacaggttactcaaaaatagttttggtccagacatggcatgcagtcatgctgtgttgctcttaagagcacaggtgttgcccttctgcccctgtaatttttgaccttgggcaagttgcactactgcacctccatgctgtgtccttggccaattatctcacagagccgtggtttcctcaaatgtaagctggtgatgggtataccgacttactcggatacgagtgtgcccggcatatggggggatggttggcaatgagagctacctctgctagagtggttggaactgattgaagaaatgcctttatgccctggttacaatgatttcctgctatataagatcattcaggccgggcgcggtggctcatgcctgtaatcccagcactttgggrggccgaggtgggcggatcacctgaggttgggagtttgagaccagcctgaccaacatggagaaaccctgtctctactaaaaataaaaaaattagccgggcatggtggtgcatgcctgtaatcccagctacggaggctgaggtaggagaatcacttgaacctggaaggcggaagttgtggtgagctaagatcrtgccattgcactctagcctgggctacaagagcaaaactccatctcaaaaaaagaaagaaaagaaaagaaaaaagataattcaatgttaactatgtcatgccaagaggaaagtttccctcaacactgcagtgaggagccttwtrgaatgtccgtcctcatttggcattgcacataaaaatgcaaaaagaaacttgagaaaattcygcatcccttatttgacaaaatctgattctaacaccagcttcaaccaactcccttccccatgtgatgccactgatgctggcccaattcaaagaaaaagcaaccagaattactgacagctgattctaagaaactttacctggcctatcggaccacaagtgaaaaatatggaggcagagtctgatgtgttgaatgtcttaggtagtctttcrggaagggattccatataaatgaaaagagcatacctactctttgtaccctgttcccaatactctgtctttctttccactgtttcctacaggtgataatacagagtacaaaattggaaggactcacaccataagttaatgataattrctttaatttattttgacattcaccctaaccttctaaatatttgtataattctctaagaacaatgcagagaaagtcatactgctaagaggaagcattcgaaatattttagaatgaactaacgcatctctttccccttgtaagctttgtgtggaaagtgccatttgggtaaagatatcagtgaagttggtgaagcctccaaagggccttattttcattgtgtgtctttgctgttaaaaatcttgttaagaggccgggcayggtggctcacgtctgtaatcccagcactctgggaggctgagatgggcagatcacttgaggtcaagagtttgagaccatgctagccaacatggtgaaacctcatctctaataaaaatacaaaaattagccaggtatggtggcacatgcttgtagttccagctactcaggaggctgaggcaggagaatcactcaaacgtgggaggtggaggttgcagtgagctgagatcatgccactgcactccagcttgggcaacagagcaagactctgtctcaacaacaacaataaaattgttaagaaacagaactcagatgtcagccaggagggttatctgcacacggcatctacacgtgctctctgtttataatcatcacccctgatgctaaacaaggcacatctttagcttcctctaacaaagtctrctcaatgcagtgtcctctgaagttttcatacgggaaaggtaactgggaatgccattacacttgtcacattttaaaataacaaaaaagattaaaacctgaaaattttttattagacactgtttttcccaaacggagattattattctcaccactgccatgcctagggcccccagcctctttgcttttctttctgcccctgcctctttctagagcamcatgaattccattcagtctctgggattggagacactctattgctaagcttgtccttggggtctcaccctctaccccaagtggcttatgaaaatatgtatttccaaacagagaactttctctaggaggaattctggtgaataaccttccctccaccttgttatggcctgtctgttttgtgagtcaaactctgtgtctttgcagatcggaacccagcagccctgatcatggttcatcaacgattgagcaagacctcgctgcyctggatgctgaaatgacccaaaagttaatagacttgaaggacaaacaacagcagcagctgcttaatcttcggcaagaacagtattatagtgaaaaataccagaagcgagaacatattaaactggtgagcctgagaaacatgatttatgtttgtgcaactggaactcccttataggaaactttggatacttttggataactaaaaggagacaagggtgggtgtgactggcaccaacttgagagattgtttaggtgacacagtgtccatcacactattgtttttataagccccacwgtcttaacatctttaccaagcttctctgtcttctgccaataaggctgtattttatcatttttattttcactaacttatgttgagtttataattgcttttgggaatctttgaaatctcataagcaaatagaaaacacttatctttgtttaagaaattaagaacatgttgcaaacaaattttccctttttttttttttttttttggtagcactgggctttgtaagaatttttttaaaattatacagtacactgtcctatatttagaaaagtcagtacctaaatggccaacacggaatgttggctacccaattcataaggctccctatgaaaggaaatgccatcctcaccattaataatcagttttattttccaaaatgttttctcacgaattgagacattctctccatttttgttgattccttgatacatagtagggacacaataaatatttgtgacagatagattagataaatttagcaacaaaatatccttgaaaacaagcttatgccaaaaccaaagaaataagtaagcttgatagaaattaaggtagtgtatccagaagaaatgggttttaagagatatttgtataagctgtctatttctttgctgagggtctgtgcatataaragaattctgagcagcttcagcttgtaaggttggaagcctatagatgatttagccatcactgtataataggtgattcagtgtaattctgttgttctaggayaacagtccccagtgactgtatgcaatgagtagatcaaaatcacatgaattgcttattgaaaatcaaattctaacgaggcccgttattctcaacttgagcatgaatcagaatcacctggagagcttgttagaagagatttttagggtctaccttaaattttcaacagatctctcgtagggctggtgttttcatatttctgatcccaggaccagacttcaagaactgctgcccaatacctaaatgtgaggctcaggatttactttttaacaagccccacatgatttcgaggggttgcctcatttgtgaactgctgaaataagacgaaagcagtgaaagaatggctgggcaggggttggatcaggcatagggagggattgccttgacagacctgagcaagtcaaagtaaattttaacgggcaataatggctttgagatcyggctataaccactgccttctgactttctccagcaactcatccccagtagtccagaacataataaaaattaaaatagtggccgcatattaagcattcaccatggggctatattctgtgctgagtcatttacaggaaacagcctatttaattctcacaayaaccattagagtttggtactattgtcagccccattttgcagataaaaaatgtatatagcaaaatttagtgactttcccaaggatccacaactggaaggtggtacatttgggatttgaaccttggtcctcgggttctagagcccctggtttataaccattgtgtagatgcctcggctaattcaggtttcaagccaatgtcatcataatgaagggagttgctctggtgtcctgctcacacagagagcacacagcaaacttcttcattatgatacctggaatgccatgcctgtctctctttaaacagctttatttcccaatcatacaattcactcattttaaagtgtgcagttcaatggtttttgtatattcatagatacgtacaaccaccactagaatcaattttagagcattttcatcgccttaaaaagaaatcctaataaattaggcattcagccattcattcattccttgaaacaaatgcttattagacacctgcttgttaaatatttttaaacagtagtaaataaaaataacaatcctaggctttatggagcttatattgtagaaggatgagtcagaccataaacaaaataagttggtaaaacatgtagtatgttaggtagtaataagggcttaggagaaaaacaataacagaaatgggagaataaggaggggcrgtttggggaaggatgatgaggatgcttggcgattttaaatagagtaggcacggaaaggtttacgcagaaggcaacatctgagttaagaggtgaagaactgacaacagccaacacagggaggaggattcctccaggcagaaggattggcatgcaaagactctgggctggaaatgggcctgagtgttgggggaacagcacagtggctctgcctgaagaggattatagggcatcaggtcagagagatgggacttttgaggtgggagacagatcttctggggtctttaggcctctgtgttttcactaggagtgaggtgggaactgttggaagcttttgagcagaggattgatgtgatctgaagaaacttccacagggaccactccggggctgtgcttcccagtacgttacgggaagtggtctcctaggaagaagccgtcccaaagttcaggccaacagcagcccaaggggttaaggaatcctggggtctccagcagatgactcaagtttactaacagggtgaatgttgcttagaagtctggacatcccagctgggtgcggtggctcacacctgtgatcccagtactttgggatgccgaggcaggtggatcacctgagttcaggagttcaagaccagcctgggaaacatagtgaaaccctgtctctactaaaaatacaaaaattagccaggcatggtggtgggtgcctgtaatcccagctactctggaggctgaggtrtgagaatcgcttgaacccaggaggtggaggttgcagtgagccgagatcatgccattacacttcagcctgggtgacagagcaagactccatctcaaaaaaaaaaaaaaagaagtctggacaccccaatattagtccatttccatgcttctaataaagacatacctaagactgggcaatatgaaggaggtttaactggacttaaacttcaccgtgactggggaagcctcacagtcatggcagaagacaagtcatgtcttacatggatggcagcaggcacagaaagagtgcttgtgcagggacatttctctttttaaaactgtcagatctcctgagactcactatcatgagaacagcatgggaaagacttgcccccatgattcattacctcccaccaggtcccgcccacaacatgtgggaattcaagatgagatttgggtggcacacagccaaaccatatcaccgactataatcatctggagtttccccagggccccaacccttgggcaagaccattccccaaggaaagacacatggcaattcagaagagaggtggcagagtgagagggaagcctaatactcacgggagattcctgaaagaggaattcagagtacagatgaaaacagaagccaaaacatcccaagaagacctcttggggagatttgagctgcaggaataggggccgaagtcacaagaaagtcatgcaaaacctaaacatcccaggaacaatgcctgagcatgaggcaccatatggaatcccactgatgagggtgtggaaagcagctcaggagcttttctcctggaggagaaggttggttgggaattggggaaaaccagctgagcttgtaggtgggaaaattgcacttgaggagctagggaggtggtagaaatcctactagaggtggcaactctaccatatgtccttccacttccttctcactaagaaggaatgtgagtacacattgtaaaagttttgaagactgttcagagggacataaatacatgcccaagtcagcctggccctttcaggccaaatgtaagccactcactcaaagtgctcacccctgcaccactgtgattgtggatgtgggtttcagataaagccccagtgcctgttacacacacctatcccagccttgttaggaaggctaaagcctgaatatcttggaattagaaccacacaatgtttattttatggccatttgggagcatttacaatttttactacctgcctttagctgcgacgtgtgtgccaaagcttcctactggctccatttgtaagaatcagagattgttctgtcaggaaatcttttgactgaaaggcacccagaagtgttagttctatctttgctggtggttctaagtaatgaacaggcctcccaggctaaattagacaaaccgaagtgtaattaaaaagtaagccccaggttaaaagaagtatttgggtgatgaggaaaattaagccgayagyatttcatctcccaaaattgctttggggattaaataccaacgtgctttggttaaggattatgcatttcaaatgccacatccacagttcgagagttaagaaagaaagcatggcatccgtaaactycctgtcagatgtttactgaaaacttagtatttgcacaacattctgatagacactggagacgaaaatgaataaaacacgatcaccacacacactcaggggatgtgtataataaacagtactaagaaatgaaataataaaagcaggaaaaaatggatatgaaagcacagatataactatttgcctaactctatcaatcgataagcacctagaggatatttttgatgtaattgttcatatcatgatacgagatgtaaaatgcacaccaagctctgtagactcyacttttgtgcaaaaaaaaaaaaaaaaaaaaaaaaggatctgtgtccctagagctctacatctaaataactctacagtctggctactcaaagtgtgaagtgtgggccgtgaatcacctaggagtgtgttagacatgcagagtctcaggccccacttcagacctgctaagtcaaaatttgcattttaataggattcccaggtgtcttgtcatatggtcaagttgaagaaacagttttagagtgtgtatcattgccccaaatgcattttagagtaagcctacaatttccgttatttgaaatgggaaatacagtgagctctttacagcttgtcatcaagttgagtgtattatctgttggtgacgaagtcatagttcctgtggaaatcacccctgtggttccctccctacatccacagtagaaggtactggttgctttagtcggaagtgagtgaaaataaagatggaagttcctccaccccattcacgtgcttgtgctccatgatatctctcaatgaacagcttgggggtctgtaaaccccaggtaaggacttttgctccagagaagaactacagggtcagggaatctgttctaattcatttatctgtttttcatcaactgctactggttaaacctgtgtttcgtctataccattagggtgaggttttaattttaaaagtgactttggtgaggcgtggaaattcttagggatttacctgagggtccccaatcactctgggtaytcagctctaccatcacattctactaaacacccacagcccagtgagcagggatttcgttgtaatgttaaggagtttttgcttctcagccacagatgtgctcgacccaccattttgtcttctttcttcttcctcctttttagcggctttacaaagagatttcctcatttctttcacagttaccrtatgtgttatcctctgcagagccttgctttgcttcactttgctttgcttcctgtcttttctcccctttcccatatctcccacatgttctaatcacatccattcacctctttctttacatcaaactgaatggctcgcgttcttcttacaatcctcatgtctgtcccaccagcaatcatttcaggaccccaaaccaacgttagtaccatcaaactgagttcagccccagaaagytaaaaagttgtgtttcagaccgcaagctctgggcagatacagatcagctatgaatggacgagcccaccaggacaagcaatcaggtgytgagtggggggtctagggtcatatgtsctcatttcaggccactgctcctccaccaagtcactgcatgaccacctgaatgtcaattttctcacctgttcaatggagataaaaatatctcttacctcatgaaactgtaaggaggaacaacaagataatrcacctaaaatattgtttttaatgaaagcctttttctgtacaatacctgaattgactaggaaatctatatgcacttcaaatataaacaagtattacagttttttatatcttgctacagcttgagggaactcattgtctctccttgaatgatttctaccagcactatgtgctctcccagctatctgggagccacacttgaatgttctcctttctgtggttgcctaggtgatgtatatgtgccaggagtaattgcagtctcaggaagtatccctactgtcagttgtggtagtgccatctgtcttcctccaatatttggactttacatagggtcattttttttttgaaaaataatttagctttcccaaaaaatgttgcatttttctactaaacaagaaatgacaaataagcaaaagatgttagtagtgaaataagaaataaaataattgttgacatttttgtcaattttcctgattattaccccartgggattcmmacacacacacacacacacacacacacacacaaagatccaaatccatatagttttcaatttgcttcttttacttagcattatgccatggtgatttttcatgtcatgctttttaacgctttttcatggcttcrtattactttattgcatgaatgtagcttaatttatttatctagttccctactcgaggtggtgtattagtccgttttcacayggctgataaagacatagccaagactgggcaatttatacccaaactgtgaggtttaattgaactcatagtttcacatggctggggaggcctcataatcatggcagaaagcaaggaggagcaagtcacgtctgacgtggatggcggcaggcaaagagarcttgtgcagggaaactccccaatataatactattagatcttgtgagacttattcgctatcacaagaacagcacaggaaagacccacccccataattcaatcatctcccaccaggtccctcccacaacacatgggaattatgggagctacaagatgagatttgggtggggacacagagccaaaccatgtcaggtggcaactccacattgaatagaagccttggtcagactttcacattcattttttctttgctcagcaaggaaaaaaaatttcaaagattattataacattgagactcaaataagcagctattttaatataagttctatttagctatggaaattttaaaaataagaattttataggtgtgaaagaatatctcatagaatgatcaagatgcttgacttttttgtccaagactttctccttctgaaaagagaagggagctagtagagattatagctctgggtagacagggccctctctgtctgctcacagaggaaggttggaccatcaatactagcatagtactggcacatagtaggtaaatattctttgaatgaatggtcaggtcacactcccatataaacatcttccttgtttttgcttttgtttttgtttttttagagaccaagtctagctttgttgcccaggctggagggcagtggtacaaacttggtgcactgcagcctccatctcctgggctttaktggtcctcctacctcagcctyccaagtagctgggactacaggcacgcaccaccatgcccagctaattttctctattttttaagagacaggtctcactatgttgcccaggttggtctcaaactcctggctttgagtgatcctcctgcctctaccttgttttcaaattgttggtgatgtgcttgctgtgtagatcattacttagttcagatgttttgwaaattaatttcttgtagaagaaaaacaatgtatagtgaaaatccagagtaaatgctttgactaaaaggaaagaaagaggcatcttctttagacattagtggaagggaaaggaagatgtgttgagcccgaaatatgaatattctagacttggctttttgcctatgttccaagattatccttcttagaagagactccaaacatacaaatttctgtccacatattttttatcccttttgagttagagtcaaggaattattctcctccatggaaaccattttcttgccctcagatgactaaaccaagtgaaatttagcagagttragaacaagcgtgaagttttattccccagggcctttctgttaactccttaaaaggtttggaacattgagctgggagagttatcatgaatggcaaacaaaccagcmaaaagtaattgagatgtgtctgttcctttgggacagaaaagaaaatcataccaaaagtgaaaattaaatgttgtttactaccattcagtttaccacataccttcttaatttatttcctaggaagtccaagtgaatttttgcttcttctctacctttaatagtcagtttactttcagagttttgtgactaataaatgatcgaatggctctttgaacagagccagcctgctgataaatacaccaaaagttagtataccttgcctttatgttagtcacaaagcacttcaattattatatgaaaaatcactcttctgggtactattttcacatcttatgcagtaagaactttgagcccaaaacacagaagtttatcttgtttagagattaagcagagttgttttatttctgtttttgtttgtttttattttatccttattcttttgattgcaagccacagaattccatgctggactaacttaggccagaagggtatatactagaaaagtacaaagggtatatcacataagaaagggggctgtccaaactctgcccctgcttttctctgcatattagtgttattcttttccaaagtagcaagacaggcttccccttgrtagaaaatacaggcactgatcccttctgagttttatttctccattgacatgtaggaaaaatcttggggaaaaccttgtttgggtcccatgatgaccaagtctgcaaccagaagtcagagtatgactgacccaacttggattaatgcctcccctggaccaattatcttggccaagagatggggggtaaaatatacagcagctcccaagggaagcatgtgggtgaggccattctcagaaagcagaggaagttcttcctggagaagtagttagtattgggtagagaaaactacaggtgtacctcacatcctctctttgtagcataaaaaagagataaattattgatgcccatataaaatcccattgccaatttaatgtgagttgggyggtagtggcatactatttaatattaacaaaatcataatattaattattctgtctcctggagsttcagtagacaaaatttaaataaaaatagtaaatgccgtrygggcagaacttcagtaggagtgagggtcttctgaaaactagctgaggtcgggctcggtggctcacacctgtaatcccagcactttgggagactgagaagggcagatcacgtgaggtcaggagttcaagagcagcctgggcaacatggtgaaaccctgtctctactaaaattacagaaattagctgggtatggtggcacacgcctggaatcccagctattcgggaggctgaggcactacaatcccttgaatccaggaagtggaggttgcagtgagccgagattgcaccactgcactgcagcctgggcaatagagcgacactgtatctcaaaaaaaaaaaaaggctgagatgagcagaggtggggctgtgtagtaaggcactgtgggggagatgaaggcaaactgagyacagtaggacatttacatattttacatattaaacagatatcctctgaaaacatatactccttgggattctagggaaacaccattttcatttaattgcatgcaaaagcctcagtttaaaaaatacacctggatttcacattaagatgctttttccggaaggaacaaaatttagcttgttaaacaccaaacctatataattttaaaagtatttccaataaggcagcctgtggcttgaatgtgagctttcagagctatcgctgaggtcgggtccagtgtagttttgaaacttaaaagatttcattcacaatcatttttttcagtgcctattttgtctagagcctgggattctaaacatttattaagaatggaaggttgaaatggtgacatccctttgtgggagcaataataagatatttacatacaaaaggtatgtctgtaaatgatacyctgtaggaaaaaccaattagggggccaacacccagagttatctgggcagtcaaaggggagaattacctaaggctggcttagaaagggaaggggcagagagaaattgaaatggtttcttccagattgtctccatcttccacaaccaccaagacaatgcttttcaaactctaatgtgcactcaaatctcctgggaattttgttgaacatgtagattctgacttagttgatctggagtagggcccgagaacttacatttctaatgtgctccctgrtgatgctcttgccactggtatgtggactacactttgagtagcaagatctagaaagccaggtcgtcagctcagagtttctagaacagtgcctgctatttagtaggtgcttaataaatatccattgcatcgtggctgaatcagatagtttagataagtgtgtgttctgggaccacaggaggtggaaacttgttctgcaaggggtaaagggcaaatgcagggggtgtgatgggagccaagagggaggcaaaaggacgtggcagacagggaacttctggggagtctggagggagtgtggcactgacagtggtgtggagcctgacaccaaaccaacataaaagtcagaactgagtgggcagaaggtctgtgagttmtccagcttagtctcaatattgactggaggccgatgctgctgaggataaaggcagtaggyggaagggaaacagcacatgtgagcagatgctggcataatcaagaaaatattctgaagtcaggtgaatgatagagatgaggacatggaaacaggaatataattgttactgaattcaaaagagttgctgggagacttagcagtggcttgtagaatgagggagggtccaccaagacaacctcccacttcaagtctggcacaaagcatccaaatcacctcaggagattttgagaatattgattcccaggccctacccctagacatttggagtccataggtcctggaatctgtatttttaagaagttcccccacatgattctgatgttgcagccaaggaaggtgatccctggataactctctrtaactccttcaagtggttggaagaggagaaaagccctctagggaagggaaggtgctagtgagaggacactttcagctaaatagagrcgttgcaggagaccccaaggaaatggccagagtctttgcacactggaattttacatctagacagcttgayaaatggcatgactacaaagtaatgcctcatgatttctttaattgtgataatcatgattaggcaatcccttttgaatgatcaaataggctttctgctggcccaagtcctagttaatatttgttcagatttaatccacttcacagatgaatgcatcaaatttcatgataattttaaacgaatgtggattccgtatcgtaattctcttgcaagccatggaaccttatttgtctgggtttgtacccatctcagccacttaccagctttggggccctgagcccaggacttgagccagatgtgtcagcgtgttcttatgtaaaacaaaaataataacaccaaccgcatagggcaattctcagaattaaataaatacatgtgaatcttttttgttttttttttttttgagacagagttttgctcttgttgcctagagtgtgcccagagttgctggagtgcagtggtgcaatctcggctcactgcaacctccacctcccggattcaagtgattctcctgcctcagcctcccaagtagctgggattacaggcacccaccaccaggcctggctaactttctgtatttttagtagagacagggttttaccgtgttggccaggctagtctcaaactcctgacctcaagcgatccacctgcctcggcctcccaaagtgctggaattaaagtgtgagccactgtgcccagccacatgtgaatcttttaaaactaggcytgacatatagaaattatcagttaaagtgttgtaggaccctatccttagttcagctaaagacgggttccttgtcacatggccacaaaaagttaggcttgaaggcaatttgaagagtgaggaggacagggttttattgtgttgaaaggaaaagagggaaacaggttatctccacaaggctggagtccctgctagtgtgcttcccaccttgcagattgaattccaagttccacccaggaagaggagtggccaggctcctccctgctgcaaatggggtggatttctgtggctccacctcagtgtgcattcctcccagtgagcaggcccgttgcagtttttccggggactcccttatacttggctgtctcaaaagtttgtggtattatgatttgtcttgtcactattacagctgccacttatagaagactagtcaactcagcttgccttatatgtttttgggaaagagaatctccatctrtgggaaaagcagtgggggctttcagaggatgtccacactgtctattkggtgctccagtaagaagggttgagtccagttgctacagccacctgaaaaccttgcagaaggttctccaggttcctcatgaggaaaaaaggaaaagattaccaggcacaattacctttatgtaattggcaaacacttactgggcatcaagtgaatattaggaattgtgcagaataccaaggatacaaaaacacaattgatgcccccttggggcttgatttgataatagatgtatgacaataaatacttgcgttcacagtgatgtagtgacagttcattgaaagcacaaagagaatttctgatgttctttatatctactggaaattacccacgcaagaacataaatgtcaacttctaagatgggaaactcatgttatcctcaaagcaattcaacaatgaatgatagttgtgagccaagaattataacttgctgttgattataacttacatttgtgtcatacttatttttattttgagcttcacagcacctccaaagacataaagacagtgatcaactgagaaaatgtaggttctgaaaatgtagggtcttgccccaaatttcacttttaataagtcttagggtagagattggaaccaggttctacactgtaagttgtctttgcactgagctgggctataataactgccacaacaatctaatgaattctgtttaattaaaaagagataataagaagaatttcatattaaaacccataagcctagataatatgatggttctaaattgtcctcattgccaatgttagatgtctgacaactttaactattgtgaaacatccatcacagatattctaactatagattctgttgtttgagggaggtgggaaggaagctctgtttgcaatcatttgaaatagcaaactgacattttctttttccagcttattcaaaagttgacggatgtcgcagaagagtgtcagaacaatcagttaaagaagctcaaagaaatctgtgagaagtaagccntcattcccattacaattgacatgtgcatctgaatttattcaacacaaattcccatctgatttgcctcttttttctcttttacttccattgtgacttcagagaaaagaaagaaytaaagaagaaaatggataaaaagaggcaggagaagataacagaagctaaatccaaagacaaaagtcagatggaagagtaagtcaaaagtgtcccctctcccaaacagttcatctgggaattattttattntgtacgtcagagtcacaggttcataaccagtcaaagactccttcgtgaagtttctcctctagtcagcctttcaaaagattcttttggtaaggtttttmacagggaaggctcaagcaaagactggttcaataaaggagtgaggcacacccagggccttttagataaagagtaagcaaagagcttccctcagggaaaggctaaatcctcacttcctacccataatcttcctggcatttagtgaaaacagagcctgtgccttgggaggaacctgacctttgtccaaaggctggcagattataccttccttgtagcagtaataagaatgttgctatggctcacacttgtaatctcagcactttgaaaggcctaggtgggaggattgcttgaggccaggagttcaataggggcctgggcaacacagggagactctgtctctacaaaaaaattttaarattagctgggtgtggtggtgcacacctatatttccagctactcagaaggctgaggctggaggatggcttcagcntgggaggtcaaggcttcagtgagccatgatggtgccactgcactctaccatgggcaacagagcgaaaccttgtctccaataaataaatagataaaaataaggaaaaaagaaaaagaatgttgagagttctgtaaccttttatctagaagtctgagattmccatttgtcaattctggatganttggtataatgatgtattcatcatttgcttttagggagaagacagagatgatccggtcatatatccaggaagtggtgcagtatatcaagagggtatgtgggctcatcacgctctctcctttgcaaaacatgtgtgaacatttggtgagctcrctgtgagcttctggaaggaaatgtcatgccttgccntaactttttatcactagcacctagcagagctgtttcacagggtgggcactccttaatcaacatttctgcaagttgaattgcaaaccactttgtaaaaggattcatctaaaaatagagtcaagtcatttccaaagtcaagagcccagaaacatattgtaaatgatagtgttcccaaaagaacctttaattgtcatcaatgatagagatgatggcaacctcgaagggctgtcctttttttttccaatttaatgtcatagaaatgtttacatatttataaaaaggtaagaacagtgcagtccattgatcaccacctcccacccttatgtttctgtcacctagcttcaacacttactacagtttyctatacttgtaagtgtagttcttgatcaggagatcaaataatcaaatgtaagccatagatctgaaaagctttcggtattttctgaaaacgtgcacttttaaatgtttagatgaaagtaatgtttcttgtaactttcttatagytagaagaagcgcaaagtaaacggcaagaaaaactcgtagagaaacacaaggaaatacgtcagcagatcctggatgaaaagcccaaggtaaacggaactgaattaaaatgnacaattattttatttgatttccatttagtaagagtaaaaccttcctggtttacataagtaccttgtacacagtctcagatcagttcttgcatatgaaactcatgtatctttctcaatgaaggaaaaaatatagcaatattcagtaagcatttatcatcacctggtgagcttttaaaaactgcaaatatgcagaacccagccccagagatttggctttaactaatctggggtatggctcagacaaaggtatttttatagtccgtttcccctggagaatcagagactaaccaaaccttcagtttgggtactactaagtaaacgtcagttctaaatagctgatgtaatgttgtaatgccaccctctgtccagcagaggatgccctgcaccaaaatcactttggtttttatctagcaaaatagtctcataaatcagagaaaagcaaatcttttgtttcccatagtaacagttgattggggctctgctttaaaattatcttatgttcattgtttggttaaaattaattgtcttatgaatattaactttgaatgaactgagtatytgtagatcaaatactttgaggttaccaaatggcatctcagttttagaacattcsttccattttgattcatcactgaatagttttctgtttgtggaaattgtgtttttcaattttcctgcgcttctattttcaatttaaaatatctactctaaaaagtactgccattccacacaagcatttctcgagtcctaaaagttaaaaaacgttagttttatttaattgtatgtttcattcaccagtttacttcttatagatttcttatggataattctaaatatattttcatggttctttgtgctcttatgctttcatatttattatataagacatttatttaatatttttaatttctaagtttttagggttggcaatatagattctcaagcaagaattaataattacttagatatggtgctaattcttaygtttctcctataaacatataatgtagatcttctcagccaccctctcaggttgattatgcactaataaagtggaataaattttaacataatttcagaaattgctatactttccaatcagaattgatctttttaaaatgctcaaattatttagagcaaaagatccagtttgactgaaatttaagaaacactttaataataatcagtctcaggtgatatattcagatacatacatttctaatctatgctgtctggttttaaatttgtcattactttgtacactgacataatagaatttgcttatggttgatggctcagctagtttttgtatttcaaaaaaatttaggtaatatggttcttttcagagtttcattttgcttttttttttcatgcgtgttttggttcaacaatgttaactattttacttacagataaaatgtgaatgtaaaatcattaatgtgtttaaattatataactctcagtatcagtaacccatacaaagattttcwtgttactgctctaggtcatcatgattaaaatcaacctcagtaaatgtggaagcacccttaaacttcttccctggatataactggacatgaaaagaactaataacttttggctgatttattagcagtcagggtgcattcagctgcaattttacaataagcccaattaaaactggcttcaacagttatagtatttagtaagccacgttactggaaattcagaggtactacagttgtaacagtgattaatttagtggcttaacaatttcatctccaggtatttttagaatttccactgttgttgccttctagatccagaccgtgaactcagtcatgagatggctgccctagctccacacatcataaccttacatgaaaccactcaaaggacgtgcagcaaatgtcttcattttgtaamcctttctaggattgagaaaaaccttcctacatcccccctagctggtgtttcctcattgggtacaatggcctcatattcccattcttaaaccaatcatgggcagtagggtatcactttcatgattggcttagagtaattaagattcactcacaaggctagagagagttcagttttcctcagttccatggtcatcaggtacctgaacaaaactgatattttatcatcaaagaaatagagsggaaatagcaactgggtagamaggttacatacagtgtacgttacagccatgtttataacaattttttgtttcttcctttytggccccttggaaagagatctgaagtgtttctatgaatttttagtagttctattgtctgcgttttttattgtaaataggtaccatgatgaattcctctgtgcttttcttccatgaggttgctccatgaccatctttttgygtctggatttgaaggttgcccatgaagattgttggttccatgtcaaactaaagcatttcttgagggtttttcttcatggcttaaaaacgttgtgccttaaagctgtgattttattaataaaataataaatcatgactgttaacattgtaggacatggtggttaataaagggaaatgacaatgacaasaggagcagcaatagacagtagagtaaaagaacaaaatcaagtgtgagacatgtgaagaaagaccaaagcacaggacagcaaagtaggtattaataaatgggtggtgaggagaggccaggccagcatagcagtcgctgatgctcctgtaactgtggggcatggatggaaaatacagtaacactggctttgaaataatccctctccacatctagtactgaaacaggctttgaatcttgacatagacatgagggaaattagcaaaagcagaaacaaaacaaggaacaacccaaggaaatgaaactgatcaatagtatctctaaaacaagtccacggagtcagttccattcagtcagataagaaaacagagtgatttcgtgacatctagaactttatgaatggttccattactgggttttggawgaggaacgtgagctgacattgcagcaggtaatattaaagacaattgtaaccttcttatgaagaagaaaccatgccaaactttgccacaggttactgaggagaatagagttcctccctcaactaatttacagatggtatcggggaatctgccccgatattcacgtaggttcttttctatttttcctaagcatcggctggcttgagaaataaagggacagagtaaaaaagagagaaatttttaggctgggtgtccgggggagacatcacacgttggtaggatccgtgatgccccacaagccgcaaaaaccagcaagtttttattagagattttcaaaagcggagggagtgtgcaaataggtgtgggtgacagacaagtacttaacagggtaatagaatatcataaggcaagtggaggcagggcgagatcacaggaccacaggaccacaggacygaggcaaaattaaaattgctaatgaagttttgggcaccattgtcattgataacatcttatcagtagacagsgttttgagatcaactggtctgaccaaaatttattaggtgggaatttcctcttcctaataagcctgggagcactatgggagactggagtctattgcatctctgcagcctcaacagtaagagacagctatgcccggggggccagtttagagacccacccgcaggcrcacattatctttctcagggatgttccatgctgagaaaaagaattcagcgatatttctcccatttgcttttgaaagaagagaaatatggctctgttctgccyggctcaccagcggtcagagtttaaggttatctctcttgtttcctaaacattgctgttgtcttggtcttttttcaaggtgccccagatttcatattgtttaaacacatgtgctctacaatttgtgcagttaatgcaattatcacatggtcctgaggtgacatacatcctcctcggctgacaggattaagagawtaaaataaagacaggcataggaaatcacaagggtattgattggggaagtgataagtgttcatgaaatctttacaatttatgtttagagattgcagtaaagacaggygtaagaaattataaaagtattaatttggggaactaataaatgtccataaaatcttcacaatccacgttcttctgccatggcttcagccggtccctccatatggggtccctgacttccygcaacaagatgggatgaagttttttaactagaaagtgatcatagctaagtttttgcasacaccaaaagtatgtataggctacatgacatcatatttcttcctgttcttccatttctttcaccatgttgttgtatataataatttactttctcttcatccacttattctaactaatgtaatagtgtgtttcatgttcctaatcttgtcttaacagggaggaagctctttttttacattactgtttgctctgggatattactattttgagctattctgaaccttgatcaacttagaaaatcatatcaatataattttctaagccattggtaaataaacaactcctttgaaagtaacaaacagatattttgtaaatctttcagcaaaagaaatttgaaaagccaatggctcaaagttaacagtttttcagtggcaaagaagtatttattctggctcaatttagagcaaactacacatgaaacctcattcaaagtgtgactttgctagcagtttactcaacaatgggcatgtcatctagagttcccaasatttttaccatcctgcaayagcagtcataggagaatatgcctcaatcaaaatcaggctaaaaatttgtttcaattctgcrtgtgagctgggaccttaagtctttctggtcgctatttggtaggggaccaaatgtggccagtcacactggaaaagtttattttagattgtcccactttgtgacatgcactaggatcttttcatgtggagagttcattttttccctatgaaraaagagattcaattagtttattcattttgtaggtaattttgagggcattggggaaaacagaagtaggtggtccctcgaagcaacttgtacaataaaatattttggcctcaatttgacacaaaatgatgttgtacattgctgcacataagtcccatggaaacttattatgttataaacaacaagagacactcttagaagggaatacttggctcctttccagtagagttcygaattctggagaaacattcgactgcatgttttctagcaatgagatattcgattcagtccttgagtgtatgtgggtttcagttttgtttgagttgtggctttttatgaaatccatagtggtagaattttcaagatggacgcagtaaacactggccagtcttctgactcagtgaaataattggtttcctggggatttccatacctgggtttgccaaagccartaggaaacatggggaaaccccatctctaccaaaatacaaaaattagccaggtgtggtggtgggcgcyggtagtcccggctacttgggaggctgaggcaggagaatcactggaacccgggaggcggaggttgcagtgagccgagatcgcgccactgcattcmagcctgggcgactgagtgagaccaccctgtctcaaaaaaaaaaaaaaaaaggaaaagaaaacacggttartcacaagttgccttgagtctgttgtgaatatgccaatgtttattgatcactttgctgctcctgactctctttataagaagaatcatcttttgaggggaatatttaatgaactatctccataacctcataaaacagtcaataaatgtgtaatttactttttctctgatgcttaatttgtctttgatgcttcttagaacacaggttttctgcttaatttagctcatcatcaagagagaattccgggaagctttagggcattttaattcattcccaaagaacatttcatcatgtagctactggctcttttttttccctccaccaagggaatatagactgattttccttatttcccctctgacatctttgtaacagggtgattgactcatccctctgcttgaagttagtcttgttagacctaccgctgggctctgagacagaaccttaaatgcggctgatatctcctgtgtttgggagagaaaaggcaaacttcgggatttaaaataaaatattttttaaagtaatgcatttgtgcctcctctaatcttttgcggcttgatggggaaatggattcttccttgccagcacttattggatcttctcccagaagccaaacttgcagagtggaaactggctgcttatagacagtgtttctgctcattgtcaagtctcaattaaccacacagtggtttgtttttgtttgttctgtagaagaaaattctttttcatttttgtcaatataaagaattgcctttttaggaaacaaatatagttatgccttattttcttgagtataaaacttagacatgtttactctccttctgggcaataccagggcattggaacaattttaattccactggtccctcatcagtttatttttgaaatttaatctaatagacttttaaacacataagacattattctatgttwtgatcatggttcatttagatatgtctacatattcacatattctttgtgaaacgttttttcttgtatcttctgcccatttgggatcatcatcttgtacttcctctagaagttcctttcatgcggtctactggtgggaaactctttggagtttttatttttgtttttgtgcagaaatgtctttgtttgtttaatgtagtaatagatgagaatctacatttcctccattctggaatgatattttcactggatataaaattttgtgttggtggttattttcctttagcacactgaagataaacttccaccaccctctagcatctattgctgttcttgagaggttaactgttagtcttaatacagttcttttgatgataatttatattccccctccccccaccgacagcatttagtatttttttcttacattttgtgcagtttttctatagtgtgtctaaatatgtgtttgagatggctagatggatcactttcctcagttctgcaaaaactctaaactatcatgaaagcaaatatggcttctgtcattttttttctttccttctaagattccatatatatatttgcatataaaataaaatgaacmtttttactccatctcctctgtcaatgaattgtttttagtattttccatccttcgtctttctttactgctctgtgggcaattttttttcctacactttttgcaatgcaccaattttttgtttaaacttctattctatgcatccactgagtgtttaatttcaggttttgtattttatttccagatgttctatttggtttattttcaaatatataatctgtatgtcttagcttgttgcagggaagctttcctgtgagatttctcactctgggaaagcctmagctcttgactgtaggctcctcacctttcaaggctatcaaagggtgaacacacaatttccatcatgagcaaaagcctatcagggcaaaagcagcttccttgcttattacctttctaggttcaatgtccccttcagtttgaccctgatcattaagttgttgtagttctctgggtctttaaagatagttttaatggccaggcatggtggcttatgtctgtaatcccaacactttgggaggccaagacagcaggatcacttgaggtcaggagtttgagaccagcctcgccaacatggtgaaacactgactctattaaaaacaatacaaacattagtcaggcatgctggtgtgcacctgtaatcccagctaccctggaggctaatgtgggagaattgcttggacctgggaggtggaggctgcagtgagccgagatcatgccactgcactccagactgtgtgacagcgcaagactctatatygaaaaaaaaaaaaagctttagtatcaaacccagcttcttaatttttttcagtggaaaggatggtccaaataacctaatcagccattaccagaaatagaaagtccccacattgcatttctgaaatatttgaattagttaacatctgtatcagtcaggkttcaactagaaaaacagagccagtaaaagattgtgtgtgtgtgtgacagtaattggcttatgcaattttggtggatggctatctgccccgttctcaatgctgtctctctaatgatggaccctagcaggcaggcaggaaaggaaaattacaagtaggcttggtgactagagtaaccwgcagaagctgagcctctttgtcacagagttgaacatacacacatacacacacacacacacmcccctggcccaggagtcagacaattaaaggaagacccaatgggcaggggaagtgattgcaggctcagctgctgcttcccatcaaccagacacataaatcaacagatcagcaacaatgcctgagtattacacaatgactgctgactcccccatcagccctccaattctcagaagaatctccatggaacccacaatagctggaaacatacagaaagggaactctgggaaatatagtttggctgagacagttggcacrataagaagcatcacactgttaagtaaaaatcagaaaatgttttatttcaaaaatactctgtgtctcttgaaaaattagattctaagattataatagaaacatgcaaagaatttctaaagctaagaagaagctgtcccttagggctgcatggtactccctaggctgtttcaaagattkctattgtctattggccccataaggtaactgagtttgagatttaaacaaaaattaaaacttagattcgcatggatgccrttgattcctcccccttttctttaccatatcaactttctttccccctcctttgtccatatttttctttcttgaggatgagaaaatgtggacatatggtgataaatgtactggatagagggcagaggctcagaagagaatcttccccacctgctagagtagggggctacatgttggtggggttcagcgtcttcccagcaaacaatgattttaacaccgggaataggatgaggtggacttttatcatattggctttcatctgcccacctgccatacatgaaaagtccacacaaccacggatggaaaaccttttgggtttatttccacttctacttctgtgtgcctgtcattgggcatgatttctgtgaattttgctaatactcattagatttttttaatcctcaatgtatctctgttttttttaaagccctattttgatataaccaggatagtgaaaattatcaaacacacacatccaaamcactttaaagcaactaatgtaaaattttaattgwtttctagaaaccaatagctgatttaactatgaccttcaatattttaaagggaaaagatggccaacctcaaaccaagagaaatactctcatcccttggtatctatggatggttggttccaggactcccctcagatacccaaatccacagatgctcaggtcctttatataacattgtatagtatttgcatataatctatgcatattctcccatgtactttgtcatttctaggttatttataatacctactacaatgtaagttctacgtaaatagtgttatactgtattgtttagggaatcatgtcaagaaaaaatgtctatacatgttcagtacagacacaaccatccacttatggttcttctgaatagttttgatccaaaagtggttgaatccacagatgtggaacccatggatatgaaggggatgactgtatttacctacagaaaatccaaagaggaaatctactagatgctttgagatatttgatgaagaagtacttggagatgagagaaaaggctattgcatgagggcaaatgcaggcatactgggctgaagaaaacactgaagaaatttttccttccaaataggaaagcagttgccaagaacagcattacagtctctgttttccatgtattatattatatctaaggccatattcatgcagcaaattcaccacttggagtgctgtttatacattttctgtcaacagaaatcaacagacacaagtgttctgtgtttattataatcattagttgaggttaatctttgatttgtcaaggaggtgtttgaatttcctcaaataatattttcagattttraagagtcacacacacacacacatatacacaataacacatttatacagacacacgaacaactttatacaattggagagaagcttagcagattaaccattttggcatcaaaatggatttcgccctatctaattatgctagtatataaaaatttgtgtcaaagagagtagccagcagcatgtgcctgtgtttggtacataagagagaatagaaaatacattgttttctatctttggctgagaaagatttgtttcctttttctttgcacctttcgtattatccaaaaaagaaaaaagcttactcttaggttttgcaaatacacagtgagctgttacaattcttaagtttcttattgggtctgtgttttaggtggaaccaaaaaaccctaggacttgaaaaaaatattgtaaagcagtcaagacatctttataattgttgagtaccaactgcagtgcaatcactttagtcaaagcctccatcatctctcccctggatttctaagtagcctccaaactggtcttcctgctgccacatgtacacactcaaaatctattctcaacatgtcacccagaggcatccttttagaacacaagttaaatcaggtcactcctctgttgaagacccttcaatggctcccataatcctctaaaagtccaatacagtctaactccacttttgctgcattttttcttcccttcctccttgatatactctctgctcaggccacactgggctcattgctaggccccaacaagacaggcgaatcccaccttgagccattgtttcctcatctcccaagtgtctgtttgggcaactctctcctgtctttcaaatgtttgctcaaatctgtcagaggctttccatgaccactttattaaaatttacaacccccctccaccactctcccatccctgccatcctctctcctgtttattctgctgtgctttctgtttttcatagcatttgtcaccttctctcattcagtcatacccttctttcctaagtgtgtccttgagtactgccccacccatcagaatataagctccacaacgggaagaggctttgtctgtttcgttccctgacgctcttgagttccagacatccaagaacatcgcctgccatatagctggtgtccaataaatattttttgaatgcatgatgtatgtagagggctaacaacattaactttgtatgttaaaaaatagttctggctctttgcggggagaaaagtagtgcccttaagcccagactccttggactgtgttgttcactgaacaaacagctgtcaatcattcatcactatcttttctcaagtttcttgatggtagtgggattttgtggagaatatctcaaaagtaacagctgtgatcatttttaacaactaatttttacagagagtggggaggccgaggagaactcaatgccaattccattgcatgtgtgggaggccaggtgccttgtcacactgggggtgttggagcagataaaggcaaacagaggagttaaaactgtaytctagaaggcactccaagagacgtcccagacaaataattggaaacaccagatgacttagaaatcaatttcattgccacaaaaatgacagcctccctttttttccacacagggggaaggttcctcctcattcttgtcggaaacttgccatgaggatccctctgtttcccccaactttactccccccaaccctcaagctctcaagtggtgaccaccgtccttccggccaggtaggactggatgggaggggtcgcttttgagagaagggtggtgtgtagccatccagttttcaggcatcacggacttgctcstttgtccttcatcctccctttctctacattcccatcttttttttctgctaaagttcccagccacacccatgatcatttcctcatcctttctgccttcctctggtattaatttctccatcattgtgctctctcttcctgacataaatctcattcttccatattgtcttcttcctctttctccattttgtttctctattggcaaatttggcttcctttttaatctggattttctctcttgcactcagactattattcccactttggaaacatttttttttccatttctgcttctcactacactgttttcccgtggtcctattatcttacaatccagtgrgatcaagttaactctcaaggagtctgtttcaatccactccyctcaacttaccacagccctccttttggaagtccagcaaaatttactttattcccacatggtatttagagtgaatggggacagcttgtgatttcctgattctctagaagcaagagctcttggaaatatctcactaatagggatgcttgggccaggagctctttgtcagagcaaacttcagcttgaaaatcagagcagactttaacttacccaaggagatgcatcacgaaaactattatattcccttcactaataagaaaactagcataagccattccaaagagtgtgcaattcttagaaaaaagaagcattcttgtgattataaataaagcaaactttattctaatgtaatgaaaataaaattctacagtgagacttgtactgtttttgtcttcaagtatttgttsatctgtgaaataatgcagtttaaaaacatgtcaaagaattactgaaaataactctttactgagaaagaggtatgagttattcctcttcctcgacatcagttgttgctctggctcagagcttttcagacctttgtgggtatctgaattacttggacatcctgttaaactgcagacacttatctaggatgtctgagtggggccggaaagtctgcctttctaagtagctcccaggggatgttgatgctgccacagttccagggagcacattttaactggccaggatgtagtacattcctacctccaggcttaagcacctggaagaagcttgaagcaactgtcatggcattttaatgtattttaactttttgacccaatcacaagcctgggcctttgattttttttttttttttttctactgcctgtaacactagaaagagggacacagggaatgccatgtcagaacaaagtcacaacatggctatgaattctgttcatgtcctctcaacagtgatcattttgtttctgtattaccttgtaaygaaggccatattggaaggtgagtagaggaccgacatataatatcaatttctggcttctacaagaaggcatcagggagaccttgacaatttcttcttcgtttggatataaatgttaagactatcttttaaatcatcagtgatgagcaccattcgatttttttgttgttgttactcttgttactgccctggtagttttgtgttttttgtttgtttgtttgtttgtttgtttgtttttgagacattgtttcgctcttgttgcccaggctggagtggaatggcgcaatctcagctcaccacaacctccacctcccgggttcaagtgattctcctgcctcagcctcccgagtagctgggattacaggctccctccactacgcccagctaattttgtatttttagtagaaatgggatttctccatattggtcaggctggcctctaactcccgacctcaggtgatccgcctgcctcaggctcccaaagtgctgggattacacgtgtgagccacggtgcctggcctgccctggtagtttttaaagctattgtgaaacatctaataccacaagtagaatatcttattttctcaggggatgcaaatgacagtgggtggaggagctaagaacacatgacttaggttttatttttcaaaacaaatgcaatagagacaaaaatgctgcatttttgttgctgtgctctttcaggcttgtaatagcgtgttcacaacttgtattccctttagaatgtcaactgagatacccactggggaaaaatatttattttaagaaagagacaaatatccccacaatacctagacttcaaacatttaatcatattgttagtttgtttggtccctttagctttccacatataaaagatgacataaaaataaatatttcacacttttcatgtcaaaataggtctcgtggctaaagcagaaaaagaaaatcccattatagcattttatatttgaaaaaagaacaaaacgttcttttataatagtgtatggaaaaaagatttttgtactaattttaatatttccccaaatgttttttgcattcttgttctttccttaaacatyttcattcatacactacagctgaaaacaaaatgatgaataaaaagtaatagtacataaggccgggcatggtggctcatgcctgtaatctcagcactttgggaggccgaggtggatggatcacctgaggtcagaagttcgagaccagcctgaccaaaatggtgaaaccccatctctactaaaaatacaaaaaattagccgggcgtggtggcaggtgtctgtaatcccagctactcaggaggctgaggctgagatgagataggagaatcccttgaacmcggaaggtgatgttgcagtgagccaaggttgcaccattgcactccagcctgggcaacaagagcaaaactccatctcaaaaaaaaaaaaaaaaaaaaaaaggaatagcacataaaggtataaagctgtcatgtgtttgccaaargataatgttttctattatgatagaagattggccccaagagtagtcatcacataaatagttggaattttacattttttaatttgtgagtgcaaatcttcwttggtgaaaaaatatattccttgttatcagctagaccttaataggtgaagctaagtaggtgagttatacttttaactgtggtaacccattttttaaatagctacaaatcactgtagagcgagatataaaataaacaaaaaagatgtttgctcattttatgtatacataagtctttagataaagagctgtagaatgaccaatttctaaaaacaccaatgaaacattagaaaattataaatatatgccaagtaattattaatgcctgctttattctaggatatgccaatttcaatagaaaacacaaaagaacagaaaacatagttcctacatgctttgaaataataaaggtcagtttaaggccgtagaaaggcatcaaaatatttttctgacacataatactaaaaacaaaaattagcatttatggagcacttactgcatcatcaaacacctttaaagcacataacatgtgttatcttcttattcttaccactgtacatttggagaaactaaggttcaaaaaggttaatgaactttactaaggtcagacaagaagtaccagaccttggacacaccatgtgtccttcagctttctaagtatatgtctgaagctaagattttatgatctagatgtcaaagtaggtgacttctctttcttatgttgacatggataaacaagcaataagggtacaacacctgtgcctcaatatacttatctgtaaaatggaaagacgacgagcctctttgttaaagaagcatatctctttgagtggctagaagggatacacaccacacatgtataccaaacactgtttcatttgctggtggcatagcccagcctccacaagatcgtggctaaattgtgccagagatttcacccccaaactgatcacaacagcacaaggcattaaacatcacaggcagcacgttcacattgctcaaagtcacttgtttttagcaaacttctgggagaagaacatctctgaggactagattttagaaaacctccagctctgtgaaaacaggactcacctctaggaaaccacaattagtcacagtttctgtcactgagaggtgggcagctgttttccgtgttcatcgcatctgctggggaagcaatgccaagcagaaggaaagggagacacctgaggcacagtgtggcctgcacagttgggttaagataattttgagtcaaccttccctgtctatggctgctgaaaactcatagttcccctctctaaagcagcaggattgaggaagggctcacccactctcacctccttccaactttggctttcctccttcctctcatctcctctacttgcaagccattcggcttatacatgtcaatgctgtttcaacaacagactcagtgggtttgcttcccctgaggtcttctttctctctctcctcttcccattcctcctcttaagtctgtctcttgccccagccttagaacagaatccttgttaactaacccttcttctgtactatacaagagaggagttagagtacacrttgggctttgcaacgggtctgctttcatttgttaagcaattgttttttatttggatttcatttattcatttaaatatttatgargccctactacttaccctcaggatgctaggcattctaaaggaatatcttgctagagaaacrtctccgtttagattgtaccttaagtttcagtcacagcacagaaaagggcttctttggaacctgtgacaggtgaccgtcttctccttttcctctgcagttagattcagggcgactgctttgggctaaattatgaaagacttaagcaggagtaaagagatttttctgaaagtaaaaatatctaaatacctaaatagattcccgagggctgttgtgtgtctctttgaagatctttaaatgcggagacaaagaaggcgtctaccagcagagggttgcgtatgtctgagtgacctttttatgatctcttttgagtccgtgaaggatgcgattaattaaagtcggaagtttgtcactgaaataatagttatgagatccagagaattcaaggtgttggaggactcattaagtagttgcataaatatcatgctgaaagatttaatgagaccacagggtcacttatagaacgatggtgcagagatgacctagaaaaaaataaattagaatcgatattgtgcttctgaattaacagctatagattgctatattaacacctgagacataaattctataattatatcttaatgatgaatattgatgttcttgtcacggaaaaaatgaaaattgctcacatttagtattttacttatcaatagtaaaataaatgtatatatgcgtgcttatttctgtgacatctgggaaccgtgaatgctttaagtagctacaattaaatgaatagtgttttttttttttccttttaattcaaccaatagttattaaatgcctactacacagcaggcactgggctaggtgctgggaaaaaacacagatgcacccttttccccccttcaagttgattatagtatagtgctatccaatagaattttctgcagtgatggaaattttccatgtctcagtgtccagggcagtagcaactagccacaagtagttattaaccatttgaaatgtggctgatgcaactaaggagttgaattttttattttattttaactgtttatatttaaatataaatataaacagccacatgcttaatcttagtttctaatgtgtaatccaccgttgtgtcaaaaaggattgcactgggacaaaagactatgttcatcattataaaagagctgtttacatgggaggaaaggctgacacataattgaggaaaccaaggaaggcttcacagaggtggcagtcactgagctgagacctagaggagcagataagaaggacttcctcatgacaatatgaaaaagcctgagatgcgagtatcatgttacttgcatcttgtggaactgtatgtaatttcatcatttgcatgttgtgttactctgctcagcttccacagcaaaatgtcacagactgggtggcttcagcaacagaaatttattttttcacaattctggagtctggaagtctaagatcaaggtgcccgcgagattcgtttctggggaggcttctcctctgggtttgcagacagtggctttttgccatgtcctcagatggcctttctatgcacatgcacagagagagagagagcgcatgcacacgctggcacttcttccttttcttataaggacaccagccccatcagatcagggacctactcataggagctcatttaaccttaattacttcattaaagatcctgtctccaaatataatcacattgagggttagggctttgatatatgaatttggggtagacacaattcagtccataaaggaagtatatctctcacacatagctcacacaaattctgtagaaaactatcatctatttacctagcatctggtgattttaatcactgcttttgacttgcatagtgatagataacatagggttctagaatagtaacaggtataaaaaatacctaaaccaaagtatccacctcacagaactcgaatgtaattaaatattgcttaagcaaatattaattttcctttattctttgaagacaaaccagtggtgagctggagcttactatctaagctcataagagtccattttaaaatttttcagggattttgtgacctggttattcaacacaaccattactacaaattaaattatataaactttcaatgaaataaatttattcaaaacaaatgtaacaaatactcataactcatcatttaccaattttttcctagarctttgttgaagcactttttaaattttttttaagacagggtctcactgtgtttcctggctggaatgcagtgaagcgatcatggctcactgcagcctcaatttcccgaggtcagttcaatggatcctcccacatcagcttcccacrtagctgagaatacaggcttaccaccacacytggctgatttttttttatttttagttttgtagaggtggagttttgccatgttgcccaggctgatcttaaactcctgagctcaaagcgatcgtcccgcctcagcctcccaaagtgctcggattacaggcatgagccaccatgccyggctcacttacaaataatttaatacctctcactattgccggtgctctcactattgctggtgctctctaggtactttgcatctttacatctactacgcaccatsggtagtggtggctctgacagtctgctactgtacacctcctcccaacgccttattcaaggtcacgactttgttactttgagactggctctgggcaagtatttacaccattgaaaatcaacaatctctaaaactgggccctttcattttccaggagagccgtatattaatcatttaccggcataccactggcacaaaccttaccctctttcatggtacagggttttcccagtatttatctggagttcctgttgcagctttccatggttgaaacattattacccatcctttaaaaacaaaatgaaactttttactgaaataaattaccttctttaaagcttttttttctgtttcctccattagacagagcctgtactgctctgttgatctatgaactttcaggccctcagtataaaatgttttaaggacaacagaaaagtcccctaaaacttacacctagcattgacaacatttttctagccccctcagcaatgtcttctacctaaaattgcctcagctgtaacgtaacatacctcctgctgctagtactagctcacagctaatactaagcgtaacacctgactccattttacaggggccactttttttcctctaaaagttttatgtagcagtaagtgaaatagaatagatgctggggtaaacagcagtttccagattaaatgttattttctgtaggaaacatttctctccaatgttgccccttcacaccatccccaaacaagtaaaaagttgctcagactttgaaaatgtaataccatctggcagaactcacattcgaccttttattaaaactacaattatgtcacacctgtgaggtttaaaattcaaggctccggaagttaaagcgaygtgtccaaggttacatggaaaattcttgagagctcacagtttcctgccctggcctttcacttcggatgtacaccatagtacgtgtgttttctgattagagctctcttcagttatgatttattttaccatcataacattttgggaggctggtatgagggagagtatagaagaaggaattcaagcagaaaaggttaaatgatttacagttttcgccctttctccaagggaaatttatgtgcccccaaattttagaatcatgaatttagattgaatgagaatggataaaatccatttacagtcaatttagattgcataagaatggatgaaatccttggcatatctaaagaatggaaaagggatcccaggaggtagttctggataacttttaacttgaaaacgtctggtagaggccgggcatggtggctcatgcttataatcccagcactttgggagggcgagtcaggcagatgacttgagcccaagagtttgagaccagcctgggcaacatggcaaaaccctatctctacaaaaaatacaaaaattagctagctgtggtggtgcatgcttgtagtcccagctacttggggggctgagagatgggaggattgcttgaacctgcgaggtcaaggccgcagtgagccaagatcgcactactgcactctggcctctggcctggacaacagattgagaccctgtctcaaaaataaataaataaatagtctggaaggatagaaaaagcaagtgagaaacaaaaaagggaccacctatgaggtaggaggaaaaccaagagtgtcaaacaaacccagaggaaaagcagtgcatgagtatgaagggcatgttccccagtgtctaaagttggtgaatgctacaggagagtcttctttggttttagtatccaggaggtcattattggccttgatcttaatgaggaatcagccaaaaggtggggaagggaaccaggtaagagtggattaaacaggagaccaggaacaggagacagcttatctaacactcatttggaggtttagactcgaagggaagcagggatctggtctagtaatggaggaaataggagggaaaatccatttgagaagagattaatgaatccttctaattcatggttcggtctagtttatcatgaaacactaaatcaaatgaaagagttgcttctatagccctgtgcacttccatcagcagattttatattgagttgtgcagatcaaccccattgccaaggaagaacaagaaaaagatatttcacctacattaatggttggcagagtggtttttccctctgataaattaatattcaatggaggaacaatatgttaatgagtatacagcatatattattcagaacaataacaataaaggatttctgtagaccttgtttaaatgttaggttttcttttgctgttgagtacatgaacagcaatacttacacaacttacatcatgatcgtcagagccgatacagaaagccacaggcctgcctggctgctacactgaggtgtctacagaccaagaggcttcacatgtgcctttctgtaattagtatttactcagcctcctatagcagggaaaatattttgcacataataaactcatatatttccttacccattaaggggtaatgtacttaagcacattttcctgtaggatttttaccagcaaggtcgagtcatagctccaggagaggaaagaatgggactcactagaagagaagatcctcattagcaagtgaaaaattttgtaaaacagggattacaagagaggaaggtatttttttttcaaatttttcaaattcctttaacttcttctaacatggaagtcagatctggggggctagagccttgcttgctatatacccaaagatgacagaactcaggataagacatagaaaaagagaaaagcctgcccccttcttcctcaggccttggaatcgttggaagaagaaggggagagagagaatagagcaggaaatgagactttgtatgtacctctctgacttctaccctccaggcgaaaatccggaagattctggagcaggctcatgacacctcatatcttgtgtgtcttagaagggacacgaaagctcttgcatgtcctggtgatgggaaatggtggtgtgagcgggggctggtgtgagcgggggctggtgtgagcgggggctggtgaaagctgggacaagacaaagaggctccctctggtgttgacttcataactgaagtccgctggactcaagtaatgagtggacttggccagactctaccggggcatctcgccccaaatggccagcagtcttgtgtccatggagaaatctagaccaaccatttcacagcacagacctatgaggatgcagagagcagcctggcaggtctaagtctgtgcctttctcccccttggaagacacactgatttcctgaatagatttacccaccatttgggagagctgaaaatgggaaggacaactttacaagcttcaactttacccaaagagactgactcatgcaaaaaaacgtgtaaaaccaatcctatggggagtgaaatgttgaagaaaccataaggaaattgtctatttcctttaacagttagaaggactagggcagcttcccttcctgtcatgggaagtgtggctcctacgccctctgggagagtggtttgagaagtgtttccgctgtgacttaaattatagccatttcccgagcaggcagcccagggactgtggtaggcagtgccagctactcggagtcaattgaaagggaattggtcgcctgggaggtttctaacctgatttcaggtttcctggacaccgcgtcctctcctgacccaacacctgctgtgacagatagatgtttgtaatgaggtgaataacaaacagtctcatgaacattaggtcacatggaacaaaaggcacactggcttaggtggagcctgcattttcctgtttttctaatacatttctctaccaagtctactcactcgcggaaagctttggcaagatttttaggcaaagcctttaaactcacatttttttgaagaaaaaaatgtttgctatttcatggctgaaagagagactcaattctgctgttacattcagaaatctgtttttttgtttttaaatgtctgtttcatacttaaaatctcagaatatcttactgagaccagctctaaagtaaactatttcaccacactcaaagaagacccaaccatcataataaaaggggcagaaagaaacattgggaggtgatggatttgttgtaaaaatgaatgagggccaggcacggtggctcacacctataatcccagcactttgggagcctgaagtgggaggatcacttgagccaaggaaatcgaaatcagcctgggcaagatagtgagaccctatctctaaaaaaattttaaaaaattagctgggcatggtaacacatgcctgtagtcccagctactgaggaggctgaggcgggaggatcacttgagcccaggaattgcaggctgcagtgaattatgatcacaccactgcacagccagggcaacagagcaagattctgttttaaataaataaataaatattaatgaataaaatcaaatattcctaatagacaaactggcttttgacttttctggtggtatttcaattgatttttcctgtagcggaattcataggtgaatgcctgccacagcaagggtccagtgtgaatgaagctttctatgtgatttgtaggtttttcctctgccctgatgtgactaccagaagtggggttcagctgggagttttagaaatgactttttctttttatttaaattttgtgcctaattatattcttagatgtattggtcagagctttatcatgatcattcgtatatctacagtccctcagtatttaagtcttattagcaaaagtaaatgtgaaaaaggtattgtgtgagattttacaacagcccaagatgaagagtatagatgtgtgtggtgtttgtcgatggcattatgcttctatccttgttctgacaggattctggccttttggaacattctgtctaaggattgaagctaatttagttgagaaacctaaatattacatttcgagaatgaatttaacacctagatttccaatcttgaaattacaatagtcactcacttatcaaagagtagagtagaaaatagttctttccttttaacatcttttctctcttaaaattggaggacagggatttataagtagtgttccatctatccatccatccatttatccatccatccatccattctttcatccacctatccacctatggtatgtacttgcatgtgtgtgtgtgtgtgtgtgtgtgtgtgtgtgtgtaaacatatttaaaaggcaggtttactcattgcttttggtacagttctctaaactaaagaagcttatgttggtacttttattgtccatgaaattatattatgaaacaataacaggtaggaaggatgggttcccataaatatcctcttactctctttgcattttgtatcatgtgcactactaatctcttacatttgttaatccattgctatggttttgacataagttggactgacaccttcatttagcagrtgtagaaagaggcccagagaggtccacttacaggcaggagtagggccaggccagaaatctagtctcccgtctttttgcttttcttagcaaacagattccccaatgagcagacttgattgtgtcttgctgcacagcaatccacactaaccatacaggtgtaatgtccattatctaaaaaccccagtccgctttgatttcggatcatgtgcttcccttctctactgtgcagatgtcaggtaaacaggtcatcgctgcactgcttcattgtttgttccagtcttcttttctctgggttccttcctttattcattttcagctgttatgaatttatacacaattaaagggggagggaggcatattaattgaaaaattgatgacataaccttgagggctttgctttaattacctccagtgtccaggaatgacagttcttcagatttatcttctcttccttaatagaggattttcccactggacagacttctggcratatctggtgttcagactgtagtgccatgctctgctatttttattactcacacaaaagtgcgttgatgggccatgggcaagttaaatttatcatcttgcaacggtgggatgaaagagccattgctaaccctggcaaacctaaggtgtacaatttcacaaaattacatagatggtaagaggtggtgttgacacaattggagctgacactttcatttagccgacgtggaaagaggcccaagaggtccacttacaggcagtggtagggccaggtcagaagtctaatcttcagcctccttgctttgtactcccgacctcaaacccraccactctcttctcccaaccataatgcatcttagtgagttacagtacaacacaagatctagaaatatctgactattaaaaaattatctgctgatcataaaacaattgaaaacatagagaagaatttagttaggggctagatgtagtgtttaaaatttgaaaatcaatagttttcctctatagcatcaataatatctatctgtctatctaattatgtataatatgaaacaaaacaacagaaaccataagatatattaatagaacacatataacctgtttatagatattcctaaggaggattgtggcaaagattcctggaagtgatatttaatggtatcttataaaatggtagtgaagagaaaagtaaaacagtggcaaagaatatgaaagatgagataccagtgtataagagagcaataaataattaaaagcaaacaaatgggaaggaactgatctttcagaaaaaaccaggagatacagctaagtgcccagagcacaggatcccatctgagagggacactggaaagagaaaaccaagggaggtaaattatcaaagaaatattataagaaacattttcacaactgaagaatattaattaccagactgaagggccaaactgagtgcccagccacaagaaagaaatgacccacacttaggctccaaactggaaaattttggaataccaaaaacaaaaagaatttttttcaacatttccagaacaaaaactaccactcacaaattgaaagtcagaatgagatcaggcatctctacagaaaatgaaagtttgaagagtaaagcaaagcattcaaagtcctaaaataatttaatggggaattctgaagccatactatcaagccagagaatagaacaaaaacatgttcagacatacaaaatactgtaccatctatatatttttctaaaaggcaaaacaaattctgttctttctataagcatatatatgaatatgaatgaacagagaatttctggacatctacataccaaacttaaaccatggtttacctgggggaggggactgggattagggaggtggccaaagggtgctttgcagctatccatattgtttgtttgcatgtgtttactgaaataatgtaattatgtattatctgggtgattaaaagtattcttcatgttaatgcaagataatccattagtgataaaagttagttttaaatgagagcttgtttgaaattctaagctttcctctaactgttcatctggaaccacttctttcaagtgccctttctatttctagctttaaaaagaaatccaattcaggctaaaaggagccattatagtttcttgatatcatcacatttctgttaatgagcccttcaaacttgattggttcttagtagaattacagtgattctgaagcaatcctgaagtcacctgtttccctctgccatagaaaatgccgcatctgttgctgatataatctaagataacaaaatatcaagaaaacaaaacagagagacctgagcttccaatgaaaactctgtataactttttaaaatatgtttaaatgcatcaatgaatgggaaaaaagtagagaacgctcagaggacaaggtccaagtgaaagcaggtaccagagaggtgagcagagcatgcaagctgtcctttatcttgaaggtgtctatcagtgtcagcttggtagaacttggtattgaaacttggtgtagaatagaggaggaaaaaattctccctgagaattcatgattgcaagctggtcctcactggggggtttgaagcctgaattcaccccacctgacaaactcagggccagactgaagggccaaactgagtgctcagcaacaagaaagaaatgacccacgcttaggctccaaactggaaaatttcagaataccaaaaaacaaagagatttaatttaaatctgtctcatcctggaaatcctctgggctcctgacataattaatcagtttgtttaaaaaggaacccatctttaaaccagaccttaaactattactacagataaagttccaggaaattcaccacatgaaagcaatcacaatgaatacgaagaaagtccatgagtgagaaagagcaaaaataacagacagcagaatgacccctacaaaaacttgagattttggaattatgagaaacagaatattaagcaagtacttttaaggttgacaatatgagtaaaaagcaactgactaaaaaaagcgatgaagcacatttgcaaacaaacaaattgattctctataagtgaaaaatatatttaaaatgcaatgcatagttatagcaacagaaagagaattagtaaatttttagtgatctatataattagcaagaatacagcaaagtatcaaagacatggaaaatatggtagagagatcaagaggcacgaaggatagaatgagaagaggtgagagcaaataggtacaggagattatctgaagaggttatgtttcagaattaataaaattaattctggattaattcatagattcacaaattcatagattaagaaatctcaagcatagtgtattttaaacaatgccacatctaaatataagtatcatatttaagttccagaaacacaagtatcatttaacaatgaaagtaataaagagatttttagcacagcccaggaagacaaaagatggggagcaaggatacagtgaggactgagggtttcccaccagcaaatcttcactaaaggaaatcatatctccatatgctagtcagacaaaaagatgcccactattatccctttctgttcaatgcagtaagacaagaagaataaataaaagatacaatgttcagatattaaatgaaaaaatatttgcaaatgatgtgaataactattcagaataatctacagataagttaatgagttagcaaatatgctgaatataaaattaatttataaaaatccatttcatttccatatataagcaacaggcagctagaataacttaaaaaatatataacrtcataacaagtaaagttattattgggtataacatcaaacaaggtctattataacatgcttatgaattggaagagccaatagcataaaaataagttctggccaacatggtgaaaccccgtctctactaaaaatacaaaaattagctgggtgtggtggcatgtgcttgtaatcccagctacttgggaggctgaggcagtagaatcgcttgaacccaggaggcggaggctgcagtgagccaagattgtgccactgcactctccagcctgggtgacagagggagactcagtctcaaaaaaaaaaaaaaaaaagttctcccaaattgatctatagattaaatgcagtaccaaaaaaagtcaacatttgtagaatttgacaagctgattccaaaatttttatggtaaagcaatggcccaggaattaccaagatgtttctgaagtgggacagaacataaagattcatcacatatcaaaaatcattctgaatatgtagtaattaagatattagtgggatactggcagctttaacattggcacaaatawgtgatctatgaataagcgcacactgatgtgagaacttgatttatgagagagatggcactggagacatgtggagaaactcaggcttttcaataarcattgaaagaactattattattgatatggaaaaaaactaaattggattcctacctcacctcacacacaaaaatcctatctatgtggtttcaagaattaaatatgaaatataaaactataaatctttagaatattatgtagaatacctttgtgcatttgggaaaaggaaggtttttctttaccaatatagaaaaagaacaaaatttaacagaaagattgataatttgggctaaattgaaggtaagatattctgttcatcaaaagacactttgaagagagtaaaaagacagataactcctacacttaaaacttaatcaaaaattagtgttatacatcatcctttgctaaccatgagggatttgttctaggacccaccccgcccagataccaaaacctgcagatgctgagcacctgacacaaaatggtgtagatagtctcaaattgatttccagagggtttgcaccaatttttacttccaccaacagtttacagttgtcccagatgcaccatatccttgaaaattacttaatatcattagacttaaaaataaaaagtagcaaaacatgaatccctggtttagttggttaaataatggtccctcatattcctaaacacttcctcagatatgccagtgtagaggtataaaatagtgtaacactgtggtttatttatatgtattataaatatatattatatatagtaaaacctattcatcctcctatatatattaaatcctctccagattacttatactacctaaaatgccatataaatacttgttacactgtattggttataatttgtattatgttttatttatgtttttttttttcaaaattttttgagttacaattgggtgaataggtggatacgaattcaaccagcagatacagagaacccatggatacagagtcaactgtattatatagtattatatatactctatattatagtaatatattataacatagtattatattattatatatgaaattcctacagattaagtgaaagacaaacagtagaaaaatgtggaaaaactcaaacaggtgcttctaatatggaaaaacacaaacgattggcaacatataaataggctcaagctcattagtaatcaaagaaatgcacattgaaaccacagtgttatattattttatgccttcagacaggcaaattttttaagtctaacaatatcaagtgatttgcaaggatatggtgcatctgggacaactgtaaactgcaggtgggagtaaaaactggtgcaaacactctgaaaaacaatttgagattatctagttaagttgaaggtgtacagtcctataaccagaaattcctcatcaaggtagaaactccctagagaaattgtagcatatgtgtatcaggagcgttgtgccagagtgttcatagcaacactctctgtactagaaaaagaaatgaaaaataacccacctataatagtagaataaagcaatgttaatatattcctacaaaagaatattacacaacaactaaataaatatgacttgtagctacacataacaacttggataaatttcatcatcaaaatatttagttaaaaaaacaagtgggaggaaaatatatacagtatgattcaatccaataagtttaaaagcatgcaaaatgaatcaatattttagtatacaaatatgataccaatcaattttttaaagtatgagaacaataaaaccaaaaaattcaagactctcattacctctgaggagtcagggaaggagagaggattttataaactagtcagtaggtgtttatgcttcaatgttctttatatcttatgactattttaccctcttttatatgtactcaatattgaagagatcaaagctatcttgagtagaggtaaaagaaaaatttttttagttaaaaaatatatttaaggccgggtgcggtggctcatgcctgtaaacccagcactttgggaggctgaggtgggtggatcacgaggtcaggagttcgagaccagcctggccaaaatggtgaaaccacatctctactaaaaatataaaaattagccagacatggtggcctgcgtctgtatcccagctactcaggaggctgaggcaggagaattgcttgaacctgggaggcggaggttgtggcaagctgagatcacgcctctgcactccagcctgggcaacagagcaagattccgtctcaaaaaaaaaaaaaaaaaaatatgtatatatatatatatatatatatatatatatatwtaaatgacacttttaaaaatggagggaggagagtagttatgatatatcagtttactgtaagaataattttgacagatgggatattttcgcatgtcagcatcattcaaattttttattatgttaaactgattaacagtaattacatataaaaagtggacattcaagtcattcagataaagccactaccccgctctgtgggtttgtcagaaggtgtcaagtcctaccttctcagtaggcgtctacacagcctggcgctgtatccctctccacccgccccctcgcagtgtrcactatacttccactgttccagctctttgtctgtccccagatggaaccatgcttctcctgtttctgctgctaggccacaattcctccagatatctccacactggtacctttttctgcagttcttggttcaaatgtttctttgcagagagactttctcaaatggcagagtagtttctatcttttttccttttttttttcttttaatgtgtggcaccatcattctgaaaatatcttattcttgtgattacttgtttataacttgtttcgtccccacacaggggccgcrtctctgttatttctccaagcacctggcatagaggagatattcaacaactttatagaatgagttaatattttgcagactaaatagttgggcaatagaaggttgcatatatattcttattttttaaattggggaaacagtaaagttcagacccattcactttaaatattcatccaaaagatatttattaagcatttagtatgtgtcaggcactgcgctgcatactaagratacagagtgaacaggaaggtagccaggaaccctgtgctgggaatggacaggcctccaggtgcctaagaagatcagagtaaaatcaggaaccaaatgatctggaagctaagttgccaaaatactgtgggtaggattctgggcatttttcttcaataattctatagtgatacctaaagccagtgtggagattaaaggatgagactatcagaggtaaggggagctttaggacacaaagctagtcattgcaccaatgccagagtttccacgagaaagaaaaactaaaaagcagcaaaacacaagtccctggattagttggttaaacaatagtccctcatcttcctaaacgcttcctcagatatgtcattgaaaaccccagctgggaagacccctctgagttccaagactgactaatgaaatgatatttctacctttgatctgttgcaataaaattaagatgtgagtagaagagaacagagatatctctataaagttccctgttacagctcagtcagccctttgtatccatgggttccacatccatggactcaaccaactgcagatcagaaatatttgggggaaaaaacggtgtctgtactgaacgtgtatagatttttgtccttgtcgttattccctaaatcattgagttaggtattatcattattccctaaatttacattgagttaggtattataactagcctagagatgattcacagtgtataagtggatgtgcaacgggcatatgcaaatactacaccccttttttgttttttgttttttgagacagagtcttgctctgtcacccgggctggagtacagtgacgcaatctaggctcactgcagtcttcgcctcctgtgttccagtgattctcctgcctcagcctccctggtagctgagattacaggcatgcgccactgcgcccagctaattttcgtgtttttagtacagatggggtttcaccatgttggccaggctagtctgaaactcctgacctcaggtgatctgcctgcctcagcctcccaaagtgctaggattacaggcctgagccatcatgccccgccagagccaccacccctgcctgcaccactttaaataaggaacttgtgcatccgtggattttggcatccaaagagggtcctggaaccaatcccccatggatgcctagggacaactgtattatattaggttgctaatcaattcgtgtacactttacccagttttataccatattgaactattgatatttgatttgacatacctgtggccatttttgaacaaggccattctgaactaatatgtcttgatgtgagagcatattccctagtggcatctttgtttctatggaatgctctgattcaatttatatccctttgatttatatcctgtttccatcagggaacaagctctcagcactaacgccttctacacaggaatgcctctaccatctctttcagatagttcagaaggcccttgaagatcttacacattctaaataccctgggacactttccaccatatcacaaggtcattacaattgtctgccagtgataattttgttccttaggttccttaacatttactcctggttctcggtgggtttgtcagcatctcacagggttggcaatgacacccactatacttctctctatcccgccttggggaatcagtttaacatcttatctccttgcttgttggaattgacacatccagcattcagactgtccatgctacatgtaggataaccaacaaacaaaattgcgttttttgaaacttaaaagctcaatacctttatttactattagactgcagattgttgggcctgtaagtaggacacacattgcctagagtggtccggctctgtcctttgccatctggctgcatgaatcaatgtcagctggatacaaatatatctctggaaaggggacattgggaaaaagggtggatacactaagcatagaccccagaacctgttctcagaaaaatattttcatggtaaatcctgagatattaaaggacaggtttaaaatgctggctgcatgctttctctgtcttttattttcattggatgctagaatttgaatgggccctgtttctgctttattaatccatattttgtggcaggagaaattcaggagaactcasgaatggcaggaagtggatgagaaagagtgtgtgatagaaactgcaagtagccttaagggcaaaacaagaataatgctactgagatgatgaggcttgcatatccagctggctactgtattctggccaccagaattggatttcagcttggattttygaggcttagcagtacaatgaggactgggattcataaattataattataagtgttatttattaaaaggtagttttggtctcagaaggaaccaaataataataatgcatgcatcactgaaagataaaaayccataaaaaataattggggaatatgagataaggggaaaattgagaataagaataaaaaggtaacttggagtaagggaggaaaaattagtaagccaatcataacacacaccccataacatcctggatattggttgatgtctggatattgagttcatgggtcaacactggccacagaggtgaagcatcattggagtagcttgggcttgcaaggaaggttggcattatatctcttcccatccccagatgccaccatagactcacctacactatccccaggtcctcattgtactcattttattcattcacacgttttttgaatgtattcaatatgccagtgaccaagttctggagaaaccatactttgtaaaaagtagacattgtccctgctccagtgaaatttacccccccaaaaaaggagagaaggaaccaataaacaaatgatctcctgaactaattgtctagctacaaacccagacaagttatctgaaagaaaggagcatggtgccaggaaaacccagactggtctgagcaaggtaggtataggggatcgaagatcaggcagaacatcttggagcaagtgatatttgaactaagagccaaaggctgagtaggaattaactaggtaaatggtataaggtctggtagagtgagaaagwgtgtgtggatgaagagaaaccctttcagatacggagaataatacacgcaaagtccctgtgataggagggaccatggtgtgtgcaaggaactgaagagtcatggtagatagaccacagagcatcaggaaaagaatatacaatggagccagaaaggtagacagaaatgaaacccataaagccttggctgctgcattaacaattttggcttttatcctaataagacttaaggctggctgaaggtagtgatatgatcagatttagactttgaaaatatttttattgattaatgtggggagcaaattaaagggtagaaggggcaagcgggttgcaaaagattagctagggatattatgttagtgcaggcaagagactctggcagtgtggagtcggtttatgacagtggtgatggacagaggtagaaggatgtgagaaacagggcctggagccggattggctgtaggatacagggaaagggaggagtcaaggaattgcctagacatgtggtttgtgcaactgagtggattttgactcccattcctgggctaggtgtcaaactgccaaactgggaatgagggggagggagccatgacagcaacgttggacatagtatgactgagatgttttcaggcatctagagaagtcatgtggatggtgaaatgtaccactttggaattgagaagagaagtcttagctggagataaaagatttgtgagtcatacataaaatggaaggaaagtggagagaatatagcatgacaaagaaaagaaggcctcaccaggcgcagcagctcacatctgtaatcccagcactttgggaggccraggcgggtggatcacgaggtcaggagatcgagaccatcctggctaacatggtgaaaccccgtctctactaaaaatataaaaaattaggtgggcgtggtggcaggcgcctgtagtcccarctactcgagaggctgaggcaggagaatggcatgaacccgggaggcagagcttgcagtgagcaggagatcgcgccactgccctccagcctgggcracagagcgagactccgtctcaaaaaaaaaaaaaaaagaaaagaaaagaaggcctcagatggagccatggagagttttcaaggagcaactaggcctaggattattctaaactcagcactaggattgtaagggcaagtgtttattttctcaccattaacttaaacttcttctctattgttttgtgttacccatgacagaaaactctcactcatctctcactctagaatttcctcagttaaccctaaatcatctttgccaatgatgatagaagtttcactctaaatgggtttaatcaagatgaaaaatataatcgcatcattttataatgaataagacttcacaggtatgctaaatggttgttaccaaagtcatttaaataatagtgattttatgcgtctgtgtttcagtggtyggcttctctggccttgacctgtgagctcagcatgaagtgctgagatttgatttaagatgacctagagtttatgtactgtcatttacttggarattatcactttgcgtatttcagatgacatctcttaggtcagttttgcaagttcattatttcaagctgtctaaaggaggtataggattttgtaacaagtaattaaggaaaccaccataaaagtttaagwttatactatatgatagttttcattatccaatgctgcattttttrtaatagacattgaataggagggaactatccttactaagtggtaggcatttttccccatgattatttgttcactgaatttggaagtgatggaattccaatgaagagctatatcaggatcatatgcacatgtgcagtataggtatttgcatttgctatgtgtgtttccctgtgttcgcgatgtaatatataaaatcaagacatcaactgttgtctccccagagttatrgctatataacttaagcagcaaaggaaaggatttaggggtccattttaatgtaggcaagagataagaccattttttcaagttaataggaaagaaaattatggagctgtactgtccaaggtggtaaacactagccatacagggctatttaaatataaattattgaaaaattgaataaaatttaaaattcagtttctcagtcacactagcacatttcatgtgctcagtgttcccatgyagctagtggctgtggtattggacagtgccaatatgcaacttttccacaattayggacagttctattgaatagtgccaaacaagaacagggttcaaatccaggccagtgcctctgtttgcacagccagtgcactaagaatgattttgacattttgaacggattgaaaaataatcaaaygaagaagaatattttagagcacatgaaaatcatttgagattcaaattctartgtcctcaaaatttctattgagcacagccatgtgcattctgttatgcattgtctatgtgttcacactacaacagctgcattgagtagttgtgacagagactttatagtctgcaaagtctaaaatatgtactccctggctctttaagaaaagtttgttaactcttgagctaaagggaggaaaggagtagtatcacacattaccgtcataaaaaatattctgtatagatttggaaaatgaagtcaataaggagaagggaaagtgtatctagaattcatgcccagatttgatggctgtgggatatcctgcattggggggtgtgatggtggatgggttgaaagctctggaaacgttggcaatagcctttaacatgtatccaaaggctccatcaaaccctcagctttctcagtgtctttgcaggttttttaggatactctcaaaagctcacttctctctgtaattcaccatcttccccattgtaaaaggcaaattaagtcctctcaaaagtttgacaatatgaaacaaggaaattcagttagtctcttgacagcaatgccaattatcttccttttttttaaacattctcttaggcgaatgcctaagacaatggaaaattattttgcagtgagacccaagccaatccagacacaagctgctctcattacaaccatctcttctcatctcttgaggatgagctcactaataagagtacattatctcttattgggacaggcttaaatamatgcaagaacttcattaagtcattctctatcagaataggagctattgagaatttctgcagaactaggattgtgtcttctctacmtatgaawtgagtggtgtcatgacraagcactytagggagccctgccaacctatttgataatgttgatggacaagattgtatggggagtggggagaaaaaacaccttttatattcttccctgatgtatgtataagtagttstttaggaagagatgaaatgcgtggctttgtcctgaatagattcccttaggggacacccagggaattcctaggcccagtggaattaatgttctagaaagagaatcatgcttctgttgcagagcccccttcttaatcctcatgaatcctagttaataacacatataataaagtattcttattgatgcctgtaacttcctttgaaatgcacccaaaaggataaatgatatagacatatgctaaagcaagtatggtgaaatgctacgggtggaatctatgtggtaggtatatgggtgtccactgtaaaatgatttcaactcttctatatgtgaaaagattttcataacaaaatgttagggaaaaaatcctcctggaatacatttcatgtaagcctctaattcctcagcattagccacaagcagaactgtcttcaaaggagtaaatcatcaggaaaagtccgtgaccccaaaagagtgctgtccaggttttctcaggcatggctcaggttcaggcacaaatgcaagttcccagttcccatctcctcagtgtgtgcccgctgacctccctgcaacagttctgcccattgaccagtaggggataatycagatgarcaccttcgtgcttggaatatgagcacttagacttctagattttaaaaggatttctgagcccgatcyttacacacakgctttagtttgtactgtctttctgtacatcctcagttaagagatgctttctggagtgttttgtaratggatttgaagacttctcactgcttcagtacagaatgccctggcaatgcacgcctggaaggagtccatggactgatattttctagccaaagggagctaaaaatcagccattttgacatttggatttttcattgatgtgtcttgtttatttaaytcaatttaatrtgaaagagtagagagggtagaacaaactgttcagcaacgtatagatcattaggttttaaaaccaaataaaaagtactcagtgtaaaaatttgcctgactgaaaggattttgaaattattcttgaaagctctgaagcacgcagaggcagctttggatgtgatggatatttttgctgcatagagtatccagtgccaaagagatgattctgtcagaaaatattacgaagccaacctagctttgataattgcttcagattgtctacatatataatcctaaatctcttttcaaagtacttacactaccagtggtctttgatttataactgctggtccaagagatggcctactaataatataaaacagggtcttagcttcactgcgtatcgtttccagaggatgtgaatcttaagtcaatataagagatgtgtgagtaggaatgagaactcttagaaatcataggaaggggttcaagtcacagggaacagcagatgtagctggcctaaggcaaagggaacagtgcaggatcagaaagaagtccattccaatgaaaagagctgagaccaagggaaaccataatggggccagagcatgcaagaccattgcaagaagcatcaagggcttggagctttatccagaagacaggagcagccattgagagggcatgctccagcttttgttttagcagaatctctttgcatgtgatgtggaaaatgaattggagaggggaaccaggaaacctgttaggaggctacttctgtaatccatgaaatggcaatattctgcttttatgtccctgagaagaaagcataggtaaggaccactgaatacacatttggtagaaaaagaatattccccggctaaggattgggaagataaaacaatcaggaccacccacccattacttcattttcctttatgtatccgatcaagtaccctttctaaaagaaggtaaactttacagttttttttttaatttaagcatctcattagaacctactgaatatgagtctccatgtactaattgtagtaaaatctctctgaaggctggcatcagtatgtctgggcaggatgtatattctagcccagattttgcatagatgtcacaaggagtccagaatcycttgattttcagacatagccattagaagcacactgatcttcacaggtggaggcctccactgccatcagtctattactgctgcttaaattcacagcaccstggacaagaggagaaggtagcctagctgtttcattggcccccgcatctctctgccacaygatggacagccatatcagattgcattagaatgttgactgcatgttaactggtgatccttcttcctctcawtacttattttaaaatcactctaaacgccctgctcttattrctaattagattatttggccttggtgtatagtgtcttggggtcatcagtatgaaggtcaagtcacgcaaaaagagtggagtctccaatgtggatacacccaggaggtcactctctccccaggctgtgtccaagtagcataggggagcacagggctctgtccccatgatgtactgtccttttccatgacattggagatgaagctggacctcaactctgcacatgcatattcctacaacttctcagagtcctgtggataatgacggaggagagaaaccatgcaggaaacagccccctagagcacccaatctggatctaagtttgtcttacatgtttaagaaaaatttgctttaatttattttactgtattaattgattaatttttaaagaaatagtggagtccatcactaagacctcaggccataccttagatattgagatgttgaataaatcccaccagtttattttattgtaatgtgcctcatttttcctaaaaactaaaccccaaaatataaaagttttcgttgttacttatttatttattttagagacaaactctcactctgtcacccagcctggagtgcagtagtacagttgtagctcaccatagcctgaaactcctgggctcaagcgatcctcccacctcagcctcccaagtagctgggactacaggcacataccaccatgcccagctagttatttatattttgctaaatgaatttttgaaataaatttcacagatatttccccattttcagttgaaatttaattttctttctttctttctctttctttctccctctctttctttctttctttctttctttctttctttctttctttctttctttctttctttctttctttctttccttctttctttctgtgcttctttctttctttcgtattgctccttgtgtagcagggctatcccataggcagggtgcccagggtagtgaaagtttaattttcagagtttttaatgccagaatccgacttatgaattcactcagtagatattacatgtcactggcatatgaccttttaatagatattttattggcctaggaatggtaaggtcagagacttgagtggttccacttctaacagcaaaaagaaactatttctggctataataaaatttagcatcttaaaatttaaatagaatagttgtttatacttactcagggaactggagggttatatgggatatttaaataaattgtggaacacttggtcctgaaaactgcccattataatactttaaactaattaaatttcatttaaaagtttcaagcttcctgaacatcagggaaacgtgaaaatacagtcatgggttatagagactagcatcaggaaaaacagccagaaattctgaacttggatctcttcgcatgtccttgttctgcttaagaaattgcttaagagatgaccttgataacattttaaaaatttgagtgcgaagtgcaatgtattgcctttccatggattagagcacatgataactcttgagccagattataggaatccctatcataagattaggagaagtgagagaaaagaatcagaatcgaaagcctgrcccacaggtgactcccttgtctaaagaaaacgcttggtcttgctttcagcacatggcttcctgaaaacgaactttaccttaataagtarctgtttaaaactttacttattaatttgaattagtttgagtccttagggaaccctgcgagggtttagttgtcttgattacaraggcccacatccctcagaaagtaccctcatgtcgscagctggacaaccttaaggattgtcattgtggaatcacggcacaatccaatttcttatctcactgttatgagttgagtggtggtcaccaaaaagacatgtccttatcctgtttcctggaacctgtgaatgttcccttgtttggaaaagagatatttaaagatgttataaaggtaaggattttgcaatgaggagattatcttgggtcttccatgtgggccctaaatccaatgatgtgtgtattagtctgttctcatgctgccaataaagacatcccagagactgggtaatttataaagaaaaagaggtttaatggactcatagttccacatggctggggaggtctcacaatcatggcggaaggcaaaggaagagcaaaggcatgtcttacatgacgacaggcaaaagagcatgtgcaggggaactgtcctttataaaaccatcagatctcatgagacttattcactatcatgagaacagcacaggaaaaacccacctccatgattcarttacctcccactgggtccctcccattactcatggggattatgggatctacaattcaaaatgagatttgggtagagacacagccaaaccatatcgatgtatgtccttaaaagagtgaggcagggagagatttcacacagaaagaagaggaggaggaggcaatgtgtccacagaggcagagattggagtggtgcaggctcaggtcaaggaatggtgacagctactaggaagtgaatgaagcaaggaactgattcccccaaaggagtgtggccctgctgacatgttgatttcagatttctggcctccagaactgtgaaagaatacatttctattgttttaagccactcaatttttggtaagtcaatatagccgctgtaaaaaactaatacgctaacaacgaattctgtttcctccatttattcataccttccctaatgtctgcttttccaggtgaagtatctgaaaggtctttttcccttccatgctcttgcccatccttctggaatattctctgtggcagttatgcagacctttacaaccacatttcttgtgggttgtatgtgtgaaatcttcagagctcagaaaaaaaaaatctgatcaaaagcaacatttgaactactgaatttctttcttttcaagttcattcattcaatattatttgttgaataaatattcagcaaatatttattgagcatgtactatgtgccaggcattgttctgcatgctggagaagcctggggaagtgaggggaaagatgaacaaaaatccctgctcccattaagttttcataggcaagcaatacataaaataaagaggtaaagttatagcatgttggatgtagtaaaaagaaactacagagaattaagaaagaaagagggatagggaatagttttctggtttaataggatgattatggaagacttcaccgagaaggtgacctccagaaaggagatatatcagtcagagttcccccgagaaattgaaccaataggagatattcacccttacatatgtatgtgtatgtgtatgagatttattgcaagggaattggttcatgtgattatggaggctggcaagtccaaaatctgcagagcagatgtcccagtttgagttcaaaagccacaggctgctggtcagcacagtggctcacacctgtaatcccagcacttcaggaagccaaggcggccagatcacttgaagtcaggagttcaagactagcctggccaacatggtgaaaccccatctctattaaaaatacaaaaattagctgggtgtggtggtgcatgcctgtcatcccagctactcgggaggctgagacaggagaattgcttgaacctgggaggcagaggttgcagtgagccaagtccgcgccactgcactccagcctgggcgatagactctgcctcagaaaaaaaaaaaaaaaaaaaaaaaaaaaccacaggctgctgtagaataaaaaagaaccaatgtcttagttcagaggccatcaggcaggagaattctttcttactcaggggaatgttaacctttgttctattcagaccttcaactggttggatgaggccctcccacattagggagggtaatctgctttgctcaggctactgatttaaatgctaatctcatccaaaaacaccctcacagaaacattcagaataatgattgaccaaatatctgcgcactctgtgtcccagcaaattgacacataaaattaaccataacaggagaggagttgagtgagccataagggatctgtgggaagagtaaaatttctaggaagagtaaatttcaaaagctaagggcctggcttgttgaacaatgaggcagcaagtgcaagagggactgagagccacaagagatgagtagcagatgaattcggagtgcccttgaggtgaggctggtagcaggcttgatagaccatggacatggctttttgtctgcttttggttattttgttagacctatttcagggtctccaccrttgtcacattctttcctttttaagagtattttttttttctggttatacccatgaaaccttattttaagtccctaaccacaggctttagagatctatgctgtataaaaagtaattcatccaattctattatgacttatatatagcaatctactcatttatgaaacaaagaattccaggcatatcttgtkttactagcctgtcctgagtattgtggttcgaattcatttgtggactcttgagtagggctgtctgtctataatgacaatgcatatacatgtagaaccagcttatgagagtttatgttttataaactgcataatagatttaaaagtttctccatacatatttcatgattcccacctcagagggcacaggaaatggtccaaagcagacgactctaacttaaaatgactgacaaggcatctgggtcagtgagctttggctgcataacaaaccacttcaaaacttagtgacttgaaaacaaatcactgttgagacaataaccatgttactgctcacaagtctatgggtcagctgaacctttctgctgctttgccttgggcttcattgatcccagctggtcttaggcaggtatctgtgttcagctagcagatcaactgaagtctggctagttgaggatggtcttacctacctggctggcagctgactggctggcagttgggacagcaggagtgacggggccctgtgtctctcttcttctagcaggctaatcaaagcttgctcaaaagcaggagcatagacttcttaaggcctaggcccaaaactggcatattgtcactttgaccacattttactgtccaaagcaaaccccaataactgcccagattcaagtgggaaagaagtagactttaagtgttaataggaggagctgaaaaataactgtggccattttttcaatctatacataatatgctaattaattgtatgtgttaacttgactggtccacagggtgcccattcacttggtctgagtctgatggcctgagaatgaggagagctgatggggtattacacacacacacatacactattgattctgtctctctggagaaccaagactgatacagatttttgtcccaagagtggttctagaggaagagaatttttaggatgagtttcctgaattggttctgaggtttctggcattggttctctcatctgattaggtttaacgatgctaataactctgtttccattaataaagagggcactgatagatagtccgtggtgtactctgtcaatagagatatataaatattaccattggatactcctaatcaaccacttataagaagcaaagattttggtgactgtgtatatgatgcttttgaacatgattggcaaagtaacaaatgtaaagagattggcttctattgtcatcgaacaaagaatgagctcagggtttgaattcccaggtcaaatgctgcatacatgatctcaaagctgctatgtctgccctcgaggagacctttatctcctatagccttaggactaagatcactgaaaatcaaatgcaggatctcatcctgtgactggctgaaccaacacaatttgaaccctcagcctcacaaggtgtctactgttaaagtcagtgtattaactaggaaggaatgygttgctcaaagttggaatggagatcagcttcagccccgatgaagctgaggacattgagcccctaaattatgatgagggttctttgccagcagaagagccctctccagcctcttctaaggggattaatcctgcatcaccagaggaaactctaagggcctccctcaaggcagttgccatgcaagatgatgctgattctattcaggacccctctttgtttctagacctgtaactacattcaagtccaaagaggcccctaaaggtgacgtacaaagtgcaactcatgaggatttatgctatactccaaataagtattaagtatttaaattttctaatttataatagaaaagtttggaaaaytgtgagggaatgcatattaagaacataggataatggtaggagaaacacaaattagatcaaaatgaatttattgatatggataaaggaagcagacagcatgcatttaattttgcagctcaggcatttggaaagtgctgtaatagtttgtttagtcagttggctgaaacatgggccagaaggtcacccacagtgagcaagttggaaatgctgaacttcccttggtttaatgtagagggagggattaaatgacttagagacattgggatgttagagtgggtttgtcattcaagaatgactcactcayattgggagrgtcctggagacatacctttcaccataactgtgggaagtaagtttgtgagggagtcccagcatccttgaagagctctgtgacactctactctgtaggccagaacttacaatggaaactgcagtcactgaattgagaaatctaaatgtaatgggaataattggatcccagggtggcaggggccaagtggcagcactcgaccgtcaaaggcaatgtggccgtgattaccatgatgaacagtggagtcaggcagcaaccaaaattctctaactcacagagaaccatggcactggccagttgatcatggtgttcctggaaagtaaaagagataggctggtgactaaattcttttttgctctctgtaagctgaaaatttctatgtcaaataaaaaaaaaaaaaagtattacctgaatcatgaaagcatagagtcactatccttcaaggaattcccatacttgagccagtttatagacccaaaaccctttcaatgaaggggaggctgagtctctttgaggaaagactcctgtatattactgaaaatttatactgttcatctttctcccatccttctccaaatggacctatggtgttttaccaggtgactatgcattggagaaaaggaaataatcagacctgttggagactactgaccactggctctgaactgacacttattccagaaggcccagtatttcactgtggtccaccaggcagagtagggctaatggaggtcaggtgatcaacagagttttaattcaggtccatctcacagtgaagttcatgagtctctaaacttatcccgtggttattttcctagtctgaaatgtatacttggaatagataaattccctgacagaactgctatattggttcttgtgacctgtggagtgagggctattacagagggaaaggccaagtgggagccactagaactgtttcaacctaggaaattcgtaaacgaaaagcagtaccacattcctgaaggatggcagagattagtgctaccatcaagaatttcaaagtcgcagggctggtgagtctcactatactcccattcaacttacttgacatgtgcagaaaactggatgatggagagtaacatggaaagtttaaccaggtggtgactccaattgcagctgttgtaccagatgtggtttcattacttgagctattccctggtacttggtatgcagttattgatctggcaaatgcctttatttccatccttgtcaataaggctcgtgagaagcagtttgctttcagctgtcaaggccagcaatacacctacaccgtcctacataaggggcatatcaactctccagccctatgttataatttagttcacagggatcttaattggctttcatcactagtccattacatagatgacattatgctgattggacctagtgagcaagaagtagcaactactctagttttattggcaagacatttgcatgtcagagggtaggagatatatctgacaaagtttagggaccttctacctcagtgaaattcctaggagtccagtggcgtgggacatgttgagatattcttctgaagtgaaggataagatattgcatcttgcccctcctaaatcaaaaaagacggacaatgcctagtgagcttctttcaatttttggaggcaatatattgctcatttgggtgtgttactcccactcatttatttagtgacccaagaagctgctagttttgagtggawcccagaacaagagaaggttttataacaggtccaggctgctatgcaagcagctctgtcacttgggccatatgattcagcagatccagtggtgtctagatttaatattatgtgtcatgtcccaataaagcttggaagtagatcttaacaccattgccatcacccacccacacacatccctacaagtgaagaaacggaaacctcaaagcaggtaagtgactggtcasaaaaatcacaggtaataaagccaggaatcaaacattatcgcagcatgctagaaagcctatctgcttttgatttctcagtcacattattttttagtaattcttaaaaaaaaaaaaaaaaagccttggccaggtgcggtggctcacgccagcactttgggaggccgaggyaggtggatcacctcaggtcaggagtttgagaccaggctggccaacatggcaaarcccggtctctactaaaaatacaaaaattatctgggcgtggtggcacrtgcctgtagtcctagctatttgggaggctgaggcaggagaatcgcttgaacccaagagatggaggttgcagtgagccaagatcgcgccactgcactccaacctgggtgacagagagaaactcnnnnnnnnnnnnnnnnnnnngtttgcattcacgtcacagagtgaacattccctttcatagagcaggtttgaaacactctttttgtagtatctggatgtggacatttggagcgctttcaggcctatggtgaaaaaggaaatatcttcccctgaaaactagacagaagcattctcagaaacttatttgtgatgtgcgccctcaactaacagtgttgaagcttggaagtagatcttaacaccattgccatcacccacccacacacatccctacaagtgaagaaacggaaacctcaaagcaggtaagtgactggtcagaaaaatsacaggtaataaagccaggaatcaaacattatcgcagcatgctagaaagcctatctgcttttgatttctcagtcacattattttttagtaattcttaaaaaaaaaaaaaaaaaamgccttggccaggtgcggtggctcacgccagcactttgggaggccgaggyaggtggatcacctcaggtcaggagtttgagaccaggctggccaacatggcaaarcccggtctctactaaaaatacaaaaattatctgggcgtggtggcacrtgcctgtagtcctagctatttgggaggctgaggcaggagaatcgcttgaacccaagagatggaggttgcagtgagccaagatcgcgccactgcactccaacctgggtgacagagagaaactctgtctcagaaaaaaaaaaaaaagcttgtgtggtggactctaacctaatcagggctgatttatatgttgtttttttytcacatattttcctcaatgttctgttcatatcacatagaatcactgagaattcttctctgacattcacagggcccctaagtactgcttcacagactgaactgaagcaatattaatgggtctcytcctagataagcccaagcctcaagcatagccctgcgcctcagtcagccaatctagaaatagggcaagcttctaaagatgaaagggcacagtctctgcttttagtaatctcactagggcaatatagccaagtggaatgaagagatgagacaagggctagactgtgtgacatgggccataggttgacagaagctccaaaaatagagtgagtgctctgaggaagctacacagtagcaagaacatggtgagctgggtggaaaacaatgagttaggtcttgcaggatgcctggcaaaggtgggacgtctgtagagggactggcttgagcaaatggtctcagaacaagctgtggattccctcttttaaagttccagactttcataacttcactttggcctgcatgctttccttttggaggcaatatcttcataaatgccataagaggaaattcaacacagaaccctccactgatttcattttctatttgaatttggcagagacccctttaagaccgaatctcatcaagaaaaatataatctgagctacatattgtactaaatcacttcccccctttttaaatttgaaatcagcttttcttttatatatatttattttgagatggagttttgctcttgtcacccagctggagtgcagtggtgcgatctcagcacactgcaacctctgcctcctgggttcaagtgattctcctgcctcagcctccggagtagctgggattacaggtgcctgccaccacacccaaccaaaatacaaaaatacaaaaaaaatttttgtatttttagtagagatggtgttttaccatgttggccaagctggtctcgaactcctgacctcaggtgatctgcccatcttggcctcccaaagtgctgggattatagctgtgagccactgcacccagccatcagcttttatttcatatgcatgcatagcatcctacaacaataactttaaaaaaaataagwcatcaccattttctatgattgcaacctatatagagaaatagcctggtgttatcctacaagacaatttccttaaaatgtgtgagtaatggctattaaatcattttatggagccatttctaaaayaatactctttgtcactgttaccataattacttttagttgtggccatattttaaagaacagaatgctttatcgtgactgttataaatacaaattatttttccccttgtgggaatcatcaggctaatttgtttaccattttccttctaaaacagatcattattaaaaggaaatcagtacaatgattgtgattaagatcaacagctctcttaattctttgttctgttgaatatcaagttttttctgccttcctacctctgtctttccgtaagacaaatccttttgctggcaaggggtatatgtgtgcatgcaactcctgacttatatctccactcttacacttgtgctaattgatcttaaaattaaagtccaggatgccaatgaaggaaataagctctgaaccacgcaggtcacagtttctgttggttgtatttgtgtcagggagctgtcagactctgcagtttsaaatttaagttctcaatggactctgagcgcatatccttgatgtgtgattcacacctgtggtatcatcatggggtcattttattgaaatgttgaacttgtttgcaggggccttaattctttagctttctgcaaaacctagttatgtgatgtgttctctgtttggggataatagagagtaaatggaaataagacattaacattgcccaacccctattatagttggtgttaataatctttgcctataggtttggaagtaccttggcttatataaccactattcagataaaacaargaaatgatgacatcagtgtaagattgaatgagatttgaccactgcacatgccatgctttgcaatagtctaaaaacctggacagaatgatcagaaccatctaactcaagcccagggataagcaaacaatcagtaaaaaatgcttacatagaaagcgcatgatattttaatatgaatttttaatatttaattaattttagtggctattgyctaccttttatcaaataaacagctatttattattagaacttcttgctaatgattactgattttgactgtttgtaagtctagccttacaatttattcagaagtgtggttttaaacacataaagtgcttcatggyaatgcaaaatcttctactgaagtgttttgtattatttcgatttgaacttaagagattatgtggattctgtacrtaataggttttattcatagacttgatagtgtagcaggacgagccgcagacaagaacccctcagacaccgagttgtagaaggaaagggctttattcagctgggagcatcggcagacttatgtctccaaaaactgagctcccggagtgagcaattcctgtcccttttaagggcctacagctctaagggggtatgagtgaaagggtcatgattgattgagcaagcaggcggtgcgtgactgggggctgcatgcaccggtaatcagaacagaacaggacgggattttcacgatayttttccatacaatgtctgaaatctatagataacacaagcagttagctcaggggttgatttttaactaccaggcccagggcgyggtgctgggctatctgcctgtggattccrtttctgccttttagtttttacttcttctttctttggaggcagaaattgggtataagacaatatgatgggtggttgcctcccttaatagttaaatgatttggcaataacaacaggccgaaatataaaagagaaaaatttaggttggtgcaaaagtaattgcagtctttgcaattgagagtaatggctaaaaccacaattagttttgtaccaaaatatgtatttggatatatattctttaattgatgttaacttacacattaagtttttaaaatattagaaaacctacaaaatctgggttgaaaatgagtatttgaacttgaagcatggcaacctttcacccattttgttttaccaaattgtaaataaatcataacctggtaccatcacctagacagaaattttgtggaatatctacactataaataatggaacccctgtaaagtagtaactatttcaaagttaggatctcctggctttggcaaattttatttttgtgaaaattaaagttgggcattggcaacccaataccttttagtgttccactagaacaaaattaaatattaggccagtaatttgaygcagtkgtatccaaacttttccatttcatgccctaaaaattagacactcacaacccccatcataggcatattcacttatttgtgtgttcatttttacgttgtaggtattactagactaacacatgtgttcatcataaatgawtgtataatatatatattttaaatgataaaatataaataatgagaaagaataaagatgaaaatratgttttattttgtttgttaatgattcaaaacaaatctttgccctccatatagagagtccatgtgtttgaatagactttattattttcaaaactcctcacttaacactttgatacaggaatccaaaactctgatcttaagtttggattttcttttccatatttggttttaatggctgtcactgctggggaaaaaaaagattcctcacacagatttgaagattaaaatggaaggtgtgcatcctttgccgaggctactgcttcattacactccttttattcattcccatctaccagttgtaaaggtttgactttctgatggatgcttaatttttaagtgcctgctaattacaatggcttgccactttcattaacatgccatacacttaaggcaaaactcactgttagctgtgagaaagtaaatacatatttcaaacagtcttcttcataaaattactttttaaatggattctcctgcaatatctgattgttttcacctcagaatgtaggaaaggagaaaacgtcagctctcaactctgccgttgtccttttgtttgccgttggcacaattgctaatgtggttcatctcaatgtctttgcagggtttagtccatttggtgagggtttgtttggttaaaatagataaggtagcctgtaaatccattgaatctgagcatgtgtacactgaatgtgttgaaacaagctgaaaagtcatcgtataagcaagggcaccactgtccaagcccttgaacgtgtgggacaggccaggttccatggctaatgcctgtaatcctaatgctttgggaggctgagccaggaggatcactttagtccaggagttcaaggcattgagctatgattaggccactgcactcctgcctgggtaacaaagtgagacctggtatcaaaaaaaaggacgggggaggggaaaggtgtggtgccctcttctttcctcaggtctcaagccctgtaagtcactaacaaccttttaacaaactaatgtggtgccagtgtcaataggtatgagtaaagctaatttcccttacaagtgaaattctagtacacttttcccataatccaatagatcatctttccttttatcctctgaacatatgcatgcatcttaaaagactacggatttaaagtactagattaggccaggcacggtggcacacacctgtaatcccarcactttgggaggccgaggcgggcggatcacgagatcaggagattgagaccatcctggctaacayrgtgaaaccccatctctactgaaaaaaaatacaaaaaattagccgggtgaggtggtgggcgcctgtagtcccagctactcgggaggctgaggcaggagaatggtgtgaacccgggatggggagcttgcagtgagccgagatcacgccactgcactccaacctgggcaatagagcragactctgtctcaaaaaaataaataaataaaataaaataawgtaytagattaygtttttcttcccaattaaacagatcatgagttcttttggtgactagggtgttgtggcattttggaggcaggaaagatacaggaagttcccatgctataagccttgtctctttgaacatryctaagcatattagatctgttaatttttgcttcatatagtttgaaggtataattattgggtgtatacatttttagtattgtttctcaaatacattgatctctttattatgaaatgttctttctgtattttcttgccttaaagtaatgctgttcgatacagtagccattagccatgtgcttatttaaatttaaattaattaaagaaaaatataaaaattcagccccgcctttgtgctagtcacatttcagatgctcaatagggctattggttaccctatgggatagcacagagaacatttccatcattacagaaagttctattgggtcgggctgccttaaggctacttcatctaatattaaaacaactatatcaagggtttttttggttgacaattatatggagaattaaataaatcctgaatcacagatgaagattttagcatatccctctctgttactaacaaaataagcaggaaggaaaaaaaaagaaaatcactaagcacacagaggatttgtttaacacaattaaccaacataatataattcacatatttaatgcattacattcaacagttatataatacaatacgcattaagtacgcaatgcggacacattggaagatacacctggctgccaagtgtcctgtagggaggtgttgattgtagagacacacagcaggggctatataattccataatcaggaaacccagcaaaactggtatcacacgaaggaattgcaactattgtattagtccattctcacacatctataaagaactacctgagagtgcgtaattaataaagaaaagaggtttaattggctctgcagcctgtacaagtagcatggctggggaagcctacaatcatggcagaaggtgaaggggaagcaggcacttcttacatggctggagcaggaagaagagaataaagggggaggtgccacatacttttaaacaaccagatctcatgagaagtcactcactattatgagaacagcaagggagaaatctgcccgcatgataaaatcacctcccagcaggcccctcctccaacactggggattacwattcaacatgagatttgagggaggacacaaatccaaaccatatcacctatggtttgggttttggtagcacaacactggtacaacctactactcagggatcctcaaactttaatatgcatgctaatcaacttgaggttctattaaaatgcagattttaatagagtargtctaggtgcactttgtaacaagtacactttgttactgactttaaaacgagctcccaggtcatgctaatgttactggtccgtggaccacactttgagtaggaagattctaactcaaaagcccaaactagtagcttaaacaccaaatcatgacagaagctgtttcccctggcttgtatcatattgattaacacagtaaagaattagctgctgacatgtacaaagtgtgaagtttcacataagcataagcacctgaagcgtctcttgaagtctgggaagatccggccagggcaagtctgcttccatacatggtccatacaaaagtccactggagcagagtagaggccactagctttcgagagcccatgatttatccttcaccataagtcccacctccactacactgacaccttgccaaccatccatctcacttctttatttgcctttctaaccttctgagacaaggactctcaacctaagctaaatattggaatcagaggagctttgagaaatactgatgttttggtctcagccccaaagatcttgatatggtcatttcaaggggtgggaaaagcctgggcattttaaaagctacccaagtgattctaatatgaagccaaggttgaagacttctgtttaaatcaatttagtgacactagcaagattctcacacaccatcctcagacattctgattctgaagctcaggatcaccacttcctaatatttgcaggatctgagacaaaagaaagctctcaatctatagcctttcaccttgtctttctacttcccacccactcctatactttcttgcaccatgaaggatcttctgtatatagaattagacacacatccaagatctgtccttactccctttcaaacacccagcccttggtcactcttgaacttagacctttgcaaaatgactgcaaggtctgccattagaggaagaggaagagggcctaaaaaggggtcttggggccagttgggaagggaattttggtatcttgttgaagtgttttctgacaccaatctcttctccaacatcggctgaatgtcgaaccattcaattcaattttgatgcacctggatttagggcagaccccacagcttaagtcccacaagactgcccccacttcaggtgccagttgcaagacttggaccacccatacttctgaccaaccagctgtaagtcagaggttcccacaacactgtcctcagcttcaataatttactagaacagctcacagaactcagaaaatccactttacttacatttagatttacagtttatcaagaaggatacagatcaacagccagatgragaggtatataggktatcrtagtctgctytgtgctgctataacaaaatgcctgagactggcaatttatacgaacagaaatctattttctcacagttctggaggtttgaaagtccaaaatcaaggcgccagcaggttcggttgtctggtaagggctgcatcttccagaggggaggaacgccatgtcctcacatgatggaagacagaagagcaagagagaccaatgctatcaaaagcctttctaaggaccttaatcacactcatgaaaaagggccctcttgacttaatcacctcttgtttgccccacctgttaataccatcacattggccattaagtttcaacactttaactctagagggaacacattcaaatcatagcacaggacaaggtctggaagagtcccaagaacatgagcttatgatcctacggagttagggtgtgctgccctcctagttcatggatgtattcaccaacctggaagctttacatcattatttaagagtttttataactcaatctttagctctcccaccaggttagtgagggaggctgaaagttccaaccctccagtcasttgatctgtctggtgatcacccctatcctgaggctctccaggggccctattctaaatctacttattaacataaattcagatatgattgaaaggggtttacacaaggcctccttatcactgtgaaaaacccaagcgtcttaggaggtctatgccagaaacctgggacaaagactaaatatatttcttatatcacatctgggtaccccagcattagggaggccatgtctccatgtgcaggagtcatagtcttgtgtactaagctactcacctcatgaggagtgtgtggatgaaggagggctggggggccatgagggcccaagggatgggcctgtcttgcccacatctggaagtccgggatgaggactgagactctctttgtagcaggttccccccagtgattctgatgtcagttgtccacagggtgcacttagaaagacaaactctgcagaaggatcagagctaaagaagaatagcttcccctcttttctctctgctgcctaacatttcttagtactagtcagagcttgggagccacacttggaatttcaaaagaggaatttttcatgcttttctaaatggattgcattttgggggcttggaagccaaacacttagaatctgtaaacagtttgtcctgggagagaatggctgcaggctttcagaacaagagagggaaatttaggctgactgcaccctctgcttctcaaagctctttctgctaaaatgctatagttatatgtggtcgtagaaataaaagagaagccaaacactcaagtgggcactgcttcccattttttgamtaatgagagattattcaaaatcttgatattgagttcttactacctacccaagcactgagctgtcttctrtaatcatccacaatatctatgatgtcagctccatcattatcattttatgtaaggaaactgagatgcagactggccactggctcaagctcatacaactattcactgacagagttaagaaccaagcagggccgggtgcggtggctcacacctgtaatcccagcactttgggaggccgaggcaggcagatcacctgaggtcaggagttcgagactagcctggccaacatggcaaaaccccatctctactaaaaacacaaaaattagtagggcatgatggtgtgcgcctgtagtcccagctatgtgggaggctgaggctggagaatcgcttgaatctaggaggtggaggttgcgttgagccgagatcatgccactgcactccagcctgggtgacagaacaagactccatctcaataaaataaaattaaattaaaaattaaaagaaaatataaaaaaaagaaccaagcagggctgagcgcgatggctcatgcctgtaatcccagcactttgggaggccaaggtgggcggatcacgaggtcaagagatcgagaccatcctggccaacatggtgaaacctcatatctactaaaaatacaaaaattagctgggcatgctggtgcaggcctgtagtcccagctacttgggaggctgaggcaggagaattgcttgaacccaggaggsggaggttgcagtgagccgagatcacgccactgcactccagcctggcgacagagcaagactccgtctaaaaataaaaaaaagaacgaagcagcccggccctagaactcatgtgctctaaaccactactctaaaccagctctttaaaacacgtaagtgtaaatgtgcacagatttcaatttagagctrtgtgactcccagcagatttcttttttcttgagcaaaggagatgccactgtgaatattaatgtctgtcatagccagagcagacactcttcagcttttgggcaaactaaaatgctcaaaaatacccacaggcacaacattttctaatcgtgcttccagagccaggcagtgtgttcatgcatgtaagacgctgtataaatgtaggtagtagcaccaatagtgctcatgaattatggatgaagaggaacatccagagtcaaacattcctgagaaagcagaccaggctccctttactgggttaggaaaagataaaaggctaaacttcccaaggcagttgactggtgatttttcattctaacatcygaaaaaataggaataaagttgctatggtttgaatatatgtgtcccttcaaaattcatgctgaaatttaatccctagtaaaacagtattaagtgaggactttacgaggtttaggtcatgagggccttacctccatgaatggggatagtgcccttataaaagggcttgagggagcctgctttgctctttttgcccttctgccatgtgaggacacagcaaaaaggtatcatcttggatgcaggagatgagccctcaccagacrccaaatcttctggtgccatggtcttggaattcccagcctccagaactgtgagaaataaatttctattaattataaattacctggtctaagatattatgttatarcagcaggaatgaaccgagacagcagcctatttcagaagcctgtctctgatgctcctattccaaccaaaatctttaagccagagatcgcaaccagtaacctggctgaataatccacaaacatggtttattgtactcacacattgttataatgtttttttcttagtgttctttcatcttcttgttgaacaggatgccaactttaaaaataaggagatatcctttaaaaatgtttccttgctttawttgaaatattcaaagacctggctcactggggccatgttccaatggacttggcagcaattagctggatctgaggagtggaatccccgattagatgaccttgtgtgctccctttagccacagtcaccatcactgtttgttaccttatactcacataccaccactgactaccaccagtgcttttcactctttttctttacctctcttcctcctaaagtcatttgcatttaataactgctaatttcctgttattcaaggtccctagcaatttatgatatatgtgtttgcttatataaacttgcttcaacaggccacagtagcctaggaggtagtcattgcttgaagatttatactgggctgcaaaataaccctgagtgtctactcaactttcagttcgaagtgccttatcctgtatggtagtgggttacyttttgcatgccaaytccatcatatggtagcagatgcctgggactttttgttgataaggattccaaggctatctagatggcctggaagtaccactaagattgattagtgatgtctgccatagtcaccccagctgctgctatccatcagaagtcatcagccctgtgcttccatctccatttctttttttggttttttttttttcatttttttcattttttttcattctgagtgtcatcatttaggagactcacacaaaagtaagagaatctttctagggaaatgttctcttttctttgcttgaactgaagttgcaatttagaggcagttacccttaaccctggcatctttttcccccagtacaagtgttcatagaagcaccacatgtaacaggcaaaagctggaaacaacctaaatgtccatcaacagtggcatgggtaaatgaagtgtggtgtattcacatactttatagcaatttttaaaaacccgactacagctatctacaacaacaaaaaaagaagccagatgcaaagaactatagactgtatgactgtttatataaagttgcaaaataggctgctgtctcagttcattcctgytgccaggttttatctctgcctcctaattattctgtcatttcagccacatctggggttactaagtgtcatttctaaattgtacctactgacattagcgaatatctttttgctggtctcccaaaagaaagatccatcatttttctaactcctaattgaagaacctaagaaaattgctgtgttacaaagtgttccttttcatcaaccacaaaacaatcctccaggacagagttgagcaaaaccaattctgtccaatccagtctgagtctaatgacagaaactactctgagttaccttattcctgatattccaggactgacatcagggcctctgtcccaagaagtggaggaaggcagaactcccactarccatatcccagcctccttaagatgggcctgtggtcctgggaaatctgctcttctaacctttccttygtccacagaagccacatcagtagagggtcagtyacagacaaggggcacacagtgaataaggaggcactcacttcttggattaattggcttagtgtgagaaggctcacttttacatcctaagattggaaagtgccagaggcccccacaaatctccaaaagcatagtttgctctccrattttctcaactctttcccggtttgtaatgtttattgttttcttataatatttaccaaccatcttacctcaccaatgctagatcctacaggtaacagaagcacagtataccagaatgatcacatccaatagcccctggctggctccaggtgtcatgaagtracctctgattttgttactgcccctgagtggtggccagaagttacattatgtcagtttacagtgtggcagcccccatatccattggggacatgagtgtcaggcaggtcaggtgagtgtcaccacctggaaagtggaagcatctctaaaaacaacttccacagaatgcatgaatttacagatgatatgaaaacatgtgcatattgaattttctgaaaartggcttatcacaaaatttaaaaaaagtatttatcaaaggaactttgggcacataaggaaataaatccaatagtatgctcatgacaattagttatataaataaaataaagtaggttattagtccatataagatagcctcaggaaaaaattaaatrcccagataaaaagtatgcagcttgacaaatttttacagaatttatgaaattaccacttgtgtcaagatacagaacattatcaacaccccagaaacttccctcgtgctccaacccagtcagtactacctccatccggaagtaacagctattctgatgtcagtcaacacagagattagtttttctgttttgcaactttatataaacagtcatacagtctatagttctttgcatctggcttctttttttgttgttgtagatagctgtagtcgggtttttaaaaattgctataaagtatgtgaatacaccacacttcatttacccatkccactgttgatggacatttaggttgtttccagcttttgcctrttacrtgtggtgcttctatgaacacttgtactgggggaaaaaaaatgccagggttaagggtaactgcctctaaattgcaacttcagttcaagcaargaaaagagaacatttccctagaaagattctcttacttttgtgtgagtctcctaaatgatgacactcagaataagacgctttcttctccttccacagtcccctgtgctgaggcattttatgtgattgtgtgtgtaagcttcaaagcgttattcaacaaagaagcgctgttctcccaagctctaaccatttactcgtaatgggcatatggtatttcgagtgctgtactttactatttcaccactagagggcaagaggagccccacaatgcttgacattgccagatctgcagtcaaaatgattaatcatgaggcaaaaacaagaagccagagggaaaaaaggaagagctcacaaaggcaaaataaacatccataaacttaaacttycctgggtagggaagatctgaaaaatgtcacccatgagccactttctaacactcgttccatctttctttttccagtgtgcaaaactcaattgcacagtcctcagttgctgaaactaccacccaacagggtgggactagatcaggcagacagatctcagagggcatttttttttagcactgcctagagccttggttattaggaagccgagaatcttgcagagstcccaggcctcaggggctctgaacaagcaacagagagttctgtgatttcttcttcattctaagtaatatttcttccaataacaccatggtgtttactaaaatcaaggcactaatgagtaaggctaccagccccaacacctctcctttttctcctcttctcccgggtccaggcccttctacctgccacaaacttaatcaagattacagaatggagatgtgttgttttttgcaaggggaggggagtagggaaattaattacgaagccaagttgctgttaaactatttataataaatttctactggaaaaggacctttggctgacaatcgttttcttctgcctcggcatgaccaaatacagtaagaattcaaaaggaaaactgaaaagcgaggaagagcccacagctggagcagtctgttttcacgtctccacgctggcgaacgacaaactcggcaaggagcctcctgtgtatttcctgtcctcgttatctcagttcttgctctgaagggctaagaagccttcaccgttagccaagactccttcgtgcttcagcttaattttccttgcataattttaaatacagatcatgtctacagtacagcaattaatggatagcctaaagacttattatttcaaactaattgatatgtaggaaaagtttaaataacataacggagaggggaaattttaaacgatgtatgcacaatgaatttaaaatttctctctgttgcagatggtagcaaaaacatatgattaatagggggatgtgatcaaaatgtagaactgacttggaaatctttctctttttgwtattcttgagcatatgattggaaggaagaaagattcagacatttcagaaatggggtaaggggtgcaggggagagcagattcttccccccccactcactcccaccaattctagggagttatctcacaagataaaagaacacctgagtatattttgagttgtgctgttaggtcagaaataagaaatgggagaagaatgccattatttccattctaactctttggtcaaatccccctcttgagataaacttgagagagaagtctacaaagaccaagttcacccagctgcagcagaacctgttccaagtcaccagcactcccagacccaggattccctccaaattctaagaaatgtgctgtgatgaatcacctcactgacacacaaaaaaacaaaaatctttctaatttccccattcacattccagcaagtttaataggaaagtttagaaaactcatctgaagaaagaatactcttcaaatgggagagagcaggaacattttgttctaagaagggattgagacctaatgatgccagacaacattttaaatatcagaacacagcatttgtaagaaaatagaatctgcttcaaccataaaccataaggggggaaaactacctttaaaatgtattttcttcatatcaaattcatgtcataagaatatctgaatgacttctggccaagtcacttaaattttgtggtcttcagtctttttggtcttctcagatgtaaaatttgccacagactggttattttttagaaccctttcttcccttctgttctcctactttatttaggtagctctacacacacattttgaaaattggatgaacaacctccttctcattggtccatgcaagaccatattactgtatttataatataatacacacccatatacaccacaaaaactacaatactggtttctccccctctggtaccctggcctttcattctccaccctctgcccttcaaggtaacaatgaatctgaaacgtgtgcatgtatatattcctgttttttatatttacatggttatagatatacatgtgcatatatatcatgcatatgtattcctataacactttatttttttatcttagttgttttaacttcataaaaatggtatcatatggagtatcatattgaaatatgataatgtaagttaaaggaccatactgaacctatactgtataaaatttgggggagcctacaatttttcacttaaaaatatgttgcttactttgggaggctgaggctggtgaatcacttgaggccaggagttcgagaccagcctggccaacatgataaaaccctgtctatactaaaaatacaaaaattagctgggcgtgggggcacacgcctgtagttcccagctactggggaggctgaggcatgagaattgcttcagccagggaggtggagtttacagtgagccgagatcacaccactgcactccagcctgggcaacagagcaagactgtgtctcaaaaaaataaataaataaaaagagccagacacaaaaaagtatatacattattattcagtgtatatgaagagttagaaaatatgctatcttgggtaggggacaggatggctagtgattggaaggtggcaggtagaggtcttatgaagtgctggtattgatctgagtgctggttaaatgggtgtgttcactttgtggaagaaaatcctaagtccatgaatttgttgtatcagttagctattgctgtataacaaattccaccacaaaactcaggggcctaaaacaataagcatttattattatccacaagctggtgagctgggaagttctcctggtcttagttgttctcacttatgtgtctggagtcaactgagcatgaggtggacagctctgctggtgatactggttggacccgctttcatgtttgagggtcacttggatgtaggttggtctaatatggcctctgctagaacgaccggatctctccacttagtctctaatctgtgaacagacacgcccaggcttgttcacttgctggtggcagggtttcaatagcaagagtagaggcacatgtggccctttgagaacaactcagcactgcaacagtatcacttttgtcatatcctattgacaaaacaagtcacaaaakaggagtgaagaatggtgggtttttgaaaactcaatctaccacacttctcttatgtgaacttctctctgtgtactaatgaaaaaaatttaaataaagtatatctaagtataaggtatctatattgttaaatgttgctatagtttattttgacttattctattccatgaatgtatcgcacttatccattctactgtcagtttgcatttagtgatgtccagttgattgctgttttaagcagatctgctgtgaacatgccatctcatatctcctagtatgcaaactctgtaccagaagttttcttggttgtataycaaactgtggaattactgggccatagggaatatgaatcttccattttacatgatgatgctaaattgtcttctgaagtaactataccactttacactttcttcagcaatatatgaaagactgtrttaccctgacacttgccaatagttgatattaaygtcagacttcctaatatttcctactaagatgagtatgaaatgatatctcaatgtggtctagatctgcctttttctgatcagtgaagaaactgaccatcccttctatttagtttgtttttgttttgcctttagccacatgttccttcttaagcaaaatgcctctttgtatcttttggtaatttttttcaattgagtgattggtcttctcattacttcataacaattctttatatattctcaatactattcttttgtcagatgtgtttgttgtgaaaatatttgcccagtttatcacttgcttctcaccttattgagggtgtcatttgaataagtttcataattttaagtatttgaattaaatttttatttaatttttattgttagctttacttgaggcctatttagccaatccttaactacccyaggatctgaaatagattaaaggtttagcagtcaaaacataaactaaatactgtttcatttgcactcacacacacacaccacggcctgctcttgttacaagcagttttggtaatgyggctcctgtgttcattatgaaatatttaggtatggacttgtcctcagtmatagcatctaaatatcacaaactcaggaaatctaaattgttctgacaagttacaagaataatttcaaagaacattttcttttggcagtagaccctgatgttgtgtagtaatggaaatgtttaaattccaatgataggacagggatggccctggctagaataacacaaaaatcattcaaatctaaatggcataaggctgcagcagtccaagtgagatccctcggggagtcttggaccttttccaagatgtaggctctcttcagtgtgagtgtgcagagattgtatgattccactggggtcacttccactgatgggttcaatggactacagcactgaccttcacatggcttgttttcatagcttcgagtcctaaagggagatagggtcataggaatatttcaacagtgtaaacagctcacaagtcttccttgctcacttacttagaggtgaccagatgaactgaacataccctaatgctaggctcttaaaataggatcttgttttaaaaaggggttcagtagacaaagaaggccattccctttttcccaactcttgttctyagggtagtgttctcaaactctggcaatttgagtgtgcaaaaaaaaaaaaaaaaaaaattagagtagtggaagtgggacaratagttcctctttagcctcctgacatacctcttgtttggagggataagataatctctcagattgccacctgggcaaggaaactgggcaacacacttccaactcagaagccctgaggttggtggcctgctacctctttgctggtccctcttcctcaaggtttccgctttggaagtagggactgattcttaattggttcatctacttctaaggccagcacttaggaagagttagcttgttcttgattggctcaagaactttaattaataaagaagcaccgaatccagaatatttataaataacatctgctcacaaatagaacattgttccaaatagttcagtctaaacactttcagcttcaaatccacattaagaaaatcataacaattacctttaaactcatgtttccaaaaatgtgatgtgtatgtggattacctgtggatcttgttaatatgcaaattctcattcagtagatctggagtgggcctgaagtgatactactggtcctaggaccacactttgagtagcaaggctttctaaagktctgctctcccgcacagctgaattgaataacttttccttctagagatggcatcatggttagcttttgaaaaccttttggttttttttttaacttcagtcttctagtaattcaagaaagctggctattttttcaatctttctggatgttttaaggatctccttctaattctgaaatgttgctcaggtatttcttgttgaagtcttttccacagggtagactctagcttggggtctattggagcaagttaaatgtcttcaaaggtgatgggttattcaactgaataaatgttttctagaatgtggtgaaacctggaaaatacagtgggagtaggagagggaagaaaaaaaaaagacataatatacttttctccactctacctaccatgataatacatattaatcttgcctttattctttctttattgtatataaaagcttccactaactttccattctagggagtcattgagagaatataaatatgtgggctttttgttaaagcctgataggagaagagattattatawgtaattggagactgtggagtcagaataactgmgtttgaattctgacttcatcatttaccagctgtgttgcttaaccataaaatgctcayaatatttactccagcgaataatgggagaattcacagaggtaatccttgcagataatccctgctaatcatttaacctagtgccaggatatagtaaatgctcaataaatatttatagtagtagtcattgttatttgataactattacagaatagctcccaagggcctactgaagaaaagctttgtgcttaagacactggcaataagttcatttccatrtggtgtaacttgaagctttggttttatagrttaactcagagacaagtcctaccacagtgattcacagttcctgaattcaaaacactgtgcatatcactgatttggcatttcaccttatatgactagctcrtgttattatttaactttgccttggctcactaattttattttcagtttctaacctttaagaggtaacagttttatactrttcaagactccccaaaccaaataccacagagccatttgtttacattagtaggtccccaataaatattcattagttatttcactgattaattaaagtaatccattcatctccacagggactcaggctggctgaatcaggagagacatcttcagatctattcctctttgagaaattagtataatgtcagtgcattctcatgtgtttcttgaattatgagctccctgatgtctaaagaagactcacagggaagagttcatatactgacagaacaatcattaattagttttcaaactagttttgatttgaaactaagtaatttcaatcagttttttgactttcaactcagtgttgtgacatcatggtggacacaactttcttagaggtatcaataccatcatcatgtccatgtttgatttgacagacaaatattgcaattttattctgttggacattttccaaagaagttggttactgatttattaaataaatatacatattttagggtagtggaagaagaaggtgaatagaaattaatgggtgagcaaaggtgagggaaaaccaaatcaccagttttctttctgattatattttaatctaaaaggctatgtttttaatcaggttatatgtcttgataagtggcgtttctacttaaaaaatgttggttgtatttgtatcccaagtaggaaatgcaaacatacttgtataaagcaaacaagtttaacttgtgtgtttgtattaatgatatgtgatcaaggcacaggaaatgttagtaaagaatcatacacttattatgtttgtttgggacagaacaaaggataagtcattagttggtgagttcagtcattttctttgagataaaacatttggttaaaaggcaggctagcccaggcatcatggctcatgcctgtaatcccagcactttgagaggctcacgcctgtaatcccagcactttggaaggccaaggcaggtggatcacgaggtcaagagattgagaccatcttggccaacatggtgaaaccccgtctctactaaaaatacaaaaattagctgggcatggtgrcgcgcgcctgtagtcccagctactcgggcggctgaggcaggagaatcgcttgaacccgggaggcggagcttgcagtgaggtgagatcrtgccactgcactccagcctggtgacagagtgagactctacctcaaaaaaaaaaaaaaaaaaaagagatcaacttgggcaatgtagcaaaaccccatctttataaaaatctagaacttaaataaaattaaaaaggcaggctgatggaaacaatttaattaacttgatttactgggaaacattgatttattggaaaaacaatgaaaatgtacattgatttattggaacttgattaacttgacttattggaaaacattgaaaacatacattgggacaactggatattagatatttattttaatgcagaagacttttctttaaaattgtatttcctttaaaaatagactggcattatgttattatttaattattattttaatgcaaaagctattttcttaaggatactatttatatttctgctactgaatacagcacagtaatatatttcctcttgtagaatacatttagtcttgttttgatgggataaactgcttttgaatatactcactatgtcatgcatgatttatttatttaaatttcagcataatttttcttgacaacctgttctttcacttgaaatgttatgtaacaaaaacaccaggaccaactggcattttagtttatccgtctattccatatgctgctggatgaagcggaaaatgaatgtgtatcatcactatgctgggcacattttattcgcagcctgtcttttctcctgtacatcaatttctcttctccgtttggaaatagcttcatagcaggttaggtctatagaccttaacctgagtgatcacatataatgtaacaggaatctaattggctatggttagagtcagggaccaaaatatattcaaacttacttggattgctgcttgaatataatcacttcaagtccaggtagaactatttagactcagaaagaaattgatttttttaaatctaaacatagttactgggtaatttatgatagatctccagcccaaacatttcataaacaagtcaaataaggtcagcatgcatcaaggactagggcacattaatccaaaactacaagaaaaccctgcaatgtgtccactcaatatatgccagccaataaattcaaactaaggactaagctaaggtcttcatttgggttcccccagaaacaaatcctgagatgaggatttgagtataatagtgtttctgagcagtggtcccaggaaaccagcagggaagtagagaagtgaagcaggaaagggagggtagcaattaaaagtgtggcttttctcagacaagttacaaatgtgggcaactggtgatcaagcccagcatggaattctgggaaaccatgtagactatgcaccttagagttatttcttgcaaagggtgagggagctggagtctatatacaccaactgagcaggcagtttcagccgtttttgcaccctgcaagagaaagcaagctgttggaattaggacagtctgcatgacaatggttaggccaaagagctataaactgggcactaacaatcattagcttcaaattggatgagaagttcgccaagattataatgctagagtctccataattcaaatttcagtggcattaaacccacacctgcatctgacaataatcaagtatgtttgggtttagaaaatattttccaaactgacactacttttttggcaagacttagccattaaatacatgaatgatcctcaacaattcatgtaaatgagaatcacctgcaagccttcttcaagctctaaatcaatagttctcacactttgggattcatcagaatcaggtaggagacaataaaacacagatgactgggctcccacccccaaagcttccgacttagtaagtttagggtgagcctgagaacatgtgtttctaacaagatcccagatgaagctgatgctgctgttcgggagacctcaatttgggagcttctgctctgtataacctcacacaccgtacttgctcctgccctaatcagttttgtattttaccattataaccaaaagaagtacattatattcttcagataaagaaaatgttaagaggccttgattttcaatctacttctaactggaagagttaagcaaaggaagttttttctacctctgaagaaggcaaaccacacaaagttggaatcttctatccagagttgaaaaccctattatacttataatcatttttttattaacatatactgaaagatggtcattcatagcaagaactcataggtaaagattaagttggtagggtttctgagtggcattttacatagcactatgaaaaattatgcacatgattatcttttcttattcatcactgatgtatcaagagatatcttcaattttcagaatgttttatttttcttggcatacaattagacaaaatatttcagttttcaaaaaacaattcagagttcttattatttttcctcttttagttattttaaaatttgatttgaagtgctgcaaagagaaagggggaaatgatgtggtaggcctttgatgaagttaagtggcagtcgcctggacaaatgtgcaaaaagactggcattcagtaatatccagctcttctggtcttagatgatttctattctgtgatgccaaggagaggtagtcactccctcctttgtgttacatttgtatgttgcatataattttcccatgtatattgcagtataccatgtatgttgcatataattttacatatctcagcataacaccttattattttatktttcacattctcctactagtcttgggacttcctgaagccagggctgtgtctcactcatgtctctgcctagcacctgtcacagtgctaggtttgcagaagtacacttgataaatttttggacacatgaatgaataaatcaatgaatgtgtgagggagaggaggccacaaaaagcgagtagatgtaaatagagaatgagccatgaatcagtggtattggccattcaattcagtattccaagtattgcagtatgttcccatgatttggaattaggatggctctctggctgacatgtcaaccaagaactagaacaggcttgttagaactagaacctagaagatttttcctgtcactggtaagattagctgtagttttctctaaagccatttacccttgtgtaagtaaggatgcctatgatgcatcagaatggcttttaatctcctaggttgagtgatctgaagaaacccccaagttttgggaagcagcgccagaattatatatgtcaggatatggttatctgatgggaagatggaaggagaaagtaagatttagcagaccagctctgccttgtgaatctaagcagaagaaaaacgaatagtgttttaaaactaatttgcaattgtactgaattgaagtcaccggttcctgtccttataagagtaacttcactgcggccatagattctgtatataccttaatccagtgataacaatggaagaaaagggagttttttttcatccttgcactttccttgtagaggagaaagagataaacattgatggaaagtaaaagttcccctgggctttataacactagctctttctttctcatagttataaggtagttataaagtactcaagatttatarttargattattctstaattctactttaacttcagaataaccaaaaaggcccccagaaatttaagaggccatccttatggcataaacattggctaataaagattaatcataaataagagaaacactcatatctgcatgtatattcatcattcccctgacctcaaaataaatcatgcaacacaaaatatgtatgtgagaatgtattggttagcataatactggctgctgtgacaaacagtaccaaaatatcaatggcttcatacaatagaattttatttcttttttgtacaatagtccaacataagtgtttccagttgatgaacagtttatctcatcatggcaattcagagaaccaggttcctttcataatgtggctccatcatcccctaggatcttgctggaaargggaaagaaatagtagagattccccatatgtccccaaaaagccctgccctaacttttcattggcaaraatttttcaaatggctatgcctggattaaaaagtggtagggaggacttgtaaacattgtccttggatttggcagctgcacccagrcacagcagacaccgtggacaggtgcctgcaaattttgaggataccgacttattttctgcaatgtagaccaaaatactggaatccaaacctgctaaatgtagaattattctaaattgactgctactcacaaagaccctaaagataaaatcagtaaagtgacgactttgtattccaagtcatctctgtagacctcttcgagaaatggatctattaacaaaaggatctgggctagaagacttacaaaagaggatttctataaaaacaacttgctattcaatttatctgacttttcattccaaacccgatgtgtttagcacagttacatcaccacacttacgtgacgaagaaggaaatgggaaaagagggagatgtccaatattctctagcagatgccttttattcaagaataggatcaaaaatttacctgggggtaagraaagtgtcttcctcttcccagtgatagttgccttgttaaagactttagacaccagcgcaaygtggttaagtctccactagtgcaacaaagaaaaggatagaggccagtccctgaatagggaggccccagcagactttcagatggttaactatcaagtccaaagacagacagatggaatacattacccaaatactccggaagttgcaaatcgacctgcatggtgttttgtaaatttctaatttaaggcaacactgacaaattagaaggtttaacacaaaatccagatttctggattcttttgaaaaatcaaaagaataatctagttartagaactagttagtagaactagttagtagtaatctagttagaagaacgggtgtctgctstctgtaaccacccagctcctgtcactcgtttgccttttgatctggccctgcctcagtttgctctccctgagaaatcccatcattgttttcagcttcaccttgrggggagaattcaagcacaacaagcaggcttctcaaaatgcctgtgaggccaagaaacaaatgtctagtttcctttcagataaaattgtaaatactcacccaaaaaccacagcaatttaagcaggagacataaacatcatatttagaaggagggactatgtaattaggacatactcccttaagcatcaaaatcaattatcctgataaaaccctaggacggctaaccactcttgaaatatacatttataaaaagaaaaagaaaaaccaaaactaattttaggtgatcgggagaaggatgttctccagggacayarctgagttcattctaggacatttgattcagcctgtcccttgttttgtaaatgccatgcacaggctttgagtcgagaaagtggttgtagctagggctcaagttcagtaattactaatccttggttaatcttaaaaggagttatcataaaggcatgcaccaatgaggagactctgatccaagctgaggccaacacaagggcaggacccccacaggaaaaagcctttggagacccaagacttcctgaagaggctgcttcatgggactccaggttctctgagatggttgcttgcaccgtctgcactattgaccttgcttctaatgtgactcggtgtaagaactgaattcataatgtatgttcagttctttctggttggtggcattccacctgattgaaaagaaatacatccttcatctaaaaataattagcctctgaatggccttttatttcaattgcccggagggcttttattgattttttttcagggtttgtgtggttaagagaatgggattcttctggtggtgtctttcttagcctctctcgaataggctgtcatgcccttgctcctcatgtgcggctaaatcagaagctacaaagtagtgacttgcagactcagttgggccttttattggactcttggtatatgttaaaattgctgaatttgagtgttttacacaagaaatacaattccacttggctacagattccactacttctcaattgccttataccagatctcattcacagatttgtgttgcttcttgagccccatagatatttgagttcagagattctgaaattaatrtacatgtattaagttaatacatgtaaggtcctaggaacagtgcctgccacacaataagcacttaattaattttaatgttactattattatagtaaataattattttatggttctatatttccttgtttattagcaatttactaggttggttataacccragagatttttttctttttcttttaagctatgatttytccttattccagttttccatttgcttgttcttttttatggtatccgattctttacagaagtattctgattaaattagactgtacttaatggaaaacagaaaaacaactagctgatcaaataaacatttcctaaactgaagaatgacacagagggagtgaaaaaccaggatcttccaagtatgacagacacaaagaaaagcctgtgatgatttagaaatgtgctgggctaattgcagctggttgagggtcctcgttgttttccataaaacygtattgtattatgaagaggacagcaggtcaataaccctgggccatgggacccctcttcagcatcacttttcagtaaaagacaattcccgattattttgtgaaagcaactttgaaatcctaaacatgaaaggaaaacacattggaatgttttgttatattcccctcaacacacaagaatatcaggttcctgagaccttcacacatcctgtttttacatagtgaacagttggcctggaatggtggggatggagccctggataggaggcaagaatttatttattttacttatgtattcattttgagacagcatctcactctgtcacccaggctggagtgcagtggcaccatcttggctcacttcaacctccgcctcccaggttcawgtgattcttgygcctcagcctcccaggcagctggggctacaggcaccagccaccacacgcagccagtttttttttatttttagtagagatgggatttcaccatgttggccaggatgatctcaaactcctggcctcaagtgatccacccacctcggcctcccaaagtgctgggattacagacgtgagccactgcacctggccaggaggcaagaatttagtattcagatcttgattctgcgctgaaccacttggatggtaggctttagtctcctcacttcatgattgatgggatttgatgaacaatgtgctgaatgtttattctctcaagattataaaacaagtatcttaagcttccttaccccagagcacaggatcttcaaagacttagaacatcttttggtatttcaaatacaatagtaactttctgtttgacaaacgtctttgggttattatcttgattwtttttttttattatactttaagttttagggtacatgtgcacaacatgcaggttatttatcatttttgtamaatcaaaatttgtttcctaattcacaatcatttttatgcccagctgagtcttccaaaagaaaacacctaactaaaaatagaaaacttctaggccttaatcgcaggccccataaggagaaagtattccagtgctgacataaaaagttcagggccaggaactcacatattagctgggctgacgtggcctgctgagtagcataattattgtcctaaattgtagtataagttgcttttagggtaagtggcttgggtatgtatataaagcaataagaattttgctcctggaaaatggtaaacaactcatttcatgtcaaggccacagaacttaatgcacacttttgagagaaattataagagtcatggggaaatgcaacaataataccaaataacagacacaaaacttcactggcttacaataataaacatttatttagttcataagattgtggggttcagctgatcttggctgagtgtggcggagcttagctggacttgttcatacatctgtggttcattatgggtcaggcaggtagctctgtagctctgctgatcttgactgacttacatctctgggtatcagttggatgttgatgaatctaggataatttggggtatgggactgggatgactgaggtgactcaactcttttcctygtgttaaatcttctactagagtagtctaagcatgttcccgtgacatgccataggaataggagtgaaagctaagtaagggcttttttaagcctctgcataggccatgcctgctaacatcctattaaccaatgtcatcgcatgaccacatcatcttcaaggaatggagaaatagactcctcatctctcataagagaagctgagaatcataaagcaaaggctctgggtacagggaggagccattaatccagtcaatctaccacagaggagagaattgacgaggtcctggtcctggttttgctactagccagccatatccttgagaaagaccctaacttctctgggccacagattttcactaaataaaagaaaggatttgagtataattgctaaagtcattttctgagacgtcaaagtcatgaagggtttgactatgtaattgttaaatgttcttttttcaggttcctacagtaatctctagacacctgtgagatgattagaaattttgaaatatatttcaggactcagaggaggtataaaagcatggactatgttaggagttttcctctgtggcggtttcatggaatatatgcatatatagaggagttcacacctaagaactatgtcagaatgcatttggcttttgacttgaaataaagtttaaaaaggaaatgcatgttaggaactgtgcttggtaaatcacatggtctctagtttctgtctttcctcttttattgattcagtatttggatctacttagyattttgcctacctcgtccttgactcctccaaccttcctttctggcaacttagcaaccctcattctgcccttcacccaacagccttatcaacactttgaatctaaatctgagcattagcattccagaagtctgaagatatgagatctacaaaagaatggtttaatatttatctagaccctgaagtaatgttgttgaggaaggaagagaatgcacaaaaggagaaaattgttggaagacctttgtctaaagtggtgctattcacagtgtggttcttagaccagcagcaacagcatcaccttggagcttgttagaaatgcagggtagcatgccccaccccagatcttctgaatcagaatttgcatcttaacaaaatccccagagattttgtatgtacattaccttgtcacttttaatgtgcatccatctgtgaaattagccrtagattatgaaaacagagtatgtgagaattgtaatccctctattgtaatctatggctaattcatgaaagtaaatgtgtgatmatttaatttttatatattagagcagattcaaagttgagattcatgttttctatcacatctacatacttacatatatacctgtagattgtgtagggaagagggaatttacagctacagagctgtgtctccccagtgaatgtcatctattgtatgtccaatggaggaagtgttgagagcttctgcccaaaataaggataatactaaaggtattggcagatkctacaaggctcaatttttaagtctcatgtccttcataaagtatttcccatattaccttaaggctacaatacagtcttcattttcagcatccacagtccatcttgtgtgtggcactcattcagtccaatgttttattttccccgtatccattgcttgtcacctaggacggattctaatttctccagtcaccacaacaccaaacagggccttgcatgggtcagagtgttcaaaataccatttattgacaaatgcatcaaaatcaacaamaaaccagaatatagtcccaaaagagaaatccaccaagtaccataactgaccaaataatgactcaaattaactggaaagaacaaggactggttcataggcaggactttagattttttttgctgtaagtgattttttctctctttttaaaaatgaggttacayaatattaattaataagcaaatcagagtatgctaagcatttaatatgtatgatcttgtttaaaccttttaacagcccaggaaaattggttttattattcctatgttatacatgagacagttaaaattccaagagattaaataagctgagcaaggtcatatttcataaaatgcaagcattctaaaccctatgtggagaaagaatcttatctatcccaaagtgaattgtctactttrtgtagatctatggcatcagtttaacttatgttgccttcttagccctgtgtaacaggttctattgctagkkggtatttgttcacaagataaaaattaattttaatattattttgaagcaaatataattatttaggaaaatctacccaaaatataggcatgcaycaaactccagcacccaataaaaagcagcagtaattgatttccattgtgaatggcctgtattcttctacattggcatggactatccagtttacttctgtttacatctggagtattttcaactttgacctagaaatacactgatcaccatttcactcctcatctttagatttcagttgccaatggcaaccttgaattacaaagttgaacaaaagctgcattttacttgagtggtttgtaattttgaacttgagttcatgttttctaggagttgtttgtctataggtgtcagtcctgcccttggttgccgaggaacccgaacattctgaatttgctatgcctctgctgggactcagtgggctttatcagtttctgaacagtttttgctttaawttattgggactgggtactcaattcacaggggtaatatgaatttggaaactgcactcattcatgggtttctaattccctttgtggatgtttttcctcaatgtgctccatgaatcatttgcttccttgcctcatctccaaggttgtggattgggttttcctagttcccatttgaagggtgggcacccctggctctattcagggacttcaggttcagcactccaacacccggcatcctgaggcctcctcttccaatctctcctcgccccgcaaaatggagaatcaattctgttaactgtgagttcctttgttatttctgcgacttaaggatttcttttccttatattcaaactcagctgtaaacttaagtgaatatgtatgtactgtttcattttgcctttccctatgtttggaatagaaaaggaaattttcagtcagccatattgactcaaagtcccatggcaatttattctaaggaaacttagtggaaaacaaataaacaaacaaaaactgaaatggttaggatatagcatgtggtcactttccaacaatccttgggtaacatgactaacctcagtctataaatttcttatgatcctgttatttttattcttgaagcaaaattcatgagattattctaaaaataagatgaggccttgcacgtttgctcaggcttaattttgaaaccattcattctatgaatgtatgattttaatgcatttcccattgcttttaatatccacttagctaactgatgatgttgaggttaaaatactatagtccttgcagtaattctcgtaaaattgtcctagtcactgtatcccacattcagagttctacatttttcttttttgtattttatagaaattatattagattttgttttcattttagaatgctatttttatgctaaaaatgaaataatcacattaccataaaagtgagaaatagaawaaataaagatactcataattctaacacagtttatattttagtgtttcttttcaaagtcgttttgtattctttaaaaaaatggtcatagttattatcacagtatgtatacaactataggtacattttttcacttatcacaaaaatataattatttctccctgttttcaaagccattggtttatattatttgactacctcatagttctttaagtgagagccttatgatttttttacagaaacacttacgttttattcatgtttttgctgtttcttggcttktttgttagttttactattttccctgatctttagcagtaaattccaaaatattctgagcaagataattagagtaccatattattattgctgcctctcaaaggctaggagatatatttttaaagtgttaaaagactataaggaattaaattttaaatatatgcagcatgtattttacatctcagaattgctaagcgattaaatttcaaatgttctcaccacaaaaaatggtaagtatttgaggtgataaatatgttaattggctttatttaattactccatgttgtatttrtaaatcatggcatcattctgtactacataaatacatacaattttaaattgtcaattttatttatatatatgtgtatgtacacacacacacacacacacacacacacacgcacaacagatgctcccagagaagaaaaagaataaaataattgaaaatgtctactgagaaaacaaactgaaacaagtgatcctatgtctatatttaaggtaacataaccatacaaagaatataattactttcagtgaattttggcagagtratataattgtgcatccttagtaggatatatttgatgaataaaaagaacttcaaaaaagtctcaagcttcatttgcttattttattgacaggtcataatattgaaactatttctggatatattaatataaagcaaataaataaatatgctaatgctatctgaaagcaacctttttaggaaacgtatgcttcagtstttatgggtgaaatgtcatgatgcctgaaacattttcaaatgactcagcaaaaaatatagagatagacaatacataatgcatatgtggcaaaacattgaaattaaggtagttttcacaggctggttttgttttgttttattttttggttgctttgcctgtacaaacaatgctaaatcaatgctatttttcctgtacaaaaataaatatcttagtgtattcattcttatatgttggtggttttgtttctgtgggccaaattcccaaaaatggagttgctgggttacaagcctatgtttgccttcttataaattttgtcaaattattgcccaatgtttcaaagtgtcaatttctcagaatgttattgcttctttaaaggaaatttcttttaaatttaatgaattaaattaaattaatcaatataataaatgtcccttgaaaaggtattgtgctattgcatttctctaattgttaatgagctgctttcatctatatttcaaatatatatagttgtattgtatatatattctttgtattttatttcttttcctatgaattgctttatttatgctcatttttcagagaaatggattattttcatctagataaagatatctatatttttctttcttatgtttttctgtcttgcttaaaaaggtctctgtaccccatgattatacagttattcacaatcacaattatacttttggcacattctcctagacagaagcaaataacaagcaaataacaatcctaagattgttattggcttcatattttatattacaaagtggtatatatactatacrtagtatatataatatacataatataaatattaatatatgtaatacattatattaatttattatgtttatattataaaatatttatataacatataaaatatttttatatataaatataatatattaatatttatattataaaatacattggccttatattttatattaagatctttcatacacttcattgggcaaaatgacctgagttggactctggaattccaaattttgaaaaccttgcaaatatctgtctgcacattatccagctgcatatttttttttaagttttctcaattcttctttgttattccattgtggcttattgttctctggtttcaatttgtttccttaggaaattggtttgattgtctctgattcataactcagtaatctgtcttatatttatgccacatttatgttatactgggttttgtttgtttgttttctgattgtaagctaaccttcaagagtaactttgcttgctccttggccttcacttattttttttatctaaaagctttccttaactakatcaaatctctgccttttttaaagacagaagaaaagaatgtcagagtcagaaaagcatcccaagtacaaaaatctttgacaacacaggaagaattgaatacatttgaacttgaccgtattgccttttcctgcttaactacccagagttcacaaaaatgactagtgggcaatgtcttttgaaaatcaagttaactgagaaatttagaatttgagcctgactagtcaaattaaagaactgggcctataataaaacaaactctgacaacactcttctttattaatatctgagtataataataacaactcatcttaaatttagaggttaaattcaatcatgttctttcgtctttcttgttcattttccaaaaagaggtcttatgaacttaagattaaacaaactcaagtttgacaatgttatgctagaaaggctccaaggcatagcctacaaaatcacatttgtcttgaaaatctatctgtcctgtggtgattttttttccaagaatatgctttgaggccacagcaatgaaaggatggggccagctgwgttagcttatgagtattttatgggtccaggccacataatgagactactttctgttcccctcactcaaagttatagccataatactgctgcctaacaaccaaccataaaaatcagtcacaaaacaagcatttgctaagttratgagtctatgaactggttctggtctggaccaggctcacctgatctcagtaggcttgttcatgcctgtgtttagctggtggtcagctaggggtgagctggtttagaatagcttcacttttatatctgatagtcaattgaagtgatgcaaaaagtataataactgggccatgtgtctcctcttctggcaagctaggctgagcttgttcacatgatggctgagtaaacttctaactgtgagagcagaagcacacaaggccttgtgacgtctggactcagaacagcatatacttttgacacattctcctagacagaaccaaataacaaggcctccccagattcaagaagatgagaaatacactccgttctttgctgggatgggatgagctgcaaagtcacaccacaaaggttatgattacaaggaggggtgaagaattwctgccatttgcacgaccaatctaccattcccacctaacaccytgtttcacttgcacagaatagaaattcaacacatattagagtacaaaacccagaatatggcaattagatagtatgatgctgaacctcagaacagaggcaatcaaaaggaagccctggtgatctgtggaggaccatctaagcctaggattatggggaaggaaaattaggaagaatctaaactggaattccacagttggacctaacttcgggagtcccctggttaaagccagatttaaatctgttaggggaaaggttataaattctccatgagcccagtggggctgatgaatgtgatttgaattgattgccaacaataaaaactcaggctcttacatgaagatgtggatttctgacttcaatatttaatctgacaagcatcagctagaactgagttgtttgtactccctttagacagggcctgtcatctctagctcttcagaaaccccacaaccccctctttcttgcacatagcctgctacttatttacatgacttgcctggcccctgtaacatctgagtttgcaacccttgggctggaatagctctagaccactgatggatggggctttkttggaacggagccagaattaccctgtattcttttcatattttcttacaatgaacaagtatttagtttataagaagaaaaagcaaaagctctaacttggaatgtaataaatacaattttgaaattagttcattaataattgtatggctktttaaaaagagtgaaatatrtggcacttaatatgtcatgaagcagtgacttagtttagaatataataaaatctactactatcccatgatgaaagtctactacagttataacttagccacaactgggtcaattattataaattattaaaaatcatcatcaaaattaaattactaaaatgtaggtttttcttagaattaaattatttaaaatgttaaaaagcattggtttaggtatttgacattttcttgtattttacttcttttgttaataattaaagaaatagtacttatcaagcactatgggrtcttgtccaccaatgagcattaacctgagagaaattatctgctaggtcaggtacaatatatccatagctgaaggtcccccagttcaacctataagagaacaacartctgttgttttcttaaaacaggctcacttgcttttcttccttccctatcttccttggaaacacatgtgttactgaattaaaattgaggtgaattgatgatgaggtctgaatggtagtaaatggacgctgtcaaacaacaggctaagatttcattcatgcaaaagagtacgacattgtaaaagccccacttccttctaaattgttggaacagcagggaaakaactggcaattgtcttcttcctgtttgatgccccagtgactcgtatgtgccaacayggagagtagggccctgtacaaggtgctccatcatagccacatgagtccagggccctgagcgccccctcacagcatgtttcctcctcggcttataagaatttatatgctagcaaatagattcataaataccccacattttatatgtagggagaatagttgactttcaatactcagcctaagccatttttaccagataccatttttatttttattttttcattttctatttttatttatttttatttttctttgatatttcaataatttttataaatttttaaaaatttcaacttttattttagattcagaaggtacatgtacaggtttgttacatgagtatattgtgtaacatatatgtatgagtatattgtgctgaggtttgggatacgaatgatcctgtcacaaaaataataaacatagtacccagcaattagtttttcaaggcttgcccccgactccctcccccactttattagtccccagtgtcaatcaytgccatatttatgtccatgaatacccaatgtttagctcccacttayaagtgagactgtgtggtatttggttttctgttcctacattaatttgcttaggataatggcctccagctgcatccatgttgctgcaaaggacatgatttcatactttttatggctgcctactattccacattataagtaccatattttctttatccagtccaccattaatgggcacctaggttgattgaatgtctttgctattgtgaatagtgctatgataaacatacaagtgcatgtcacacacyttttgatgtgaaaaaaaaaaaaaaacaagtcatttaaactagatccataatctgttatctgagattcttggggcctgttgtttttcagaattttaacttttctgattttagaaaggcaatgtgatgcatataccatgagcataacactccaggcagacctgagtaatcctcaaaatcaaacaaattaatatgtctgcagttaagttcatgtatagtcatatgacagggcatacatgaaattatacatatttcatgtatcagtatcatcccaatatcagttcatgtcaatgagtctgccacaaatttgccagaaaaagaaaaagaaaaagaaaaaaaggaaacttctcggatttcagaactttgggatagataagggattacttaatataaattaaataatttagtaatggcaaaatttatctgtcacagaagtgagagtgaaaggagttgaactaaaggggatgctcccaagctgctgacactgtctagaaggaggctaagactcaggaagacagatgtcctggagattgacttcaccctggcattccagggatcagaacaagccccagaggctgccctgaaagctgcagatggaggatgcacagccaggatcaagacaaaaagtagaactgggggctgagagtagaacycagacagggagctatcagagtggccaaagcagattaaccaccttggcatcccccaagagctattgagaaacgcaggagctcaggccccactcaggcctcctgagtcggacagaatcaagatcaaattccagacgatttgtgtgcacttaaagtttgaaaagcagggggaaaaatacaggttttaagtccatgtcttaaaaattgcctccaagctaataaggaggtgtgggggaagcatttaaccttgcatggtgtttcaaggattattytccctgctcaccaattgataagcagagataattttctttaaaattcaaggttttctcttggactcagcacagcacagctccctaccagacaactctccctgttgcccccgttctctccctgtctaccggagaatcccagcttttatattattttatgactaagacatccacgtaagtctccatttgaagaaaggcttccaggactttaaaacatctgaaaattctccagggcataaaatagacacattaagagacagtttaaagggtagctaaaatagtttacaaggcaaataaaaattagaatgaaaaatgaatcaaaataaagtggtggcaaaataagtcaaaataaaagttcaagttggttacacgagtttgtttactttgtgaaaatgtatcaagctgctccttagaccccagcattggcttccaggcctctgactaaagctgcacatctcaaagtccactccacactgctctgtctattctactcagcttcttagcttcccccagccaggttcatggctgaccttggaacgctcacctatcaatatttctcaacccctaaatgtaagaacctcagatcattttatattatttctgacacatttttctatttttctttctttcttttcctctttttctttctttctttttttttttttttttttttttggttttgagatggagtctcactctgtcgcccagactggagtgcactggcgcgatctcagctcaccacaaccactgcctcctgggttcaagcgattctcctgccccagcctcccaagtaggtgggatcacaggtgcacgctaccatacctagctaatttttgtattttagtagggatggagtttcaccatgttggctaggctggtcttaaactcctgacctcaagcaatccacctgcttcaacctcccaaagtgctgggatcacagccgcacgccactatacccagctcatttttgtattttagtagagatggagtttcaccccatgctggtcttaaactcctgacctcaagcaatcgcaatcaacctgcctcaacctcaacctcccaaagtgctgggattacacgtgtgagccaccacgcccagactctgacacctttttcaaaagacccgtgtgtgtgtgtgtgtgtgtgtgtgtgtgtgsatttgtagataccgctattcatcttattctgagtctttagccttattgtgccacacataacttgaagttgactttcagctacagacaaatgatgtgtccaactaaactttgttacatctcctctataggtgaccagtgaatgatattttaagtdaatgtattcatcagccccttttgtatatctctttcagagagtttctatgggagtgggtatagaaacataaacaacttcaagtcatctcccctcttgatgtctctcagctgcaggtggagctggagcaagaataccaagacaaattcaaaagactgcccctcgagattttggaattcgtgcaggaagccatgaaaggaaagatcagtgaagacagcaatcacggttctgcccctctctccctgtcctcagaccctggaaaagtgaaccacaagactccctccagtgaggagctgggaggagacatcccaggaaaagaatttgatactcctctgtgaatgctcctgccaggccttcagaaattgcatggccactccagcgtcatcggactctctcttattacaaagatcactgcccaggaccatcttcccgagragcatcccttagcctaaaatccacaccaaagggagagttccagaggaatccatgaagaattcccatgcccaggctccatgtgtcatgtggaaacctccacaggtctgctagtgaagaatgcatgtatgtgagatttttgttttctttccaatagcaaattcaaagcaagcaacttgcaggctccatggaacttttaatgaaggacagtgtcttctttgaagaaaatcaagctcgtgtttttattcgaagctctggtgtaaaatatttcaaagtcatagaaatagtttgagaaatgcatagcattatttaacactattgaacagccgactttgagcattgtttcttctaactgcccctcaactaccattatcttcaagtcaacatgcatattacattttcatcctttgctttgcaagcactggtggcttgcagtttgctaatttatttatcatagagtcatcaatgtatttgttgctgacatggttttattagatactgtagtgattcaaataagttttctatttgaaaaaaaaaatcacttgattgtatccttgcccagtgaagccatcctaagacttagcaatatggattgtacatttggctgcatgagcaagtcggccgcacacttccagacagtgtgctgtttgaattgactatttgcactcaaagtctgggtattcattggttattggcctgaaatgatcaaataactacaaatgatctgttgaataaaaatagttgagctgatatatgttaagcagatattcaatcagaatgaacaggttccggtggttattttgccgtttgacattttttatggttcatttatttttaatatagagaggaagattgaatatttatctagagaatacaaagacccacatgtaaatgataggtattatctccatgtatatatgtacccacttagtcatgtaagtgcatatacacatacacacacatgagtgtagacatgtgtttattaattgacaatgacccaaatctcttccacaagacttaaaaccaaattcagggacaaatggatagagaagaaaagggtcaaacatcgagattacatggatgttaaattatatggagacgctaagaaataattgatggagccattgatgcaaaccgaagtagatttagaacttatatgaatttgatttatattttgcaagatcaaaaattagatgttaagtatcagattttaagcttgttttaatggtcaaaaaattaggacagaaataatatggacatttattagtatcttccataatttttaagtctgacacatttctattttattctaacataaaaaaacttccattatatatttactaagtatatttaattcacttaactctgtctttataagttcctattttagatggaataagagaaacaaattatatcaaggtaaaactgatcaaaagcataattgaaagttctgaaaaaagaaaaataataatatgtagaaaaatgtaacttagagagtaacacatgaacattgaagttaaaacccagaagccagatgctcacagttttattttactttaaaataaacctgtctgactgtagctttgygaaatatcttaaaacgcaaaaaccarttgtgtcctgaaaattgtttcaagaatttaatatttttatgaaaattattttatttaactttaagcaataactagagattacaattaaattttaatcaaaatgaaggcttagttcaaacataaggaaacagtgtttgattaaaaaaaacacatctagtaagacgtaaggggaaaatcacatcctctttggagatgattatattttgatctgaagggtttggggtgttcattagacacttaataaaacttaacttccaatgaaaaagaaatcttttgtaaatcattctayttttgcactttgaaagaaaggcgttaatcataaagaagcaagaatggtcaaaatcgaatgctgcatttttataaacaaaattacagactgtctgaaattgaagaagaatgaactaataatagcattcataaccaaacacaatgatgattattgcagaacattgtatcacattttagtccagagatagaataaagttgaataaccttgacttacacaaaactgttttggtagttggatttcattatcttagtgaatttagtcattttacaatatgtttgtatttggccatttactgtaatcacatttttatatctgtacaatgacactttttgcagttgtggggtagtgtgtaacactgtccatcttgcatcattgaaactactacaatgatactatcatttaataatattaatattacttgaaatagactaagataaagaaaaggggtctgtatgatgtgcagttttgtgcctttatgtatttgccttgttctttgtcgaatgtgtgaaattcygtactgtggtttttcctataatagaaagtagagctgtgtattaaattagactgtgtctctctgatacctttacactactgagaatagcatggttttggccatgtaaaccaattttcaaagttctaatgacatagccatgtgtttttggttttttatatttcattttaaaatttgagtatcaccatacattaattaatactcctgtagtagataagctgtcattaagtaattcccaaaaaaagggccatttgcttgcattactttgaatttaatgttgcgcttgtgcactgtgttaatattgtttgtgatggattggacgttgtgactcttgccttttaagaagaaaaaaaagataggacaaagtatttgaagctcttaaaatgtacatattttggttcttctatctcaaattatttaaaatgcataattcacatttttgtaataattctatgcaattttgtggcatgatgtttcttccacttgtaattttatgtgctttcatcacaaatccaaaggaaagaataaaaatttcttaacacaacccagcggttatttcttggggtcagagtcaaccttcttttgacagggaaagtggtgggagcgggcataatgccagtctttagggccatcatgcctaccctgacagggcacatccatgcctgtaaaggatattgggatgctgcaatgtgtgtgccagaggacacagttgtccttgctatcattccaccaccctccatccaggagtggaattacacttgccattgtttgcgtaatggagaccctctcttcctttctctcttccttcctttctccctgtcttccttgaccaaagttaagcaaggcaaaacagtcaaaagttttytgacataagttgcagtgacaagaactgacagagcacttgatgtaaattttcttataaaacagattttaaaagtgtttacaatattgataggataagaaatgtatgtgtgagttttatgtaaatgttccagaggcaccccaaatgcaatgtattaggtacttatttctgtgttacaaatggctctaaaatctaggggcttaaaacaatcagaattatctcttatctcttagcttctcaaaaaaaaatgtgtgggtacctagtaggtatatatatttatagggtacatgagagagagatgttgatacaggcataaaatgtgtaataattacattagggtaaatggggtatccatcacctcaagcatttatcctttccttgtgttagaaacaatccaattatactcttctaattatttttaaatgcacaataagttaattgactgtactcaccctgttgtgctatcaaacactagatcttattcattctgtctaactacatttttgctcgtattaatcatcctcactccctcttttccccaactaccctccccagcctctggtaaccatccttccactctctatcttcatgagttcagctattttaatttttatatcttaagaataagtaggacatgtgacgttcgtctttctgtgcctggcttatttcacttaccgtaatgacctctggttccatctacgttgttgcgaatgacaggatctcatttttaatggctgaatcgtactccattgtatatatgttatcatgtttcctttatccagtcatctgttgatggacacttagattactttcaaatcttggctatgataaacagtgctgcaacaaacatggtagtgcagatatctcttcaatgtactaatttcttttcttttgtatatgcctagaaatgggattgctggatcatatggtagctctacttttagtttcccaatgaatctccaaagtgttctccatagtgcttgcactaatttacattcccaccaatagtttacaaggcttcccttttctcctcattctcatcagcatttatttttctctgtcttttggataaaagccattttaactgggataagatgatatctcattgtagttgtttgatttgcatttctctgataatcaatgaggtagagtatacccgtttgccatttgtatgtcatcttttgaaaaaatgtctattcagatcttttgctcatttttaaattggatggatttcttttctaaagaattgtttgagctacttatatattctgcttattaatcccttgggagctgggaagtcttaaaatgttttctcccattctgtggattgtctcttcactttgttgattgtttccttttctgtgtagaagatttttaatctgtgtgatcccacttgtctattttccccccagttgcctgcacttgtggggtattccttaagaaatctttgtccacttcaatgtcctggagagtttccccaatattttatcttagtagtttcatagtttcaggtcttagatttaagtctttagtccattttgatttgatgtttgtatatggtgagagatagaggtcaagttttattgttctgtatatggatatacagttttcccagcaccatttattgaagagactgtcctttctccaacatatgtccttggcacctttgttcaaaatgagctcactgtagatgtagtgatttatttctgggttctctactctgttccattggtcaatgtgtctgtttctatgccagcaccatgctgtttgggttactatagctctgtagtataatttgaagtcaaataatgtggcctccccagttttgttctttttgctcatgacagctttggctattctgggccttttgtggttccacataaattttaggattttttttttctatttctgtgaagaatgtcattggtattttgatagggattgcactgaatctgtagattgctttgggtgatatggacattttaacagtattgattcttccaatccatgaacatgcaatatcgttcctttttcttgtgtcctcttcaatttcttgcatcaatgttttgtagtttttatggtacagatctttcagttctttggtttaaatttattcctaagtattttacttgtagctattataaatgggattatcttctcgatatcttcttcagattgttcactgctggtatatagaaatgctattattttttgtatgttaactttatatcctgcaactttactgaatttatttctcagttctaataatttttggtggagtcttagctttttacaaatataagattatatcatctgcaaacaaggataatttgatttttcctttccaatttggatgccatttatttccttctcttgtctgattgttctagctaagacttaaagtactgtgttcaacaacagcggtgaaagtgggcatccttctcttgttccagatcttagaggaatgacttaccatttttttcaattcagtgtgatactagctatagatttgtcatatatggcttttccttctgtgtccagttttgttagggcttttatcacaaagtgatgctgaattttatcaaatgttatctcacaggttttttgagtcaggaattcagagagggcaaagcagatatggcttgtctctatgatatctggggcctcagccagaagattagaggtctagggctagaatccactcacacatctagtggttgatgttgtatcaagtgggagcctagctggggctctggggtggaatacttgctcatgccctttctatggagaagcctgggcctgggctttttcacaatatggtagctggattccaaggaagagcctcctgagagagccagacagaaaccatcaacatttttataaccaagcctcaaagttacatacatcacttatgccagactctattcattggtgctatcacaagcctcttcccagattcaaggtgcagtaacaaacatagaccccatcttaccttgggaacacagttgatcatcctgaagaagtacatgagggatggaatgaatatataggcatgaccatctttaaaaaatataatctgccacacacagtatgcatgaagccgaatttgtgttaccttcaaagctgctccacctcctttgctttctacatcagtgaacaaaaccagtattacaaatcacactccagcctacacaaccttatggaccattccacctcataggctttttaactaccatttctttcaactgcttcatccatcctttctctttctcttaaatcactcccccagtacacgcacacagacacacaagttcctttggttccctcctttccctggctaacttctatttatcgttcagtttataacataaatgtcaattcctctaggaaccattcttggatccaccaaagcttctgccaggccccttcatctattctcccaatgcaacctgtatcagtcacccactgctgcataacaagccacagcaaaacttgatgtttgaaataactaccacttactattggttgtgggcctatggatgggtagatggctctgctgatctgagctgggctgggcttatctcagctgggctcatctatgccgctacggtaagctgagagctatctggtggctgatcatggctaggctcattgacatgtctggggccttggctggaacaaccgggctgatgtgactctaattcataggatttctcatcctctgggagataaaatgggtatccaataaaatattctccaactattaaaaagagttaaatactgatacatgctaaaacacagacaaatctttaaaactttatgctaagtgaaagaagccagatggaaaaggtcacatattgtataaatccagttgtatgaaatgtatggctttttcacatgtcagaggcaggatataaagaacacataaaagtgctcaaggtctcttgaagtctaaactcagaaccatgcaccatcacttccaccacattctattggtgaaaataagccaaaaggccagcccagataaagaataaaaggagcctccaatgtcacaaggaaaaagatgtagacacagggttgttactaaggtaatcaatccagcaatgccttgttatttcttccacatagagagtgcatgccaactccatgtaatggccttcttactaaatacatcctccatggacacctttgatgtcagatgtcatgtctcatttacgatgaatctgcacactcaccctaatgtcataacttaataaatattgcatttacagtgaataaatccatttgcttatctagctattagtgctacattagaggaaaataaacaattggctaggtacaaaggctcatgcctgtaatcctaacactttgggaggcagaggtggttggattgcttgagctsaagagttcaagaccagcttgggaagcatggtgagacccaatatcatttttcctattttaaatataatttttttccctttcctaaaatagaaaaaattagctgggcatggtggcatgcacctctagtcccagctacttgggaagctgaagttaagaaaatcacttgagcccagaaattcaatgctgcagtgagccatgattgtaccattgcactctaacctgggagacttagagcaataccctgtctcaaaaacaaacaaacaacaacaacaaaaacaaacaaacacaaagcaagaccagaaaaagaaacaactgatatctcaattatctcaataataaatgtcattaagtcaatgctacaatgctatttaggtactttctgagtcagcaacactataatagtaaggctagactacacaggagccacactctttgcctttgacttagggtaccaactccaaaacatgaaagagctagtaactgatgaaaccaaatattattttctgagacattggtgaagaaagtggggcttaccttagatcctggggttaccaagcagactctttttgcccataagagaaaattcaggagcaattcttgcccctgaacattcatgtattgttaaattgcttctttgaacactctggatattgtatctgtttgtttgttttatgtttctctctgattctggatcttttattctttttaatattgtatttaatttttttagaggcacggtctctaaaaaaggcatagtctcactctgtcacccagtctggagtgcagtggtgcattcatagctcactgaagtttcaaactcctgggcccaagcaaccctcccacatcagcctcctaagtagcggggactgcaggtgtgcacaatctagctaattttttaaataacaactttataattcatgttccataaagtacactgttttacaaagtacacactccagtgatttttagtgtaatcacagtttcttattaatcatcaccctaatttcagaacattttcatcaccccaaaaagaaacctcatacccataagaaaacacttctcattccctcccccaaacattctctcttcagcccgtgaaaaccattaattctttttctgtctctgtggatttgcctattctggacatttcatacaattgaatttatacattatgtgaccttttccatctggcttctttcacttagcataaagttttcaagattcatctatcagtatttaactctttttaatagttggagaatattttatcggaaatatat

SEQ ID NO: 94059 - DNA, 317892 bp, Homo sapiens
  misc_feature (1)...(317892): n = A,T,C or G
gtttcctcactatctcccaactggttgatggtgtgtgtgttgagggcgagggagcagacaggagagctcacagataatccttttaagaacacaactagaataatcaggcatcgttcctctccatatttcattgactgcaaccagtaaggtgcccacatctagttgaaagaaaggcttgaaaaaatggtctttggctagttagccatcatcaggaaagaagacggtaaagaatactggggaacaacttgcagtcaattacccaaatatccaggtatacaagaagaggaaaagcacagctgtcatttttcaaggcaatgatcaaataccactggacaagatttttgacctcttctgctatggcagtgaaataatttccatgattatcgaggaagaattatgttatcttggaggaatttattgtcccttattatggttcctattttcatttctctatgagattatttgtccattactgctatagtaaccaaaacattgttttggtgtaatgtaagtattcaataaatgaattatctattctaaatatgtatccattttattctcagaagtatttaattaccctgtaattattttgtaagaaagaattagaaaatattctctctttggagctgcgcatattttgtgatgtatatgctgcaaaaccagtagtggggcatgggagatactttaagtcaaacacagattggcttctgcaggtcaatgcaattctctgaaaaccttagtctgcttttgatctagttgcttccagtcagatccatgggcaaattatcatacccaaagacctaacccaggcagtgttgctatgcacgcagactatcttcttttatttactggtttctttgcttagcacattctgctctccttcggtttatgggtgtctactttgaagctacctgaaaatattagtttaggcaggaaagcatcactctcagcctaaccttcgaaactataaagaacttcaattaactgagaggttttaatgtgggcacttgaaaaagtcagaggcctatttactgccggccctccttttttagagtcacctctagcccgagtacgtattgtcacagaactttgcacaagaatcttcctcagcagttcacagaggttacgtgttcttctggcaagtaatctccctttttaaggattgcaaatgacagttttatgaaatgctttatcataaagtaatgagaattactaactttctagcctgcaatatctgtgttctctcccactctcaatccttagaccaaagcttcattttttttattatgctagagtacacttctagtaaccaagtcatgtttcatttaagattagatgtcattaaaacatagaaagagaccctaaaacacagcattttatactagataaaaatttatgtctcactaaatatcaagtggtaggttgcttgttgttggcaggacaactcttccgttctcaatatgtcacttctgtctctggattcagggaaacagcttttgccatgcctgacacaactatcagaaagagggaaaggttccagaatattgcatgctttaatctttaaggacaaagccttaagtaccaaatatgttctgtttaaattccatggtctagagcttagacacatggtcctacctctcaaaagggaggttgaaaaaggaagtcttaagttggatgggcatgtgaccagttgaaactctattgtggaaacaggttaagaaaagatacggggtgacaattctcggtttgatgcaatactgttattcagaaacaaatctaaatatttaaagcaggaaagattcatttaacacagagaataaactactttttgcaataatgataggaagagccacagttgtgggctctaggctggaacacagcacaggagaactgacacacccagggactgagatcaccactgggactattgcagatgaacaatccactataaaagcaatctcagaattagaaagctgggaatcagctatcaccactacttttgccacagctgcttctcaacaccaagggaagtgaagaatagatactgcagtattgctttgaaaaacaagatcttccttgccagtacacgagagggaaagaaaaaaagaaaagaaaagaaagaaggaaagaaagaaagagagaaagaaagaagaaaaaagaaagaagacaaaggagacaggaaggtggaaggaaggagggagggaaggaaggaagaaggagggaggaaaaaaagaagaagaaaaagaaagaaagagaaagaaagaaaagaaagaaagaaggagaaagagaaagaaagagaaaggaaaagaaagagaaagaaagaagatagaaaaagaaagaaagaaaagaaacagaaagagataaagaaatatactccttgcttgtaccttttacctgtacaaatacaacttcttggtagaaccaactctcatcctgactctcggctgcaaaggcatatgggaagtgtcatttttagattttcagaatctagagtaaggcatgtccacttggcagagggtcaaaacatccacctctgctcctgctgaacaatgggcaccacagaagagcatatattattaaagccttattttttccaaattaataatgaaaatgacagatgattgttcaatctactcttttatattgtatatatttatggtgtacaacatgatattttgacatatacattgtggagtggctaaataaagctaattactatatacattacttcccataccatttttttttgtagtgaaaacacttaaaatctgtcttacaaattttcaagtatacaatacattgctttaaccataatgactatgttgcacaatggacctcttgaacttagttctcctgtctacctgaaattttggtatcctttgaccaacatctccccagtctccctcccacagcttctggtgaccaccattttactctctgctcctattaatttaacttttttagatttcacacatgagtaagattatgtagtatttctttttctatgtctagcttattttactcaagataatgccctccggatcatccatgttggcgcaaatgtcaggatttccttttttttttttttaagggcgggagaggattctattatatatatgtactcattctacttatatagcagtagatgaatctctcatctatgttgattctttgataatgaatatcgtcttaaaatgattggttcaagtttagtacaaaatgttgaggctcaggttgtataagacttagaaaaatcgatataaatattttgtttatgctagacattaaatagtatttttggaatgtctaaaagctctatctttataaagaatttcatattctattgattcattttttccctcttaaagtgaatgaataagcaatttactttttaatagagcagcaatgcagttagcacttaatttctaaataacttgatcaaaacattttcctttctctggcagtttcctatatttgaaagagaaatattcaagtagctgcattattacctgtatctgccttcatttgtttttcacccaggtagtaactaggttcgggtcactctattaagcaacagggtgggaagttgctcttgtaatcttcatgatagcagaaatcttgtcggtctttttcaccacattataacctgtactaggtagctgctaagtacccagtagatactctatcagaacttttgacttaaaaagtgagatcctgctttaaaatgggtatatacaaataacattaaaaagagaatgagatggaaaatgtggagcatgtatgaaatatgcaggtagccagcttcggggtctgggtcacaactctttatattaaactttaaagacaactctgctaagttctacctactggcagagcgagtgttgaaaaatctttcccaggtttcgagcaagactacaggcagatgagtaaggacacttgtagaactcatcttgtagtgtgtgttctgaaaattgaggaattttgaacaaagaaatcacatttgctttagagtggggggaaataagcctatttagaaaaaaatagaaggttatatataatttgacattgatttcttaatgtaacaagcaagaaagttttagaaggctgttcaccatggaacttaaaattttgactcttacaataaaatgcataaacaaaataacctaattaatgttaacataatagacaggaaatcaaataaacttgcacgtaaacattgatttttaaataaaatttgcatttcattgttgaagcttgatcattctgtcttaaatactttgcctaaaaaacggagtagactactaccaggtaagacagaaggctttgtgtgtttaaattttagacataggacatagccatgaaaaaagtaaattttagaagaagcttaattgttctctggattttattttaattaaaagtgctactaaaataggtaagcgtacatgttaagcaaggaaagataaattattgaagaacatattttcaaaggaaacaaagtacaaggtacatttttgtaccctttcttgttaatgaataatgactatcaaactgttctaaccttaatctttgagttttatcaagattagattgttccttttcaacccagtccagctctcataagtcctcctgaaaaatgtatgagcctactttaatgtgtggtaagagatttgtagatccaaaatgtttcaatttttgaagggactatttttcttaaatagtggctcattttaggaattaatttaaagagatttttaagggtttagcataaatgtatttggaaaaaatcactacatgtaaagttatttttaaagtcatctatctccccagagttccaaagctaagaattgcagctcaggttattattaaaatataaaggtatgattgttttcctgtgtgacatcaccctccacttctaggtcaagctcccatttttctgtgacctctcacacctttgtagctttagaacagaaggggtacaagggtcaggggatggtgttgtacaattgtgaaccttcaatactataaatatctttccatgagtagccctgaaagtgatataattctcaactttctcttctctacccttccatgtaagaaatcattcttacagaaaactactataaatctaaaaagaagaaaaaagaagagaaaaaaacagcaacaacaaaaggatcctacgacatattttggaaacaagagtaatccaatttatttttatttcctaaaactttctcccagtaaagcaggcctacttctggcagatcctattttacctggatttaattatataatttcttgtgttgtctcagagtctccacacattgttcaatttcaagagcagtataccaaaacaataaaccacccacatctacttgctaatcttataaatattgttttattttgctgttccttttcagatgttattaaaaatatttaaattgaaatttactatgcatcctaaggctaaactaaaaattaatatctttctaaattagaaaaaaatgaacttattaaattctaattaaataaagaaaatacctcgataggtgaaactcacagaatggctagaatacctttttcaagggctcacctctgctcctgcaaattgagaccactggtttcaccacatccaaccacctccacgtttaaatgcataataaccttagctgtaatttgaggggaaatatgcccaccttacacatttttaaaaaatatattttcgtttgtatattgctgatcagtatctttggcccgaattctgtttagcacagagaagctcatttatggttgggtttttggcttaaatcctctattcattatgtcaatgcaaaccttttttctttttttttccatataacccttcagggtttgatggaaaatagatttccaaacacgcccaacctgccaaacaggaataaaagcttccagtggaagcatcacgttcccttgaaatagaagtgttttagcttgtgtgagcgtatttgactcttgaaaagaaatgagatcgtgtttcatttcaggaagatatatgcgtcaggtaagaaactaaaacaaataaacttcctatacttaactacatagcatgatatttcgactcaaatatattattgaggcaaaatagctctttaattatactgtgatacaaaaatggtagatgaatttaaaatcagagtgagtttgtgccatattttgaaacagagatatccagcttgtaaatattccccaaaatctacaaccagaagatagatctttcctgaataaacttattctttctctctttcccccctccctctgcctctttctttctctctctctccagctagctgacaccacagattgcatttgataacataccatttcatcagagccttgagctaattatttcattcatgtctactggtagatttttcttagtgtacacttttagtgtcttgaatctcgtgccactagcytgtagacggcatccccatgatggctcccagaggaaattcttgttaaatggaaggtggaatttcttaacatatgggatccaaactagaagcaactcctgctagggagaagctctgttctatttccatttcctccctctgtgctgcggtccgtctctgctgtttgcctacctctttattcgtagctcactgaggccaatgtgaacctattgtgtgtcccagttgcccccttatgttcttgtctgatgaacaattctatttctgaagcttaggattaaagttagagataagatataccccattctttcaaactaatcataatatataacttgtacatagtgatcacctttttaaatgcattagctaatgtaattattgcatcttaggaaacagactcagagagcgaggttaaagaacacatacccctcatgtcattaataatgttattaagagcttggattttaatcaaggttttcttattccaactcaagggctctttccatgacatgttatttattctccacgcatgtctatctgccatctgaaccagataaaaagcaagtttgtgaattgagcataagaaaatagtgagcataagaaaatagctaaccatgagtgagctgacaaaaaaaaaaaaaaagacaacttctacctcctatagaaaaggttcatagtaggtgagtcttcactgattcattaaataagcaagatcctgtgatgccattgtgaaccccaaggctatgatttcactttttcttctgcctgagctggaatcattttggtcgtgaggaagccctcttcaagtaagcaaaacatggtacaattctctcagagcttaggaagaaaacgtgatgaagtaatcatttccaatctagaaaagcattgtattgtatttctaactaaattcttgctattttccaaatgtatgatctgatgaaatgttatacagataatcatagcaaaatatgattaaattgtttaggcataaatccattttaactgttatcagttcttagcaatagaccttttatgacaaaactcttgcattttaaattattatgatttatttttctgttggctgaaatattttcaagagtttttcagctataaaataagagtgatgtgtatctttgaatttcttatgcaaaaatatgtatttttcttggcaaccttattttttatctcaaagtttttctaattttattgtggtttttcactgtgcaagttatttaaaaatgttttttaagtttaaaaacatgagttctgtaagttatcttatttttactgattttgactacattggggacagagaaaacagtctgtacaatactgactttgaattatattaaaattagccaaatatatgatcatttctcataagccatcttgtccttataaaggtataaattccaatactggatacagtatcttatatatgttcattgaattaagcttgttaattgtatatttttgactgatcactctacaaatgatgtgagattactattacttccattataaatgtggctatatcagtttctccttgtagcagtataaactgttgccatttraatttcaaatgaattatttttaagtataaatctgtgatatgcacctggtgaattgactctttaccttataaagtgttattctttacctcctgaattactttttccaataggttcgttttgtcttttcaatgtaatgacatcagttttttgttgttgtcgatattattacaaattgcctgtgatacctttttcgtcttttaaattttaagcaatacttatcctttaaattctggtatatctgtaacaaatctcatttagctttttttcttaataaaatgtaacaatctatagattttatatgacataaccagacaattcacatttatgtgtttctgatatataccttttcatttcttcatcttagagaacatttatatttgtgcttcagctgaagataggacaaggcaattgtttgtctccagctgattgaaatcagtgccacccttttctcatcttctcacttacggaacttctcccaacttgattgatgtttgttgtttttgttgttgttttcattctttgcttcctaccggtagaaaatataccctctattatctgaatatacatgtattatctaaaaatttaacatgtattcttcaaaaatcaaaatttatatctgtactttctcaatagaaaatgttttttaagttggattgctcaaccccaacttacatagtattatagtctagtatttcattatatcttacttattttgctttccagattagaaattgttattattgtttatatagtcaacgttagtccagaattatccacgtatttactatcatgttcactcacctccccttctggtatttttcagaccttccctgggataattttccttctactcttaagcacattctttaaaaatttccattaatggtaatgtcctagagataaacaggttatgagaacacatttttactttgttctgcttttcaaaatgctgttttgttgagtattggcttatattcttcatatttccacctcccgccgagatcacgttggcttcctcctttgttgtgatattttttgcttaggttccattatgattactttcttggtattgtgcatctttgaataggagtaatttttttttttctggagacagctactttttggaatattgtatgtgagaacaaaagaagaaaatcagctgtgtgagcagacaggctgaattctgatctatttttctgaatactttctcatcaacactcaaccttttgagaaaactctctctgggcgtggggagaaaaaccatctacctggctcacagtgcatagtgtcttctgtagattgagatcagcatcaccactcttttctcctctgtcttaccagactaataacccactgtagaagcctgcatggggcatctgaacatttgctcactcagcaagccttttcctcaatgattttgagaattctctttcttagagtcttcatgataacattctcttctcatagtactgaaataattttataagcatcagcttgattatttcatggttgtgtgtgtttctatatttttgtgtatacatgtgcgtggctatttattcaaactccaaggagaaaaaccttctccagaataattagtggcaaatttttctttaatctgtacttctgccacttgggctctggttaaatccccttctcaaatatgtccttgatacttggtttctgatgtgagaaaattatttttcacattttaggtatgttcatttatgcttcatcatttaaggaatcatgaataaatacaaaattaaatgcaaaacaaatgtttttgtatgatttattgataaacaaaaggattcaatctttagcagatggaaaagctaaatatatatagtataaatgtaaagttamtattagttaataaattgagctggttataaaattccagaagcctccattaattcatcttaaaacacacacttttacctgattcataaatgcctatatctattataacttatgtaaaaatttcaataaaatggtcttgatgcttttagcctacagttttctgttactaatattgcctctcttgcttcattttgcatgtctctgtgtgtgtgtctgtgtaggtgtgtatgtttgagtaatatatttggtaatacttttaactttgctttaawttttttatgtgtttctgttacaaaaactatgcaataggctgggcgtggtggctcaagcctgtaatcccagcactttgggaggctgaggtgggcagatcacctgaggtcaggagtttgagaccagcctggccaacatgatgaaacctcatctctactaaaaatataaaaattaggcaggcatggtggcaggcgcctgtaatcccagctactcaggaggctgaggcagaagaatcgcttgaacccgggaggcagaggttgcagtgagccgagatcgtgccattgcactccagcctggggaacaagagcgagacttcatctaaaaaaaaaaaaaaaaaaaaaaaaaaaacactacgcaatagaaaatttatatttgcataatgttcttaatcctattaactgcttatatttatcatcattagatgtcagtgatcctacagggcccattctgtttgctattcttaaaacatacttttaatttcctatattcctgctgaatataatgtaaatgttatcacattttgattcctctagtgttttggaaaatacggatggtatttttctccaactaatagttctataatacttaataactctatatatacaaacaaatatatatgaacttttaaaaaagcattgatagaaacaaaacagcatattttatcccctttcctcttgtaagacagaacacttaacatgcctttcagttttagttgaaatataatctaagactccaccttgctcattaatacggagtaaattttgaaattattaaaatatatttgcaatcattatttagacctagtcaatgttaactggtttttaaagagttactattagttccctattattgagttcttattttgattaaaattttgtggccggatgcatgttactcattagaagtgcacaaaggtttgtgagcacttacatatgttcaaatatgttttagctgctctcacatacaaaagacaaactgaatgtttggtatagaacatatttactttagaactatgtagacatagttccattatcttaaggcagtttgtctttacaagtaaactgtatgtccagatagatttttctttcttctcctcctttttcttcctcctctcgtcctctctccctccctcccttcttcctsctcctcctcattctcttctttttcttcatttttttcatgttgggtaaatgcttcatttttaaaatatcacaatacacatatattttctggttatgtatatatgtaccatatacatatgcagatgtaatatgcatattcagggttttctttttttgccatcttcaatgttggttgtttctactttttctgatttatttttaggatttccataatacagtgatagttctctcctttctatgaatgttacaattgtagtatcacatcttatactttctctcacttgttcctcttattctgtattcatagtatttctcaatttttaattcaaaatttagttttctgatgtatcaattctgctttaaggaatattttaaatatgtgactgaattttcagtttcttcacatctcagtatctcattaagctccattttattggcatctctctcttacccaatttcttctttttttcattttgttttgctactttttaattttatagattatttaatagaacacatgatttcttaattttatagatcacatataactactgtttttataataattacttcgttatacatagcatatatttttcagaagtaagatcttcttttatgtcttgataagcattcactttatttcttgcagaatatttgcacatctatattaacacatttttcccaattactcgtcctttgaattctctccgttgatgactcataaataatgtctgcagcttatcttgcctggttcctctcattattgacctgttagagcatgtttctcagattttcaactaaagggatggtaaatatgaacagacttcatctgatttctggtcactagcagtcacttaatttccctaaattctggacttcatctatattgctttcatgtccaattgactattttgagaaggtatacgtatctaggtaattctagccaatatatagttcttcttttgccagaagtggactgtttttgtactttctcatggtattctttgtatcccaaacattcatcccccgttcctacataaggcaaaacaaatgcacagtcaccatagatgcgacattttgcattaatgcaaattttagtcttagaacgcatgtagaaagctaagtggccatgtggccctcgttgctactgaaaggtgttgctgtgcaacagatcaacctttttagggcggtggagggaattgatccgaccctatatctcccaattcagcagtagcaggaaaatgaaccatttctttaccattttttcaggctgggatatttattctcctccagatacaaagcaagkgccagccagtacgtgtggattttttccttccatttctgtttaatctgttttgacttacatatgataaaaatttagttgactgaatggatgtgagtctttgtggctggtaatgctataytaaatgaatttttttgtttgcttattcaattcataaaatatttgcttaattttttgagttatgttaccagccagataccattctacagcaagtcarctgtattgatgctaagaaccttgatttttattgttattattattattattattctaagattagagatatcattaaggatattatttcccgaaaccacagtctatttgaccagcttttaatttcataatttgtaacctttttcaagtttttacaaagttttctgaatttttctacctatctgttctttcattcagccttcccatactaattcatttaactcttagactacattgatttttagatgaattcccactgttgtgcctcctatgcagtgaatcatatgacataattcagatacttgttttaaatagtgaaaataaaatgtgactattcaaacagtgcgtattagccatattttaaaaaataattttatgtggtatttatcattgtgtgtgctgtgttctcagaagcattaaaattaccagtgtattcaacttaccattggttttacctacatttgccttccaaaaaatttctagatctttctctaaatcatattcttatcaaatatatcattcaccataacaataactttgtcaaagattcagtcaaaacttagatttctttctttttttttttaaacgagtctcactctgtcactcaggctggagtgcagtggtgcatatcagtgctccaacctccacctcctgggtcaaacaattctcatgcctcagcctcccaggtagctgggattacagccgtgcaccaacacacctggcaaatttttttatttttagtagagatgggattttgtcgtgttggccaggctgatcttgaactcctggcctcaagtctatcctcctgcctcggcctcccaaagtgctggtattataggcataagccactgtgccagctgaaacttagatttcttaagaacctatatcctcatgctaacaattacattaatattaaacatcattaagtaggtatctgttcatattttttatattttgcataattaattcacctataattttttttttggtgaagaacatccacatgtttcyagccactagaacagcaatagatacattggggtatatgtagtttctctcccctctcctgcatctgggcagagggcagtaatgaaacattatctcccctaggttttcctcacccatgcaagtcttctcaaaccatgtcctgtaaagtgactaccatgtaaggagatttcatttaagagctaaaactatttaccactttggtttcagaacaatattagagttttgcaaagaagaaactgttatggaattatttttttctgctacttacttccattcacagtcaaatactcataaaaacaagggtaatcttttgcatgagtggaaaattttgctgcattacattggtaactaacaataatgcttacgcaaaatggaaataaagatgacaatacacattattttattattatcagttaaaatacatagaatcagttaaataaaatagacaaaaattaatggattacaggatacatccaaatagcaattataaaatgatgtggctactatttgtcagacactgacaagttacccttttttctttttttttcttttctttttttttttttttgagatggcatctctctccgttacccaggctggagtgcagtggtgagatcttagctcactgcaacctccacctcctgggttcaagcaattctcctgcctcagcctcccatgtagctgggattataggcgtgagccaccacgcccrgctaatttttgtatttttagtaaagasagggtttcaccacgttcgtcaggctagtcttgaactcccgacctcaggtgatccacccacctcagcctcccaaagtgctgggattacaggcgtgagccactgcgcacagcccgacaagtttttcttatataatacttattaacactatggaaggcagttattaatatctctatttttattaataacaaatttgagatgttagaaatgtttactaatttactcagagtcatgcagctattaatgaagagtgaagataaaactctcttgagcccatcttttttttttctctctcattaacccctgttacctttgactaaatggtgctgaaattctcctttagttttgtagagttatgctgaacttagggaataacattaaatgtggcccaaggactactactgttttccaggaaaatatgcagtgtcttagttcccaagtgaggtaaaacttatcagttaaaccagtcccaatgtttattggaccagtattctataaaatgtaggctagctatacaatgatttatagttttactctaattctagacaacttaaaataacagaaaacagtctattgtgggtactttatggttaaaagatataatgctttataaatataaatcctcttaaggaatagtttcatattctaaaaatgtaactttgacatgcctgaagttgtttactaacataccaactccttctattattaaaatatataaattttaaaaggtatttaaattaaaactataattttacgaactacatctgaattgattaatattttttctcataaaagcaagaagagtgacagtatctcaatttgtaaaatatacagtgggacacattctttcacttgagatttaatctatgcaagatgttttgctgatttttttaggcttcctttaccctctttttgtaaggaagacttggctctcccttaggactctgttcttttgtgacactctagtggaagctgttcatagtcccatgcccctcataccaaggaataggagacaggcccaccacattcttctatatggctgttgactaccaggcccctccttttcaacacagcataaaattccattccttagagtccccagacatccttcgctactgccccatgtctcttctacttgctgacctcctctgaccttgttcctccgcatctgttagagactttcctgctagttacacttggctcagcattttcatttcacactctaactccaggcttcccagagaacttcaaagccattcaatcatgatttttctaaataaggtcatttattccttttagtaataaaatactcatgtttttccctaggcccatggcaaacaaaataagagactgcgtttccagccttcctgttgttatacattcagggcaatgagatgtgagcagaagtgatatatgcaggtctcatcaggtccttaaaaggaagcagcttgcttttcacttattttcctcttaccagggccacaagtggacaaagtgagatggcagtggcttattatttttctcctacctctcagactattctgtacttttctttttggggtcaatccattatatactgattgtctcttatactgagattttattctcatattgatatctcttcttaatctcttaaccgtctttaaaaaagacttatggaataaaccataagatatgtcacctcaattcaagacccacatgtaataactgcttattcggcatcttcacatagattttgtacaagtccttcagtttcatacatccaatgaatcatgctacctaatactctttaaattgatgatattagcaactacacaaaataaaggtacagcttaatgtgctattagaaattgaacaaacttgtaatcacctcccatgtctagaaatttcctaacatccagaaagccctgcttactctcccaaacacaatgccctttgtctccccatgagtaaacactcttctgatatcacttctgtacttttctatataatttcttcaagcaagtgtttattcctaaattgcatggctttattttcccttattttggggagtagtatttttaagtattttttaattaatgtattcctgctccgtttatttttttctagaaatttacttgttaaagaaaccatattattttttctgtacagatttccacctgatttagtttaatgtgtacctctgtcctccatatttcctgggccttggtaattaaatctrgaggcttaatcaaatatattcaagttagaatttttggcaagacttcttcatggtagttttgaattctttatcaggaagcacaaaacacctggctgcttctcttcttgtgatattagcagtcaccaatgcttgatgcctagtttttataattcattagtttctgtaaaatattgataatgcaatttcatcactttcttcatttatttatttctcttctacaaagagaaactttgcctcatctattacttagttatccagtgacagctttattttaacaatgacaaaataaatgtttgattgtacactttattaaccctgcattgtacaaagacaattaattcattgtgcatgaatgtgtgtcatgtgaattcatggatataaacatatttgtattagctagtaagagcctctttgagttagctcacaggttctattgatgtaccctcatattctttgatatctttcttgtgaactagagtcacaggacatcctagctcatcgtatacattatctgcccaaacctgaaatcaactggtccaccaagcaaccctgctttcttttactaggtaatgatgttccagtaccacaatctgaatgtgaggaatgctcattgtactgaaatgaacattacttctaggccttccaaggaatgaagttataagaaatgacactcacacacacacacacacccccatccatagacacacacaaacacacacacacagagatagagagagagagagagtgagaaagagagagatgctggggatgctagaattactcattttttaaaatccagcattacacacaaaatattatgaggatgaaaattctaatacagtcacttatatgattaacaaaaagagttttcttaaaaatgcatacattattttccagcaccatttattaaatagggaatcctttccccattgcttgtttttgtcaggtttgtcaacgatcacatagttgtagatatacggcattatttctgagggctctgttctgttccattggtctatatctctgttttggtaccagtaccatgctgttttggttactgtagccttgtagtatagtttgaagtcaggtagcgtgatgcccccagctttgttcttttggcttaggattgacttggcaatgcgggctcttttttggttccatatgaactttaaagtagttttttccaattctgtgaagaaagtcattggtagcttgatggggatggcattgaatctataaattacctagggcagtttaataaatggtgctgggaaaactggctagccatatgtagaaagctgaaactggatcccttctttacaccttatacaaaaattaatttaagatggattaaagacttacatgttagacctaaaaccataaaaaccctagaaggaaacctaggcaataccattcaggacatagccatgggcaaggactccatgtctaaaacaccaaaagcaatggcaacaaaagccaaaattgaaaaatgggatctaattaaactaaatagcttctgcagagcaaaagaaactaccatcagagtgaacaggcaacctacagaatgggagaaaatttttgtaacctactcatctgacaaagggctaatatccagaatctacaatgaactcaaacaaatttacaagaaaaaaaacaaccccatcaaaaagtgggtgaaggatatgaacagacacttcttgaaagaagacacttacacagccaaaaaacacatgaaaaaaatgctcatcatcactggccatcagagaaatgcaaatcaaaaccacaatgagataccacctcacaccagttagaatggtgatcattaaaaagtcaggaaacaacaggagctggagaggatgtggagaaataggaacacttttacactgttggtgggactgtaaactagttcaaccattgtggaagtcagtgtggcaattcctcagagatctagaactagaaataccatttgacccagccatcccattactgggtatatacccaaaggattataaatcatgctgctataaagacacatgcacatgtatgtttattgcggcactattcccaatagcaaagacttggaaccaacccaaatgtccaacaatgatagactggattaagaaaatgtggcacatatacaccatggaatactatgcaaccataaaaaatgatgagttcagatcctttgtagggacatggatgaagctggaaaccatcattctcagcaaactatcgcaaggacaaaaaaccaaacaccgcatgttctcacttataggtgggaattgaacaatgagaacacatggacacaggaaggggaacatcacaccccrrggactgttgtrgggtgggggcaggggggagggatagcattaggagatacacctaatgctaaatgatgagttaatgggtgcagcacaccaacatggcacatgtatccatatgtaacaaacctgcacgttgtgcacatgtaccctaaaacttaaagtataataataataaaaaaaagcctacattattttcatgtcctccaccttttattaaagttgaactacgtatatgttgtcagatcagatagccatattaaactgtcttcaatatgtccctcatctgtctgaggtctctaagaaaacatgttatatatttaattctcaccaacaggctttgtgttgatatatctctgtcattttgattgtctgaagcttattctccagtatttatttttaaaagtccataagaacaatattttctgagttcctgcatgtttcctgagttccggggtcatgacagtttgagaagctttaattttgaagtcagtttatgtccttggtttaattctcttttcttgaatatctaaaatatatcacattatttgcttctgtcacaaggtgttgctgccaaaaagtctgttgacaattttccttcccaaaagattgtaagactacgttggcctttttcactgctgtgactcatgacctagtactttgtaacaaagtgccttctcatgtcttcacctttcttcattcacttcatctttctccttttatattccacatcttttttatcctcttaatttatttattttttttgagatggagtttcgctcttgttgcccaggccggagtgcagtgacatgatctcgactcagtgcaacctctgccttctggtttcaagcaattctcctgtctcagcctcccacatagctgggattacaggcgtccgccaccacgcctgcctaattttttgtagttttagtagagacagggtttcaccatgttggccaggctggcctcaaactcctgagctcgtgatccacccgcctcggcctcccaaagtgctgggattacagtcgtgggccaccatgcctggcctatcttctatttttcttactcctgtttttctcccttcttgtttttggccttggctttgccaaattcatatcctctgtatggaaaccaattcaaagacctcctcttcctcttctcaaatctgtcagaaaaactgttacttccttcaagttagcttaggaatcttctattcttgaaatcttacccactcactttgacacactgaaatcttcttttcctaatgacattgctcacagttgtaatgtaaaaaaatttatctgagcagcaaataaattattgaaaataattttccagtcctctaattcattactaaaagaacactcagtaaaacaatatttaaacagaggaaggggatctgcatatttgttgcagtagacaaagaaaacagcagctacatcttctgatcagtaagcgttctcattgtcctggaattctcttcaggttagatttgtctgataataattgaatcattattgtttcttcctcaaatgccactaggttgtactcatgcagcccccagcaagtgtcatatttcaaaggctatcaggattcagtctgtgggtttccttcactctccatgtctttccctgaagcaagctttattcccacaaatcatttaccccaaagttgttatgtgaaaataggaggctaactttttattgtcttatttactcctgagacacactcagaggcattgaatgaattactgattcaactgctttattatatttaaggttgaaaatgtaacaacgcttaggaatcaaaacattcttgaaaccaggtctcaagatcctgcacaaaattatctttgacatattgcacattctaaacaaaaacatacccaatatataaacctcaaatacgttcttcatgaattttacttttgctttttccaaggcaaaataagcttaataatattctatataaaatcctacaaataaaatggagcctgtgtgtattaaagttattcctatattgtactgtaatataaatttttgtctatgacctacttgaaggccagagctgtattttatagtttttgtattcatttttgtattacaagtgttttgtacagtgcttgacatatatacttaaaaacagctactgaataaacaaatgtgcaaatgagtaataggtgtgtgaataaataaatgtatttattaaagtcaatatctctcaaaaatgagaataaatgatggctttgaattttccatatgcaagaatctttaggcagtttaatgggaagtgaaacttctataagattataggtgaataagaaaacatcaattgttcgcataaaagggcagctaatcaagactgtgtaaagattaatgttttccccaagcacctcttgtcttcacttaaataaaaatagtatcagagcttatgtaaatagtaaaatgtttaccttatcactcgattccaaattagaaatgagaaaagtgagataatgtaaataataaaagataaatctatctatctatctacctatctgtctatctagttattatcttctctgaatttatacaccaaattgaactgaggaaggtcagatttgtgtcttgctaaaatatgattttctgtgtgtgtgtctatgtaatacatacacttggctcagcaagtgaggagatacttgggaattggttgagcagatgaagagagacttgggaatttcagaatatccttccactcagagccctctcagtaaccaggtcagccrccatagttacagacttcctttccacctcactaaaaatacagatggtttagctcattagacattgacacatcctgtcttggcacaatctctatctcccatgacatttatataaattaaaacactggtaaattgtatattcctaaaatttgttatctgaaataaagatcatttttatttagtcccataatttatttcttccacactcctctcatcttcctcctgtagatattcttagtaatgtggccaggactttttggatcaagaacaaacattctcagaaaggttccttttttgttgttcttttgtaaaataaacatttttgttcctattctgaacactggagttgtttgaatgatatttacacctttatagatttaaaaaatagaagcagctggcaggggctgtcctttttctgataggtgtcgaaattttgtctatactttctctttgaagccagataagtaattaatcctcaacagaaactgacctcttgcaagtttaactgaataccaggttataagcaactgtggtacactaaggagttgtcattaataataccagctttcaaatatcactgtttgaattgagctgaactttccaaccaataatagagagcttttttgtgtgtgtggtcttctatacttattctagtctctgattttccagttaatttaggaaatacctttcagttcatatattgtatttattttctattgctgctgtaacaaattatcacaamctttgttgcttaaagcaatacatttattacgtttcagttctgtaagtcagaagtccaacatgggtcccactgtactaagatcaagatttcatcagggctgtattcctttctggaggctccaaggtagagatcccttgaccattacagcctctagagacgtcttatgttcctagccatgtggcccctttcttcatcttaaaagccagcaaagtggatttaatccacatatcacagcagtctgatctcttctgcctccttctcccatttgaaggatccttgtgattaccctgggtccaatgagataatctttctattttaaggtcagctaattaggaaacttaatttcatctgcagccttaaatcctctttgccaggtaacttactgtggtcacaggttccagggatcaaaacatgggaatatttgaggggacacagttttgtctacaaaatacattttctatagttctgcagtcttagttaaatcagggactcttakacatgccttctcaaatatgtcacaattgctcttaaactacatgtgtagttctgtttcaaagtcgaagtgtatgacttttaattattttatacattacttcataatgcaaaatgcaarcatttattggctggaactaaataatatttttatttgtttataaactaagaaatactgtagcttctagaatatgatggtaaaaagactgaaaattcctagaaatttcttaaaacaaccaaatttaatattaagaaatggatctggaagaggttgtgtttttattacattttcaatatgaaaagatatttctcattctcctttatctcatgataatgaaattttttcagacaggcttctaacccatttcaagcttgctgtgagaagtacttgaaaaaaatattgttattaataaaaattaaaaagtttttaaccctttttagtggagatagttcatttgagcgaatactctgttcagggccaaaatccaggcatgctctacatgttatactagtatgtcatgttcacccatatgcctcctttaatccctgcttataataaatctgtgaacataaactcaaacgttagataagttaatacatttttttgttgctcaggtctttatttgctcagtggtagtaataatattatatatctgacaggttgaagtgagaaataaacatgttaaaacatgtgaatatctacatatctaaagcattagcacagagtaggtgctcaaaaaatgttaggtatcgttaacaataacaagatcgtccagcctaaagaaatctttaattgcattatcagaccattgataccttatttaaagaccttcctgtggctccataaaattaaaaaaactcaaggttttgaaagcatcaaaaattgtaaaaatcactttaatgtagctacatttgccataataaactacaaggagcaagtcaagctaagaaagagtggaacagaatattaagttttgttgtcaaaattaaagtcacacctgctgacaaattctgagttccatgatagacagttgaaggagtacaatttgctccaatgaaacatagcttattctacaaacataaagagaaaaattgccattcctgaaaagggcatttcaggtagataatgatatagctatgtgactcatgaattcttataatagctttaaataatattttgagattcattttctggttaacactttatacaccatttacatacatctcttgaaaatctttcccaaatttatcagttagttcagttactttactgaatatataaagtataataaatctaattcatttattccttaggtgattatgattttcaaaaaaatttaaatgccaacataataaaaatcaaattgcattgcaacaaaagattgatagagaaatgtttgatagtcattaccagaattatcctttaaaaattgtttttgtctttaccacatgcacacataattgttaagagaattaataaatccatcaaagtgaagcaaatacttcacgatttcatttttctcctaactaaagtgtggttttaaaaagtttattaaataatacggtcaacaaatgagcatctactatgagtgaagcaatggactaggcactgagttttaagtaagaaaaaccaataacaaatatggtctgatgatctaayggaaaagggaaatagtacatatgtaattacaggtgtaattattagtcccaataagaagtgtaaacagtagaaaatatacagtagttttacctttcccgggcattcagaaggtttctttgaagaaataatatttcaattaaatcctgaatgatgaaaaagaattagcaaggcaagaagtaggatgagtgtccaggataacaccctgggaaaatgtcagttatcaaaaatcaagtccttttgaggagccagaaggccaagatgatgaaaagggagagaatgaaactgagtagcataaggtgaacctagagagtgtgtagtgtcacgggtcgttaaggaacttccaagtcaactgaggaattataaatgttatcctgagataatggggaaccactgaaaaactataaccagtggagatatttggttagtgtcttaaataaaacatacataattggattactgtataaggcacaaaaatgaattgcagaaaatggaaaaggagtcccagagtcaatacaatatttcaagtgaaaatatgaaagctttaaatgacaattatggtagtgatagacagagaggggaagatagatttaagatatatttatgtagtacatcctacaaggactggtggattattggatatagaagaagaaagatgaggaagggttcaaaggtgaaactctggtttctggtttgagcagctgcgtgaataattgggtcatttttttgccccatagaacactggaataagagcagattcttgggtgaattatgattggtyttggactttcacttggagacttaaaaaatatccaaatggagctattgattaagtaataagaagagtggccaaggttaaagtcattgacaaatggatgggatggtaatttaaaccacaggaggtatgaaataatttacaataaaagaataacagggaagaaaaaaagccctgacaaggataagatggaaaatgcataataggcaaaaaaaaaaaaaaaaaaagccagtgtttgagaaagagcaaacacagaaagayagaaattccagtgtcacggaaagccaaagtgagaaagcaagaaattttaagtatggtgaacggtatcaaatcctgtgaagagataaattcaaaaaggatggaaaactgtcttttgaatttactaacataaagtcagttgatgaatttaatgttagtagttttagggaagtataaaaggctctgcaattatttcgagttttttgggggaaaaaaagtttagctaaccatattaaggtgattagttgtggtgggtagaaaagagttaaaactgtgtctatggatggggtaattgctggtcaagaagagactgtttagctaataygaaagagactttagcatgccaacatgcttatagatttccctctgtagtcaaatgataagtggatattcaatagaaaaagagaatattgactttgaatagactcatgaaactttcattaaaattgacgtgaacttatttttctatcacaggagttttgtcagtctatccaaagtcaatactttcctttcagacttataatgttgtaagccctgatagagttttatagtacttaaggaattatttcacttgctaaaaaaaagcccacaaaacagttagttatagttatttatcctatatctgtcttacaagctcttttctttcaaattcaatatattttctttcattttatgctttttctaggaaaatttctatcttcttttgtattatcaaggagatatttggagcagagtcaaccctctcagttacataaaataaaaaatggcatattcttggcaaacggatccaaatcctaatgaatcacacgaaaagcagtatgaacaccaagaatttctctttgtaaatcaaccccattcttctagccaagtcagtctgggttttgatcagatagtagatgagatcagtggcaaaattccacactacgagagtgaaattgatgaaaacaccttttttgtgcccactgcaccaaaatgggactcaacagggcattcattaaatgaagcacaccaaatatccttgaatgaattcacttctaaaagccgtgaactctcctggcatcaagttagcaaagcaccagcaattggttttagtccttctgtgttaccaaaacctcaaaatacgaataaagaatgctcctggggaagcataggaaaacatcatggtgctgatgattccagattcagtattttagctcyatcattcacaagtttggataaaattaatctagagaaagaattagaaaatgaaaatcataactaccatataggatttgaaagtagcattcctccaacaaattcatccttctcaagtgacttcatgccgaaagaagagaataaaaggagtggacatgtgaacattgtggaaccatctttgatgcttttgaaaggctctcttcaacccggaatgtgggaaagtacatggcagaagaatatagaggtaagtataatacatgtcaatgtaaaaatatgaatctgaaagaatcattcaataatgtattgggttaatttggtaatgaagataactaaacttaaatagggaaatctattcatcttacttttgaaaaaaattttcacaaatgatgtgttcttgtattaatgattttttttctgagaaaaagggaaattaaaaaaaaaatcatctataaagttccagttccagtttcatcaaaactattataaaattttacttggttttagttatggtaccttcatttcattgataaaaatagcagagttgaaggtttaactgataatattttctgttttttgtttaatgcacatacacaaacacaaatacgtttcattacattatattttgagtcacattgtaatgatttgaaactttatatcattattggtaggaaaaaatgcccctttacccagagtctcctaatttatacgattggcaggcaacttctattgagatcattccaagggtaggaaattaagtattcattgtgtgactcatcttaatgcttttattactagctttccaatcattttagtaaccagagttttttctgtatttgaagatttctctacttatttctctgcttgagtctagacaaagtaaaatcagcagtaaataatatttatttccgacttaaaaaagaagaaacattattgcagctgcagtttcctgggtgaggcagaagggttctttatttattcaacaactatttatcaaatccttaaaacatattgtgatatgctatccagaatgaatgcaaagaagaaaagatatgatacttgaattcaggaatagcatattgctcatgtttacttgcaaacaaataatggcaacatagtaaaataacaggtggagtaagtgcataggaaaagaaacatctaattctacttcatttgaattcacttgcaaaagaggtagcacctcaaaggatctaaattaaaattcagtaaatcttagggctgtctagttctgatcacaatagtgtaataactactaaactttccctactcatcaaaacaactatacaattagacgaaataagtgaatcaggtgattgaaggtgttgaataggcagtatggaacataaatccttgagaaaagcaagccctgtgatcatctcagtctgtgcctgagggtaatttcatgctgctatgcaggctgctggagcccaatttgagcagcagtatcactgactgcgaagacagtgcctgcagttccaagttgcagaagcagctgtgatttgacaagcagagtgctaaagaagaggtagctatgaaatgggtatgggtcagaagtagagagaggacttacggcttggccaagtattgggatgtgcttgcaagccttagtagataatgtcagcgtttggctgagaattggataggattgtgttaattacacagacttgaagttacaacgcagaaatttgggccaaattagagaagagactgagctgagcgcttcaggcattcaaatgaagctacaaagccatgtcttaagagtaaaactcatgctctaaaatcaatgctacatcaaccaaaatagatgtggcctaacaacaacaaaaattcagaatcataaggcaaataagacaaggattttaactgcctgccaatgaaaaaaaaacttaacgattcatagtgtgccatctacaaaattcaacataaaataaaaatgcatagatatgtaaagaagcagggaattttggctctcgctcaagaaaataactctaccagtcaaaagagcctctgagataatccagatgttggaattaacagatgggaactttaaattggttattaaaagtatgttcaagtagataaagttaaagaagttcataatggctagcctagtgatgatctcagcaggaaattagaaacatcaagaaacaaaggaacaaaaacaaaggccaagtccagcgctggaaacaaaacataggcaataaaaaagtaactggatgtgcttaacaacagataggaaagaacaggggaaaaaataataatttgaaagcaaaactgtagaaattagccaaactgaagtacagaaaacacagggatcacataaacatgagcagggattcagagacttatgagacaagaaacataatatgtggacaactggaatgctaacaggaggaaagaaaaatagggagcaaaattaatttgaagaaataatggtcaggaaattattcaaatttgatagaaaatatcaaattacagatctaacaagctcgccacaacccaaatagaataaatgcaaagacagccacatatagacattttatactcaaacatctgaaaattaaaagagaaaattagggaagggggcaaaaatgtaagaaaagatttcacacrgtggaacaacaatctgaatgaaagaaaacttgtcactcaaaacaatggaagccagagwcaatagaatgacatttttaaattctttaaaagaaaataaaacatacttctatatccactgagtataagtttcaaaaccaaaaacaaaataaagacattaccrtaaacaratgctgaaagaaattagtcagctagcaggcacatgagaaatgccaaattaaatacttctggtacaaggaaaatgacaccagatggaatctaggaaagagtgaagagtgatagaaatagtaaatatgttgaataatacaaatgactactttaaattttttgaaagacaatgtaccaagcaatataatagcatgttattgtaggatttattgtgtatgtggataaaaactatttgacaataataacataatgggtggaaggggttaaatgttattttgctattgtaaattcttacatattaaatgcaatggtacaatagtagttctaagtaaactgagatatattaagggtgtatattgcaattcctagagctagtaccatgaattataaaaaaaagaaaaatagaagaaaatctaaaaatgcagcaaaggcataaaataaaataaacatgtcaggagaaacagaagaacagaataaaatagaaaagacaaatagaaacaaatataaataagacagtcttaaatctaacaatttccataaatatactaaatgtaaatagaataaacattccaaacaaaaggcaggaattgacaaatgagataaaaaaggaaggactcaattgttgtctacaagggacacaagaaayaaaggcagagakagattgaaagtaaaataaacaaaaagacaacattcaatcagaaaaaaatgcttgtatgattattaatatcagaaaaagtatatttcagggctgagtactattagagaaaaaagggatcatttcgtaatgctaaaatggtcaatcaggaagagataataaatttaaatgtgtatgtacctaataacagttttaaaacgcataaggcaaaaatggtttctttaatcctacatgcactcactgaccaagctattcattcatatattcccaagctattcatgcatatattcccaataaatgaagcatgcattcacataattacttgtatatgagcattaatagttttctttacaataccaaaaagctaaaaacaactcagaggttcattaataggaagatgactaaacgaactgtggaacagttacacaatggaatactactaatcagcaataacaatgataaacctttgatatgtgtgatagcagaaataattttaaaacatgtgtatcattacatagaagccacaaacaaaagaatgcatatacattatttatggtgatataaatctaaataacagtagttaccaaatagatatgcagatggatataaaaaagacatggggacattttctaaaatgaaagaaatgttctatattgtcattggggtactgatagtagagttttatgccttccacagaactcaaattatatacttaagatctgtgcatttttctatgtgtaaatattacttcaatttttaaaaaatctaaaaaaaattaaaaatgaagtctgaatgaaacttcaaaacaggataaaattgtagaattatttaatagtttctcttctccaaattatattaatttagtagattttattttaagtcaataggttgttccattcagctagtggaagtacctcaaagcagcaatacgagtctggcctctttttgcaacaaagtaaaaaagtgagtactggtatttcattaaactttgaaatttttgtgcctgaataaatttgtgtattttgacatcactgaactgattaattttgcatataaaagtcaaagtcatgtaatttctgaacacactaaaaaataaaattttttgacaaattagttcaataatcaacttctgttaatgtttttgttgtttatagtcaaatagatgtttttctcttaaaaatttggttaaagttaaatgttttataaatttggacatgcacttgtttgttggtggtttggtttgcagtgaatttttttttttgtttaatgacgtaagtgactaactcctctggctaacccccaaattaacacaaacttatcctccctacctgggacagtctatttagaatcatcatagttcaatcttatcttgagtggattggcagaatattgaataaatacgtgtgtgttaatgcattgagaaatgaatttgatcactggcagatattccaaaaaaatcactgatattttgttaatctaaaaatgaatttatgatataaacataratgccttctttaaggcaaatttcatattagcaattaaaatttatatagttctacctcttctgttgctagggtttctgaaagttttgaaaaactaatgcattcagttgggcgcggtagctcacgcctgtaatcccagcactttgggaggccaagacaggtggatcactggaggccaggagtttgagaccagcctggccaaagtggtgagaccctgtctctactaaaaatataaaagaaaaaaaaattgctgggtgtggtggcgtgcacctgtaacaccagatacttgggaggctgaggcaggacaactgcttgaacccgggatgcagagcttgcagtgagctgtcacatcattgcactccagcctgggcgacagaatgagactctgtctcaaaaaagaaaaaaaaaataggctgggcacggtggctcacgcctgtaatcccagcactttgggaggccgaggtgggtggatcacttgaggccaggagttcgagaccagcctggccaacgtggtgaaacctcgtctctactaaacatacaaaaattagccaggtatgttggcaggcgcctgtaatcccagctactcgggaggctgaggcaggagaatcacttggacctgggaggtggagattgcagtgagctgaggtcgcgccactgcactctagcctgggtgacaagagggaaactccgtctcaaaaaaaagagaagaagataaactaatgcattcatattttaattctttagttttaactcagttttggctattgtttgaaatataataactatacatttttataagctttcagtttctaccaaatgattatttgaaataaaatgtttgaatcatttatttaatcattcatttaaagtctgtttcattgtctaataactagcttatgcatgagagatactcaaatttaaaataaacaagtaaacaaaaaagcaaggtccctgcctcataaaacctataaccataagaaggattgaaaggcttacacacaaagatacaaaacaaatcacctcaagttcacgaaaatgttcaatctttaattaatttcttgctccagtttatgggaaaaaaattctaaatagtacttaggattcctaaattagggtctttaatgtcatcaacatttattctttcaggaataagctactcactgtgacaatatgataagcatagctagaaacttgctactttaagtctaaaatatggttaatttttattttaccttctaagcatggcaaagaactctcttcatactttaagatatcactcttctgaataactctactcacagaccacattattagctcctccagcaattctcttttttaaaacacaatttcttattcttggatgaaatatttttgtggatgcactagtgacatcgaaatacttgatgtgatgattttccagtgacttatagtgcattttccaagctctttaatataatttttctaaatagtttatttcataatagtcatgaaaactaaaacatacaccaaacaataactttagagtagtgaaaagaagccataagttatattcacacactctttccttgttttcaataatttgtttgttggcaaatatttataaaatgattaaatgtatacatgcataattattttgtacacaacaggatatttactcaaaaataagtatgtttgaggacctagtatgtggcaagcacccttaattcaaaagaagatcaaatggaatttgagagctgtttcaaaagaggttctccaaaactttgatttctcattgtaacatactttaaagccacatctttcaaaaaaaatgccatattcttgtaacaaatatggtaacatgccataacatatgaaagaagtttctggcccatggtagatgctcagcaaaagtttaggagagaatgaatcatgaatttgtattttaaatttaatttcttaaaatggtagaagctgaaatcatggacgcattgaggagtgtcttattatatgataaatgctaactcataaggctcctcaatccctaactggactctagacctttatggtagagtataacaatgaagagtggcccatgtccttattctgagcagtggctctcaaactgcagttccagagcagcaacagcagcagcttacttggaaaattgttagtaggacaagtttggggaaccctccacagatctactgaatcagaaactaaggggatgggatccagaacacgagtggatacagatgcatgccaggccattgggtgaatgtgtatttacttacccatttgccaggcccctgatggaggagatgtttccatggaataaagctttagtgctacaaaaatagctattaggtttgtgcaaaattaactgcagtttctgcaatttaggtagagaaccatgaggtttagatgtcagcatagttaacataaaaaaaaacaagatttcatattcaccctcagaaacattttaaatatccacttgaaaatatcttcatgttatgttctacatgtgggcataaaacactgatcacagggaatcaagctatggtaacatataatgacaattatactttacatgtgtatattgctttataatctgtaaatcttttacatgtcttttctattgtaatagaaaacctttgaggtagatattaatatccacctcagtaaacctttgaggtagctattaatatctttacttgttcaaaaaaattggtcaaataacttgcctctggccataacattactaaatgaaagtgccaggattcaaagtcaaggcttctggctccaaggataaactgtttttgcaattctttgactcatttatgtgtaagcaattgttcagaatataagaattacttttaggctccaatatttgtgtaaaattcaagtagttgtgtagtatccaaaaattttaaagaaaatggagagacaaaaatagtgtttacaaacttgacaagaacaagagaatttatttgccaaaatttctaaatcaaaatgaatgactcgcagcttgacaaaattaggcatgaaagaaatccaagaggaagaactctgacatcaaaagcaatgtaaatgaagcaagtaataatattcagcgtgaatcctcacgtttcatgttatgacaatgaattcttaattatttcaaatgagatgctcctgggaaagcctaaagaacagtcctttacacttgtttttggtataattgcaatctctaccaatctggactagctaaatgcactgcatcacaaatcaattactgattgctttcatcttttaagtcttttatagcaaaacactacatgaagtttcttaaaattacattgtgggcaatatgttttaaactgtgtcttgcaggtcttgtcctaagtatttttcttaacatatgtttttcagaatcagagaaagatatcatgcasctgatgttaatttcaattctgggaagatctggagcactactacagcatttccgtatcagctcttttctaagaccaagtttaatatacatatttttattgataactcaacacaacctcttcattttatgccatgtggtaagcaaccttgcaaataagtctacaaatctatacaaagctggtattggcgacgtagccttgaattcaaagtctgaagttattaaaaaataatattagctactgtttttctctgaagtgaaataagaagaaaacatcagggatccatttgttaatacttaagggaggaaagcaaaactattttcttcaagaagtatyttcacatagctcacccgayaatattttatcttcctgctataaaatgcttaatagcaagtatagcaagtttttaatatattaaaaaatgaatttcaaaagattctagataaggatggtattaaagtaaaaatggctgcttctatctattaggaacaagtatttccttgaaatataaataaattgtgaggtagaataggcattgttacacagaatctctatttccttaatgaggaatctagtagcatggtataacatacctccatcagaattagcaaacctactgattcagtctctggggatgacacccaggaatttatattttatcaaattcgcctgaggatttttacttttctaaagttttagaatatctgtaaagttatttagtatcttacttcattgttatagtccactattttgcaaaacagtattagctctttaaacatttagattgctattaagtgagtttctacatatcaacaggaaactatttcctggcacataatgatccattaaatattttcttttatttattaattattgttattattgtgcttctttcttactctattcaaggttctcagctaatgcagatgactccaatcatagcagtgttatattggtatattagttaagaccctcttggttggaaatgaaaagaaaccaattcctgctagcttaagcaaaaaaaaaaaaaaaattgttttaaagaatataggggctgggcacagtggttcatgcctgtaatcccagcactttggaagggcgaggcaggcagatcacctgaggtggggagttcgagatcagcctgaccaacatggagaaaccccatctctactaaaaatacaaaaaattagccaggtgtgatggcgcatgcctgtaatcccagctactcaggaggctgaggcaggagaattgcttgaaccagggaggtggaggttgcagtgagccgagatcgcaccattgcactccagcctgggcaacaagagcaaaactccatctcaaaaaaaaawaaaaaaaatawatawawawatatatatatatatatggatttattatagaattcaagtatatgaatttcagcaaacaattaggaatatatgaaaaacacaaataatcaagcagcccagaattcctgtatgcatctcatttcatttcatataattgcttctcatattcctctcactctctgatcactcatttcctttgcttatctaaaacaagtgggaagccaagctactagtctagctatctacagacagttcactatctctatgggatccagctcccagttcctaaaagccagattctgattattcggccaagatcaatgatgctgcaccttgatccaatcagaaagaccataggttgggtcatgttgtcttcagttgctggccactattaaatagcatgttcatgtaagagcttaaaagggaggattatgatatgtgaatatgagaagacaaatgactttaccctatagcatgtctacattttgagttccaaaggaaaaggtggagagagagagtagatattcattaaagtttctataatatagctgttcaagctagaaccttgagtaattactacatgggaaaggaagaagaaccaacggtggatttggagtctgacagatcttgtttagagtctagagaacaaccaactgtggagacttacagtcattaagggcacaggccttggagtaaacagatattgtttaagtgtgacacttaacactaactgtgtaatctctacaaaattgcatagcttccctgaaaatgagtccattcatctttgaaacttgggatataatacctatataataggtacaataatcaagaaatgacatgtaaagcacttaatagagtaattgctccgtaaaatatagctattattaatattaatactaacattatatcccagagtgaatataacctgtataacacttttaaatttactggccacgtttgtctatttttttatgatagcttcgcaccagattcttgaagaaaataaactgtgctattataaatcctatttaacagatgaagaaactaggtcaaaaaggcgaaataacttgtttacataaatcaactaaaaaatgaaaaatctatattatttccatgtctcagtgacagaacattgataagaacatcttaatgatcacagaattgtcttaatgtcatggcatgaatatgaatattaactagtgtaaatgccctgaaaatatttattgcagttaattcagaatcttttatcttgctgatacccttagaaggagcaatatgtctcactttggttgaaaatggaaagaatcaaacaccccctggaacttttgcctggctatacccaagttcctgagtgtatttcccaagtccctaagagaaactgcagtagatttttatgcagaactgcagtgtaccaagggctttaacatgagaaacacaatacctagctttgttatatcacatgaaagcagaactgatcaaaggaattgcaaacaacattttccccaaatatctttaaatctaaccagtctgataagtcagatgaatctcaatttaattccccttgatgaagctagacagttacaatccttcataatgtgttggtcatattttgtgctcaaaaacttttcctagtcagtatatgatacacttttattgacttttattattcctctttttctttagctaattatcttgtcaaagatctaattgcagaaattctgcatttttgcacaaatgaccagctactccccaaagatcatattctaagtgtatgtggctctgaagaatttttacaaaagtaagtattttatgaaattttggttgtattataatctgtaaatattaagttaccacttgtttatggttttgttttaaacagactttacacaaacattatagtcttatataattaaatcaattttaccccctttgcagtgaatttgaaattttctaaatcatattaacaatcttattcttgattttatattatgactacttatgaaaacaaatatttaaatgacctgtgactagggtgaccaaccatctcagtttgcttggaggtagccctcaggatgtaggaatttcagttttaaaaccagtaaagtcccaaactaggacaagttgctcatcctacctgtaataaagcttattagaactgatcacagctaagtaaataaattctttggtgataagtaattttttggttagaataatacttgcatgttgattaaatactgatttttttttaaatcacaggggccttaagtataagcattataacttactttttatggaagagtaagttctaaaccaccatttctttattgaggcagctcattaaaaacaattggaaaagcctgtcctcagtatatcaacttcaaatacttatttgataaaaaaaaatcatcttttagtttaccaaagtaaccatttgcctgaaattcctacagaccagtcttgaacaaataatacagctttaagaaaataaatatttctctgctggtattgcatagttattctaaacagtaaagtattaaagactaaaacgtttaatacagtagatycctatttatatatcccctttgcatctctacaagtatctaaagattgaaaacatctcatggaagtaaaaatgtatttcctttgaaattctcattgtcactgtcattattattccatcatgaatgtgcttgaaattatcttttgggaagtttgataaatttgatgacattcttattagtaaatccagttctttactgtgcagtgttaacagtgaatggccttaagacwattttcctttttgtgggaaaaataatatttcattattatttattattttaataacaaaatatattgtattaaaataatatttcaatagcatttttataattattattttataataaataattatacataaacaaaataataaatatttatatgaaattacatatgttttgttgcactaagctcacagatattcccttttccctttttatttgaacttattaacacactcatttactagtctgctaccttctcccaacatacaattttgacagtaaatccaatgagcacaggaaagcattttagtaaatttaaccttatattgaatactcatttaaactcatcttttgaatgtgtagttttccaaatgtacatctagacttttcttgatgccaaaacattatatccaaagagcaaaacattgtcaaatatttgcattaagttttagcagtagaaaatgccatccagaaagcaattgtattaaagagacagaaattcggaaaagtataatgtggagaaaatttacacaccttgatttaatcaytgttttaaataggtaaattattcataagtagatggctcaatatttaactaataaatgtacatgttaatgttttcatagtcatttaatcatattaaaatttatttaattgggttttattaagataggaaagttgccaaatattaatatatgtaaaatatagtcatttattccctaatggacattgaaacatttgtgtatgtcaaggatttgcatattatttaagagtaatagcctatttgtattgacagaacttattttaatgtgcagaatatttactactgttctagcatctaaaggaatatatattagtcattcaaatattacttttagtgtattcctgtgtaacttgtctaaaaaatatgtccttaaagacatggaaatctgttcataaagctcttctttatacagagaacacaggtagcatgtaataagttaacagtgcaataagtaaaaatttagactctaaaacttatagaagtacacttcatttggagtattcagctggggaaaatgctaattttctgataatacttcaaaataatggtcaaatagatcatgaaacatatgactacaaacatagcactgttatattgctatattagttaagaccctatatttctcagggttagtgaagtattacataaaatcctgaaaaaggggaaatgtaaataaatatgactatgaacccatataatgcatatagaaatttcaaaattattctgatattaacaccgtgttctcaaactttaaagtgtcacctgaggatgttgttagaaaaagaattctgatttcagttcgtctgggtgaggcctgaggctgtccatttctaacaagcatctggtgatgcctatgctgccggtctacagcccacatttcaagtagtgagatattagaagccaagaatggtaatgacttaagaacttagactctccaaaaattatcctmttttccagaacagtacrtggtataaaaactagctctaatcaacaaagtaataaagacatttttaccttgtactattgcaaaattaaaaagatgattttcctagcaaatcaaaatttcccttttcatatatcaactatactatttttgcaagttatttaacattcattttaatttagtatcagaaaagcttttctctcaattaaaatatcccgactcactcattcttattctcactttcattttctctctctctcactttcttactctcactctccctgtctgattttaaataatacaatatataatgaacacagagcaaattaaagaatcagaacatgaactatcaattttgtcatacgttcatggaagcttgatgcaaaattgtcagcaatatgakaaataatagaagaaaagaaatcatctgcttcattcaaaaaatattaaaatctttcatcatgttsctgttctttaactcccggtttaattaccatggagcaaggagtccttgataatcccattttccatgctcttgtccaatagcttgatcccagtcagcctttccagtgagctcaaggacaggaattatatcttttctttcctattgaatgtagcacagatatgagatcctagaaaatgaaactatttcctagaccgtccctgcatctctctttttgacagggagtaacaattgtacsttcacctatacttgtaaccgtctcacatgagtatttttcttcataaatatattgataatatrtgaagtataatgcttcttcataattttttctcttattactctctagccaaatatttactaggagcgcaggtttttctgtttctcaatcctaaccaaaaaaccactccagtgatttgttttctctacagctgtggtttctttgtgtgatatattttcttattgatacattgtaaatattcatgaggtacatgtgatatttggatatctacatagaatgtataatgatcaagtcaggatatttagaatatccaccacctagaacatttgtcatttctttgtagtagggacatttcaaatcttctcttctagtttttttgaatatacaataaattgttgttaactgtagtcaaactactgtgctcccaaacactggaactgattcattctatctaactatatgtttatatgtattaacccacctctcttcatcctctccccatcccatacccttcccaggctcttataactatcatgctacactctaactccgtgagataaccatttttagttcccacatatgagtaagaatatagaatattttggcttgttttacttaatgtaatggcctctagttccatccatgttgctgcaaatgacagcatttcattcttttttaaataattgaacagtattccattgtgtatgtataccacattttctttctttcttcattcattgatgaatacttaggttgattccgtatcttggctaatgtgaatagtatttcaataaacatggaggtgcaggtatccctttgttatactaatttcctttcttttggataaacacccataagtaggattcctgaattgcatggtagttctatttttagtcttttgcaaaatctccatactgttttccataatggttgtagtaatttacattctctccaacagtgtataagagctcccttttctctgcatccttgccagcatttgttatttatttacttatttttataacagccattctaacaagggtaaaacaatatctcattgttgttttgatttgcattgctctgatgactagtgatttgaacattttttatatacttcttggccatttctatgtcttcttttgagaaaggtctattcagattgcttgcccactttttgatgggattatttgtttgttcatttttagtttgtgtgttttttctttttttttttttgctgttgagtttcttttatattctgcataatagtccttgttagattaacagtttgcaaatactttctcccattcaacagattgtctctgttgattgttttgtttgctatgcaggagctttttagtttaatatagtcctatttgtgtatttttgtttttgttgcctgtgcttttgaggtattagccataaaaaacttgcctacaccaatgttctggaacatttatcttatgctttcttctagaagttctataatttccggatttaggtttaagtctttaatgtactttgagttgatttttatacacagtgagagataggagtctagtttcattcttctgcatatgaatacttggatttatcagcaccatttattggagagggtgtctttcccctaaggtttgtcctcaacatctttgtcaaaaatcactaggctataaataaatgaatttattttagggttttttttattctgttccattagcctatgtgtttgttttcatatcaatatcattttgctttggttacgataactttgtaatgtattttgaaggcaagtagtgtgatgcctgcagctctgttctttttgctcaagattgcattcactatttgggctcttttttacttccatacaaatttttggattctttttctatttctgtgaagaatattattggtaatttgataagaattgctttgaatctgtagattgggtagtatggtcaaaacaatgttaattcttctgatacacgagcatgggatgtctttccatttatttgtgtgctgttcaatttctttcaccagagatttgtagttttccttgcagaggtcttttacccctttggttaagtttactcctagggtttttcagtgtgtgtggcagctgttgtaaatgggatttccttcttaatttttttccagttagtttgttatgggttcataaaaatgttattaatttttgtgtgttgatttgatatcttgcaactttatttaatttgtttatcagtttacagagttttttggtggaatcttcaggtttttctgaatatgagatcctgtcatctgcaaagagggacaacttgactttctcttttccaatctggctgctttttatttatayattttgcccaattgttgtgtgtaggacttccattattatgctgaataagagtgctaaaggtaggcaaccttgtcttgttctagttcttaaagaaaagactttcagcttttcttcattccgtttgatgttaatggtgggtttgtcatattattatgttgaggtatgttatatttatacctagtttgttgagcgtttttattatcaagaatgtttagtttcatcagatactttttctgtacctattgagatgagcatttggtttttattcttcattctgtggtcatgatgtatcatgcatattgatttgcatatgttggaccatctttgcatccctaggctcttacttgatcatggtgtattacctttttaatgtataattggattcagtttgccaatattttcttcaggatgtttgtgttgatgttcattatcaggacattaatctgtagtgttattttttgtggtggctttgtctggttttagtatcagggtaatgctggttttgtakaatgaattaggaaaataatcctccctcttcaaattttgtgactagtttgaaaataatttgtgttagttcttctttataagtttggtagaattcagcaataaagccatctcatcctgagtttttccttgctgagagactttttattactgattcagtcttatttattactcattattggtctgttcaggttttctgttacagcctgaatcaatcttgataagttgtatgtgtttattggatacatataaatatgtatgtactatttcacatataaagagaatagttatatgctcttgctgaattgatcccactgttattggagacaaaccttagttgtctcttttgtattgtttttcacttaagtctattttatctgatataagtatagctacttctgcttacttttggtttctgtttatgcagaatatctttacatcccttcactttcagtctatatgtgtctttatargtgacatttcttgtagacagcatataattgggtcattttttaaaatccattcaaccaatctgtatcttttaagtgggtaatttaatttctttatattcaaggttataattgataggtgaggacttattcctgtcattttcttaattgttttctagttatgtatatcttttgttcctttctttctctctcattatttagcactgccacttggtggttttctgcaggygtaatattttagttctttttctttctcatttttgtgactgctctaacagtaagttttatactttcatgtgctttcatgatgatagatattgttttttcacttccagatgtaggctttccttaagcatttcttgtaagtctggtttagtggtgatgaattctctcagtttttgctttccaaggaacaactttatatctccttcatttggcaagtataacttagctgtgtagagtattcttggttgagagtggtttctttttttctttctttgagcattttgaatatatcatctcattcttacatggcctgtaaagtttctgctgataaatttgctgttaggctgatggcgatttccttccatgtgactcaatgcttttcccttgctctttttacaatactctttgtctttggcttttgacagtttggctacaatgtgcaatggaaaagacctttttgggttgaatctatttggggatttttgaacttcctatatatagatttctaaatccctagcaaaacttgggaagttttcagctattgttttattatataggtctgctatgcctttgcccatctccactctttatagaacacccaaaatgtgaatatttggttgctttatggtgtcccatatgtcacataggctttctttattttgaaaatattgttttactttttttttgtctgactgggttatttcaaaagacctattatgaagttctgaaattctctctgcttgagctagtctattgttaaagstctttgttatatttcttatttcattcactgaattcttttgttccagaatttttgtttgttccttttttattatttttgtctctttttttactctcttatttagatcctgaattgtttttatgattttttgtgctgtttgcttgtgttctcttgtatctcactgagtttttttcatatcattattttaaaaagttatctcatatattttcttttctttggaatgaaattsgtggctggagagttttgtgttctcttgaagattcatatttctttgctttttatatttcttatgtctttacacaaaatatatatgctattagtgtaatagtcacttcttccaatttttttggataggctttcatagaggaagactttttcctacagatacatctatagtgtgggtgggtatacaacttcagcattctttctaggcaaatacagcagtgatttcttgtgattcctttagctgtaatcagcatcaatgatttctgtaatttcctcagtggcttaagctacagttgttagttcaggcagtggtgaggctttgctagggacaaggatactgggtgaattaaacctcagcttccagtgtggtagtggtggaccaaccatggctgtctttgggctcctgggtagcctatgtgggcactggatttagcaggytcaggtgaactgatgcttgggctcccaggtgacttccttgggtgccagcagtggcagcagagggccgagtggataggcaggttttggggcccctggcagtgcrcctacaatcaatgatgaaagtagcagagaagaagcaacactcaggctcccaggaggctcacactggtgctagcagtggcagtgacaaggtgggcaagccaatccctaagtcccccagtggcttgtgtgaatgggttccagcagtggtggtggtgccatgcaattcaggcttgtcctcaggctctatgatggtgttcacaggagtagaatgttatgggtgggcagggcgatcctcaggactctggataaggtgcttgggcactgatgacaggcattttgggcctgttttgcagctccctgatggtgttcatgtgcaccagtagaagcaggcagagcagctcaatccccaggtccccacctcgcatgcttgggtcctggtgggtcttttgtcaggccatctgatgttttgctggtgtgtttcaggcatagacagggtggcatgattcccaaggacctgggcagtgtagttgggcactagaggtgtagcactagatagggcagaactgtcctcagggtccccagtggtacttaggagtacaagctgtgatgggcaggatgcagtgattcccagccccacggatatgtttgggtgctatgtggcaggcaggctaagtcttttgtcaggcttcctcttggtgcacatgcatggctgggtggcagacgaggcagggtgattcccagggtcccagacgttaggcttgggcacggggtggaggggcagtgcaaaccagagcaggcctgtcctcagaccccccagtggtacacacagatgcagtaggctgtggtagatgggcctaacctatgtgatttaagtaatttctttttcttttctttctctttctttctttccttctttctttctttctttctttcttttcttttctttcttctttctctttctttctttctctttctctctcttctttctttcttttcctttctttctcttttctttccttctttctctctttctctctccttccttccttcttccttccttccctccctccctctctcctttctttctttctttctctttcctttctttcctttctctctttctctctctctctttctttctttctttctgacacagtctcactctgtcacccaggctgaagtgcagtggcatgatcttggctcaccgcaaccccagcctcccaagttataatcaattctcctgcctcagcctccagmgtagctgggattacaggcacgcaccaccacgcctatctaatttcgaatttttagtggagacaggtcttcaccatgttggtcaggttcactcctcatctccagtgatcagcccaccttggcctctcaaagtgctgggattacaggcatgagctgccacacccagcctaagtaatttcttatctcaaaaatcttactctaagtctttctgtctaatttaacttaaaaataattcttattagcttctatgtaaaacaataaaatttactgtacttaaaagcttttgctgaataatcattgcattgtcagtagtaaaccakaaatgcctcctgagtaaatactagtcttttttaaaaattctgtttcggccaattgcttacaggatggtcaaattttatatgtttgatttaaatgaaacaatttttttattatttaattgacggttgtcaaggaatgttagaattgagtgctgaaaacatattcttaaaaaaaaaagaaattctacagtaattaaaaattttacttggaagtagttatatattttaaaatcaaattaagaaggtggtatttacctcttttttcatcacccacattgattagaatgatcttcttatctacttgagagtcttgtttttctctctgggactctcctagtagagacgatgcattccttttattagagtacaaaaatagttttacaaaattaaatccttttaattaaaattctaaaataatccttttcaaaaaacttctatattttaaaaaagttctaactaatctcatgacaatttatattaatttgttcrttttttttgagatggagtcttcactctgtcacccaggctggagtgcagtggcacaatctcgtctcactgcaacctctgcctcctggattcaagcaattctcctgcctcagcctcctgattagctgggacaacatgtgcatgccaccatgcccagctaatttttgtatttttagtagagatgaggtttcaccatgttggccaggctggtctcaaatgcctgacctctagtgatcaacccgccccggcctcccaaaatgctgggattacaggcgtgagctacctcgcccggcccaatttatattaatttgttcattaaacatttgattgtaaattgaaatagtcttgtactcagagtaaaaataaaactattaattaccagtgagaaaaaggctaagtcataatatatacagttttaagtaatagattacattcattagcagtaaaactgcattgtatatattgctggggaagaagagtcttttttcttctcagtgaagttaaggatttcacttagcaaacctgaacraattgattacttccagcaaatttgttacagcctaagacttcaaatattaaaattccttccaacttttaagacttactttgagcaaagaaatagataaagtgcatttctcttttacataactctactcctccacttataaaatcacagaaccatgtgggaggatagaaaggaacatatcataactttgagctatctcacacacagtaaaaaagtgtgttctgttaataaatcattcaattagagtttcttgaatgactttaatttcttttttaatctccttcatagtgcttcacctaatattctataattaactttggtttacatcttcagtaaatagctaatgaccacaaaaatagcacaccatacaaacctgcatttggtcttaattcaataattctgtgctagaacaaatgtcctcatatgtagatactctgtatataccttcacttgagagtgaaatcccaaagaaagaccttgtgctaaataaagtttgtttattatgattaaaagctacttgtaaaaatgacagcatatttcagccccaagttttttaaaagctgaattgcacaagcatcattaactaataaacttggtcaaaggaatctcgaagctgttgcaagagtgttccaagaagacatggcaaattacatgtgaaagtaggtacataatttaatattattgtagatgtataataccaaaatgcagctgtcacrttatttttgttacccaaaagcactgtctatttttcaaagctaagaattattawatcttcctaattttcaattgataaaagtttaaatgacccaatgctccatttttcttaaataaagtgattagagaatttttgaattacatatttcttcaaattagctgaaatcaccttaataagacaaaacattactcatttattgttttttatttgtaaagtctgtagtaggatgtttctcctctggagattttgtgggaaaaaacaataataaaaccttaggatagaatraagtctgcatatttgatctcctggtataattactaaattytataaatttcacataccataccccccacaaaaagagctccttggggctcagtatatattttttgtgaaagaaagaaagttacagtttcaccattgttatcttttttttttttaccgactttcttagtaacttcatttatatagttatgttactacttgtcttttgtgactgtgttacttagtagggagagcgttgcaaacttgagagttgttataaaacttttttccagattaaaaaaaaacttctttgcagaatgttccattttttgaattttaagaaatgcatatgtactatatgtacgaagaaaaataaccatatttgagtgaggaggcattagggatagttgcctttttataggcttgtgggaagtcttaagaaaaatagggcatttgaatagaaagtttcagatctccttggtccaaatccctcttgagtattagctgttggtatcaatttatgtcccatacaggatttttgttcaaaagcttgactctcctctactaaccacctcatgcctaaaagccctagttttaggattgaacctattcttgtctcttcaaaagtcataaagtttgacttttcctattsgtagctcacttgaagacaaaataacaataaaytcaagaagcactggtttagtgaaacaacgtatcactgacctttatctatgctgagtcagctccaaataccactttgagcacaaaatccagggctattttattagttgcaaagaccagtttactcaaattaaggatatggcagatttaacattgtagaaattttgaaggggcacataccaaatgtgtgtacatgtgccaagtgtgcacatacacataactagctgaaaaatactctgaacagtactacagtactaatattattttaatattttgttatattcaccttacatttctgacttagttatcccaaagattttaagtccagcttagttactgaattttcttaaagaaataccttcagaagctgtcagcaatcctggttttcaatatttacaaaatcaaatagaaatcgtttattttytatacatgagtttaatatttcacaatacacctctgtgactacttcttacatgtaagaataaagaacattttagcttaattcaaattatataaaacaagcgtaagtatttattccaatgaaagagcatcgcttttaaatgtgggtttccaaggagcggctagggcaatgagaatcaatattcatagtttgaatgttatctaggatgcttacttgctcataagacaaatttgagtacttatcactttttggtgttaaggtcattaatctctctttatataaacatattgcctcagaaatactttaaaataacatgagctatttaggaataggaaataagggtaattatggtgctagaattcagcctcttagtgttcatcttaaatgacaagtatactcataatagttcctaagatagtaactagcagatagatagaatcaaatatgtgtagagagaataaataattaatatacagaaagtttgatttcctaggatatgggaagaaaaagcctaaactttttattgtatcacagacattcagttcatttaacagctgaagttttatagatgattattaaataaaacataggtagtgctcatatttggaatgttaccagactgagaaaaacacctggtgtgtacaaccttaaatggataattcctgtgctcatgttataagcattgtaattcccagtgtggccttttcttagagcacaacccttctctccacactacccaccttatggtccgtgcctttcatttctctttctcttggtatggtaacctttcttcttaccctttttgatatctagaactctcaaataaaaattcattttttactgcacttacttattaaattcccacccttctttctattatttaatgctttttctctcttttctttttcattttctctacatagcaccatttaacaaatttatcacgtaggccacagaagagttttaaattttctactagccacactaagaaaatatgcaaagaaacmcatggaaataaattctaatactacagtttctttaactcaatatacctcaaatattatcattttaacatgtaatcaaaataaagaaaatcattgagatgtttcacattatttaatatgacaagtcttgaaaatctagtgtgtattttacatttatagcatatcttaattaaaagtagcctcattgcaagtgattagtagctgcttgtattcactaaccgctatactagacagcatagctctatatcattaaacacaaactgatcaaaattgtggtcttgccacgtataatggtaaaacgagtagttcacagctcttagaaagtgtgacggttattagaaactctaacgtcctttaaaaaacagcagagatttaatcttaactgataattctactacaatattatattatgaaaataatttgacctagaattctggaactaacaataagccagcattcaaggacaatgtaaaaatagacattctcagaaataaaaacattttatgtccataaattatctctctaaaaaattatgtgaagatgtacttcaacaaaataaacaatgaagccctatggaatatagatcaatggttaacataattacttaaaaagctctaaaatatagtaaaaaaaaaagaaaataaattagtagaggctcctttatctatctctgcttgcttgacttgctgtattaacactctttatttcctttacaaaacagaatgattaaggcccagaattcattgtttgttctagaagagtagttatcaaacattttggtctcagaatcctttaaactcacaaattgttgagtaccccaaaaagaatttgtgtggactttgtctatcaatatttaccatgttggaaattataattgagaaattttttaaatatgcatttattatttgaattaaaaatgataaacttattacacgtaaatacacataaaatatttttattataaatactatatattgcaaaacaaaaataatttgtgaggaatgtagcactgttatgtgtttagaaatcttttaaatgtctggtttaattaagaccattgactgctcttccattcagtctgttgcactatgatgattgagtggaagtatataaagaaaatttggcctcacacaaatatggtttgtggaaaagataaatatcttagtagtcttttcagataattgtgaacatctttctttgatactacaccaaaatcaacaagtaatagtcttttaaaatttagatacaatgtggaatataaaaaaaaatcaatacttttcacactaggctatttagagtccattggtctgtcttgccctattgataaatctttttttacccatgcaagatttgaagcatcatggattgtcatttagacaaatatgtccattggattctgcagatcttccaaatgttgccatactttaccataaaatatcaaaaagttcattttttaatattagcatttttctcatgagaaaagtctataagtattggttagccagcaagctcatagtggaaaatataaattttacaaaatccttatttctgaagttgttttccttaaagtgacaagcttagcttgttcatttttgactgccaaacacctgtctgaataaccacagtttgcctgtaattctctcatgtaataaaattgtttcatgaaaaaagttacttctttattttgccactcaagcaagtacaagagggcttttcctgaagacaacttctatattatagtatgcagaagtgctttaactgtttttcctatatgttcatatagaaaattaaagacacatgtatttaaggatttagatytaacaaaattaataatttttaccattttatcaaggatatttttaagtgacactgatttttatttcctacaagtgcatgtacaccctggaagtgtctcttgtagctccagggttttgtagacaacattttgataactacttctctagcataatagtttactataaagtatattatgcccacgcacttttgcttctgtaagttgagttgtaaacgtacctagagtcagttgtgtttattcctgaacctttttatgccagttctattgttattttatttaggtaagtaaatgaagtatttacagagtgatgaagtatgagtgaagaaagaaagtcagtgtttctatgaaaatgaagttraaatttttaaaagataattaataaaggagagccattaaaatctattgttgctgaattcaatgtagaggaaacaacttagactagaaaaataattataaaaatctaaaatgattttccattcaagtttttctttgactctaagaatttgctacacatttaagaaagtacaataggcaattaaagataattacttatagatttgttttatatcagaaagatgacacaaaattgttatcaactgacccttcatccaatagcaaagacttgatgctaatatcagaactttggctagtgagaggctacgtagttacgtttagtttaaaaataaactatttttaagaaatctgtcttctttataattcccaactttaacttttttaatcaactaatctactactttttatatttcatcaagtaagtgataaaagaatctggagctaatatttgaagtgatctctacttgagcrgttgtaaggttctaagagagaactgaattgaagtcatataaagctctaaattttatttgagtgtctgtcacatagtaattaaattgagattgcaatagaaaagctttaagatatgtttccttttctttaaaaaaggtgaccaccagaaagtaaaaatatgtttatgaatgtcaaggctctaaagataaatagagaaagaagagactcaaaaatggctcaaataaacccaacaaatgaaaggaaataattctaaaagaaacaatatagttaatataaaccaaaaataatatagcagaaggcrttactataacttggatagctgagacttctctgattaaaagtcaaagactcaaaaatgaattaaaaggaatttataggctagagacatgactaaaataagatagtctcattcataacagaaatacgtgtgttacctatttatttcagccctcaaagaaagtataataagctcttggtaattgtttttccagaaaaagggaaagggaagaatttttcttatctcttttattttgtagagttgagtaaaatttggatgtatcccatgagaatatattcctataatgtaatttgaaaaaaatcatagaggaaaaagactgtttcaacatctgttattaccccaaatctgataattatggtgccagattccaccatatacacacacatacagacacacacacacacacgaggacatacacaatgaagcaaaggtaaggaaagaactaagacctagtttttgaaagcagtaaaattggcagatgtagcaaataaaaatatagaatatccagttttatttcaaagtcataaatatttttagtatatgtttcatgtagtattttatatgtagttatatgaaaggtgtatatatatacacactcatatacacacacacctaaacagtattaaggtattatatctatgtatctatctatatctatatatctctatctatatagatagacacacacatatatacacctatatggtataaaggggkgtgtgtgtgtgtgtgtgtgcatgaaaatacacaaagaaacaggtgaaaataaattttaatactacagtatatgtgtacatacatgtatacacacacgtttagtgtaaatatgtatcaaatactacatgaaatatatactaaaaatattcactcattgtttctctgtaatttatagatactagatgtattagtcagggttctctagagagacagaactaataggacagatgtgtatatataaaggggagtttattaaggagtattgacttacactgtcacaaggtgagatctcacaataggccatctgcaagctaaagagcaagaaagccagtccgagtcccaaaaacctcaaaagtagggaagccgacaatgcagccttcagtctgtggatgaaagtccaagagtcccaaagctgaagaacttggaatctgatgtttgagagcaggaagcatccagcatgggagaaagatgtaggctgcgaggctaagccagtctagtccttccacgtttctctgcctgcttttattctagccatgctggcagctgtttagattgtgcccacccagattaaggatgagtctgccttgcccaatccacagactcaaatgttaatcatttggcaacacactcacaaacacacccaggaacaatgctttgcatcctccgatccaatcaagttgacactcaatattaaccaacacactagacatcaagtatattatctggcaattctaggaagaagtatacacrcaggtggataaaataaagaargtcagtttaagtaagcacgcagtagccatgtatgaggctgaagtcattgcactggtgtccagagtgcagtatcaagacttcaacatacagagaaaaggaatctttgaaagcaagatgggtcactattcttaagtcacctcccatagcaggaacagggaaacagagctcttagcatggaaaaaagagttgagtagagggagatgaaaggacaggaacttgattacatgtgatagattgtgaggctggcccttgaagcaaacctttgggaaggaggaaggagaaatcagtagttccaagaacaagtgaagaaaagcagtggccatgacttttgtctagattggctgtgaaaacaactcagcgaacagtgtaagagccctatggataccccagggacaagaatctagattagactaacagttgggataggaataggcactgaacatatgtcatgaacatactaacattcaccattttggctagcagataggtactaagttttttaagtattaaaaacaacgttaaaatagaaacatttaaaaagaatttactatatagtatagtaaattctatataattattctacataattctatacatttttgttaattcattttacagattaatggtctatttgtctggcattgttggcaacaagctatgccaactatttactgaattttccatataagtaaaattatcatcttaaggattacaagtatctaatatacttttttcctcctgaaatccttcatatttaaggtcctttaaacaatgtgcattaacataactcatccttttctcaatgactaaaagtcaccagagataccaaaatttaaagctgtaaagggacttatatagtagaagcccttcatttcacagaagaatcaaattgtatttataagaaaaatgttgcaaaatagtaattcattgtgctcttcagttaatttgtgcttgataaatatttataggcaaaaaaagaaagagaaaggaaggaagacaaagaaatataacagtgccagtagaaatttctgaaataggtataattcttttgtttattctgcttgctaaccctttgatgtagacattactattccaactctaaaagagaaaatattgggtttcagatagttttagtttaattggccttcctaaggtcatcgagctagtaaatctgtctctaaagctcgtgacattttcaccacatcccaatgctttcttgagacaaggtctccacacagacataatggcatcagttagaccacccagaagcatgctgtcatcagctttgaaccctgagatggctgggtaaaactaacttagaatatgcaaagtcttatttgttaaaatttattgtgataattctaaaggtgtctaatcatttaatcattttctaacttattaatgcacataaaaatttcacatttcatcatttatatctatatatctatatttcctgtcatattattcatttatacacaaaaatatgtaatgcatatatattcacacacacacacacacacacacacgcacacacacgcacacactcagtttttaccaaactaagttccaaaaataaaagaaaatgaagtcagagaggaaaacatgtatttgggaatattatgggaggatatgattgtgttcattttttcctccttcagcgaccactgtttggggagccacaaaatgtttcaaaaagataaatctgttattcagctccacctgcagaaaagtagggaagctccaggaaagctatctcgaaaggtaagaytttcttagcattggtttcaattggcaaactgacagttttaaggacaatatttctaatttttgaactattgccaacttggaattatatagcttaattaatacatgtttatttaaatatattcattgaaacatgatgaaatatcttatctaaatataaatacctgttaatgatttgaactgatgcaataacatgaacacattactgcaatcttagtgttatggactgaatgtctgtgtccccccaaaattcataagttgaggccctgggtgatagtattaggaagtgaggtctttgggaggtatttaggtttagatgaggtcataaaagcagagcccttatgatgaggtggtaagtgcccttataaaaagtgtttagagcgttctctctgtcttcttctttctccctccctctccctctctttctatcactctctctttctctttcctctcactaggttaggacacagcaagaaggaagctgtctgcacacaggaaaagggctctgaccctgattataaactttgcagcctatagaacgaagagaaataaatgtatgttgtttaagccacccggtctctggtattttgttatagcagcccaggctgactaatacrctgagtataacaaatctgttggtttctttcaaaaatcatctgtgagacacttattaaggttatcgtatttatacttttcacatatcttcttagaagtaaatgaaatagaaaatgtaaaggggaatcactgaaggcaaaaaaataacttgttttctgtgaagactgtttatgtcaacacagcttaaattaggacagataaactttcataatatatataataaagctacctagaaaaggatgactgtgctttgacgatacagtttcatgctgttagatgcgaattttattccctgtgtcatgttgtgagttacttccaattcaaactgcacagtatgcagtgaactttggtattatggcagtttttatctgtagaatcttcaaattacttgctttaagcaaaaatcctctcaccctgtcatttatattaagtaacagatttccagtggatgttttcttttttttctagtatgaagtgtttcatcataagaaaatttcaggtagtacattaggttgcaacatatcaatgtggaacataacataatgaggccaaaagacagttgtttagaaatatcttttggatcttgtgctcaacttagctgctgttgacagctccaaggctatacatctgaaatctccaggaaaaaaaatgttataaagtgcaactgaccctgtcaatattaaacttaagattcttcaaattgccctcaatgttgagaaaaaaaaagctgaaatcatcatagttcattggagcatgggggaagaagataaaatgtatgattctaatttggatgctgctaaaataataacttatcggtagtaattaacaaatcactaacatttcagactcatgtaaattaaggtctgtttaaaaactcttgtaackctattattctgatatagggcatacatacatgtctgagactttaacatttctatcacatttaatcttttcaataattctataaggtaaacactattaaaaataaggaaacggaatcacagggaggtatcaagactttcccaagattaaaatcatgaaactgacgagcagagaagtacagatttgagcacagtcagtgggtcttcagagcccatgcattcctaccaacttaaatgggaaatatactcagaatttgcagtatattctcaaaggttttggatgtgtgtttcaaggtaattggtcaaaaattctagcttcatgcatccacgtgtgtgtgtgtgtgtgtrtgtgtgtgtgtaatttttttccacagcaatatccatgtagctcaaagtctggggcatgatmggtgattaataactaaccatattatatatggttatatattatattatgatggtrtatattaggtgccaagtgatgttcttagtsctttaaatgaattaattgacagtaacccaagagcaaagaagtaataaatacaactatttttctatcctataaaaataaaagaactgaaaagttaagagattatttaaatcatccaaagttgcacagctagtaaataagggtgatgagatcagagcaaaactatgtggctacagatcacactatatggtaatgtcagcaagcgcagttacatagtgtagctgactccgtcaatattaaacttaagattcttcaaattaccctcaatgttgagaaaaaaaggtgagataatcatattgctgtcatcaccgttgttgtcatgtccagggacaagcatattgttatctctgggtgtataatgtgtagttctcatcasaaatgccagttttttaatatgccatttgaatcacagtgggaattaagttacatagttctttttgatgcttcatggttcaacttacaagcttatccatcctacagtaaatatcaccaattcttggataattcagcaactcataggcaaagagtataaatgccttttctcatccacaacttttgctaatattgatgctgttgtttaaaatggataatacttgaacccgagaggcagcggttgcagtgagctgagatcgcgctactgcactccagcctgggtgacagagcgagactctgtctcaaaataataataataataataaaataatggataatacacctgatggcaaatgtatttgtatatttgtatatcctccatttatgcaataagtatttgctatgtaactgctgtgtattaggccctacactaatgcgtagagtagtgagcaatagcaataagatctcagccctcagggattcaggggatgcaactgacactgatttccaattaaaaagcaggggtaacttccatgcagaatatgaaaaaggcattccgtatccccatctctctaagtcttgattcttttttttttttttttttttgagacggagtctcgctctgttgcccaggctggagtgcagtggcgtgatcttggctcactgcaacctccgcctcccgggttcaagtgattctcctgcctcagcctcctgagtagctgggattgcaggcacgtgccaccatgcctggctaatttttgtatttttagtagagacgggtttcaccatgttggttaggctggtctcaaactcctgacctcgtgatccacctgcctcagccccacaaagtgctgggattacaggcatgagccactgtgcctggtccaagtcttgatagtttcaggattttttttttcgcattacatttcaaaggggaagatattacattttattaaaactttaaggatttacttccaggaactgggataagtactttatacagtatatacaatctagtaacaattgattaatttaacaaataaaacttgttacatgccrttcatagtacttgccttttctaaaatgtagagttcacatcctagttgagagacagacaataaacaaatatatataatgaagtcctatggagatatgtactctgaaagaaaatatggccagctctaaaagttgagagaaccacctaatgcagatgggtaagaggggctagtgatagtgcttgtttttctgtctaaatcctggagcacataggcctagctctgatcgttagaaacgaggaatattaaatttgttcatttggccttctataaaaaagcaaaaattctggtttcatattgctgtatttcaaatgttcacttttaggcaaattgttaaatctctgtttaatttcttcatcaaaaaatgtgaataataacagttcttacttaatgtggttattatgagaactcaactgagaaatataaatgaagagcttaagtcagtgcctgcacttagtatgactacctaagcagtagctattgacgtcataaaattggatgtttcactgtgtgctattttggccctttacaattaaaaattctaaaacattattaacattaatttgcattaaaacatttagaaatttactcactgtgttggaaatattgagagagatggacatttgtgtgttatgtcaaaacagtatatacactgcagtatcatgacttttgttgatatatcaacaattttaatatatcacaatttttcttgtaagctttcatactcatagagcaggataaattttagtcttaattgaaatttctatatgtaacaagaaagtaaaagtaaactggtttggttttgaggtaagctttataaaattttctttctaagatgtatatgatttattgattaacttaatataactgaaacagtttatcaacttgtgtctcatcttcattatctgaattgccctattttacataagtaacccttgatttgtatatttaattttatatatacatcataagaagatagcaaatgttctctcagttttattttttataatggtgtcaaaattctctgtgattttcaggatttcagctgtaagtaaaacatttatgaacaattataatctttctaataaaactgtaaaattgtcttgatagtatttttttcacataatactaggaatatgactatcatcattatattaaatttattgataccattacctcgcagtagatactttagagctttctaattgtgcaaagctcaattcatcttagataatatttttattttaaacttgataatattatactgaaatagtataatttaatcctcatttcaagagaacaagaaagttgttctaaaaaaaaaaaaaagcaggccaggagcagtggcttaggcctctaatcccagcactttgggaggccgaggtgggcagatcacctgaggtcagaagtttgagaccagcctggccaacatagtgaaaccccatctatacaaaaatagccaaacctggtgttgtgtacctataatcccagctactcaggatgctgaggcacaagaatcgcttgaacccgggaggtggaggttgtagtgagccgagatcacaccatggcactccagcctgagcgacagagcaagactctgtctcaaaaaaaaataaataaataataaaaagcaggttgatgatctttagaaatcatccaaggtttcaaaattttaaagctgctaccttgattagctatgaataacttaatatttttaaattggtttccctttttgtctatctcaaatttggtcaaaagtatgccaacgttgtagaatcataaaatcaagattttcttatagctcaggggaacattcacgaacatttacagcaatagatttttgtatgagaaaaaaaaattttaactttttcctttttccttaaggccaaggtatggcctcagctttaaggaaaagttaagtgcacactatctttcatggacaattacaggaattttcctccagcttttgttttttttcaagatctgttaataattgtgacaaaaaaagtttccaatacatgtatcttacaaagttatttttcctccagcctatgaaggtatttaaattaaaaawtttttctagcaaaaggtactatgactaataccgaaaatatttctggaaaccaaataaattggtttttaaatgaatatgattatgcttcatagaaagatgtaactaagtatattctttatattcttgctttggttttaacttctgaaagaagacaagtgccaaatattacagttcaaatcttacttatttttactgtttttcactttcctattttccctcttcttttactgtacttttcatgactacagtttagctttctctgtcgcagaaaaaaattgtcttgtcaccatcacactttttattttagctgtcccagtgactctatatgtaaatttctagaaagtaagactcacatcttcgtttctcagtcattctacatagtgtttctttttcacagcatgtagtcaaaatattgttttataacagtgaccttattctttccacctaacttagcttccttcttcctcttcacaaaacaaaccaatataaaaattaatttacctttgacattgggccatatgaaggttttccttctgatgttttctgtccgaatttctaatagtcagttttaaaaatagattgtgtgtgtactgacacacaagattacatacaccctaggcattaagggacccactcagatctcaaccttaatgccaccgtgtggtgaaatagtgcaattatgttgagacatactgcattctctgcatacttgcaaagggttttcatgaatgccctgttgcaggagagctggtcaagaagttaaggtatgcgtgtgtgtgtgcgtgtgtgtgtgagcacacacatatgggccataggcatgatattttaagataagtagttcatgcttatgtaggaagaaaacaaaatgccaactcctaacatttatacctaccagtaattgtcattaattagcataatttagtgctcatggaatggaaaactctcttacactgacattttggcggcaagatgtggtgaagctgaaaaatgaaggagttgattatgtgtctgcccgcccatctggcaaaatgtcaggctttacactgccatggcactcatggcctaaatgtgaaaacaaaatgtgcatgtatgtgggagaactggtggcaaaaaatctgccttcatacttagtagaagaatttaatgtttgaccttgctgatgccacgatgtttttcaactatctttcaggtttattctcaacaaaagccaagctttctgttttacttttgaaaaggcttatatagttaaggagagccttttaaggtctttcagacagaatataaaagcgatgaatgaggtttatcaaaataggtgaataaaatgacagcaggaagttacggacctatttttatctggtactcattcctattcactcaataaatattaatataktctgctgtctacagcatgaagaggaccacagtcagttttatctgaatcaacttctagaatttatgcatatttggaaagtatccaggtaagatattttatatttgttccaagactactttctgattgagttctcaaatgtcaaatctcagtatttttcagttgattgtaaaaactgtccattcactgggactgtggaagctattgtacttttaacaggcaaattctgttaataattatccattcttcaaagttattcagacatatttgaagagctgctaacactttccagaacattctaayattcatttaaaaaaatctctgctgctggttattacattttcaaggacttgttttcccgattcattttgtgattttgggtttgcatatgtcacttaagctctttgtaaaacaattttaatacttcgaaggtaaccatctcctacttgtttctgaaactccctgaaaataaatggtatatcataaatacaggagtgtaaattcaaattggaaaacttgattgacaacaaatgaacatatcctacttcattcttatatctaaatgtatgcatgtattatttggaagaacagacttattgcgtagctaaactgggagtttgggtgtatctgcagttaaggttgttgtgagctgaaccagtagaaaatgtagtgtgggaggtacaggtcataaatctctaaagtaaaggctgatataacatatcagctaaatttacgatagcaaagacatgggatcaacccatatgcccatcagtgattgactggataaagaaatggcacatatacaccatgcagccatataaaggaatgagatcatgtctcttgcgggacagagatggagctagaagccattatcctcaacaaactaacatagaaacagaaaacaaaataccacacattctcacttataagtgggagctgaacaatgagaacacatggacacagggaggggaacaacacacactggggcccatcagagttggggagggagagcatcaggataaatagctaatgcatgcagggctcaatacctaggtgatgggttgataggtgcagcaaaccaccattgcgcacgtttacctatgtaacaaacctgcacatcctgcacacgtttcccagaacttaaaataaaataaaattggccaagtgcggtggctcacgcttgtaatcccagcactttaggaggcctaggcgggcggatcacaaggtcaggagttcaagaccagcctggccaacacagtgaaacccatctctattaaaaatacaaaaattagccgggcatggtggcatgtgcctgtagtctcagctacttgggaggctgaggcaggagaatcacttgaacccaggatgtggaggttgcagtaagctgagatcacgccactgtactccagcttgggtaacagagtgagacctcatctcaaaaaaaaaaataataattaatttaaaaataataataaaataaaattaagtttaaaaataaataaaaatgtgagctaaaattgtttttagtgactatgttgggtaatgattttgtgaagttattatatatttacatatattatctcatctaattctttctaaaactctgtgatagtatatattatcctgtttcaaaactaaagaaactgaagttctgagaggctaaataattcacctaaggccattctagtcatcagtggcaggactaaaatcaggtctgcctgaaatttacaaaggacattttctttcattaactattgtgtttttccattgcccttctctgccacccttccccctaaaaacatccatcttcactccataaaatcatagaatggctaggactagaaaggattttagacataatctaatacaaattttcgttttataggtaattacatgattccactatagatttctgttgtataacatacaaacaaggtctgtagtttcctttctccaaaataaatctacccaggggtggggggaacagagagaaagggagagaaacacacatacacctcaaatatgggaagtttttcaaaaagcaggatatccttgggacacaaaggactttgctgggttggtggagggttgttgcaccttttaagtcactgctacctggggcacagagaggcaagccaaggctgtgagaagagagtgagagaaggaggctttcattctgttcttgtcttacccctgccattgcctgccccctagcagatatttgatggccagtgtgcagttgcaggggtccagagggttaattcagggcaaagcaaaagttctgctgtagcaagggtagaggaaacatgtctgggacagcctagcttcagactttactcctccatccctccctccaatcccagggcagtggattacagtctggggtgatgccatctcccagtgctattttgtctgtggtaaggaaactaaaaacagaagttcaaacacttggcaaccatcacacaaatatttaatcccatagccatgactaaaaccaagtatctaactctgaatcagtgcttattccacttccattatgttctgacccttcaccccttatttttctcaaagggtatctaacacagagacattctcagcttcataaaggccactgtagaactttacttttggggatacaatgcttccctgcctgccctcctcagaacaccgtattggatcacagagacattctcagcctcataaaggccactgtagaactttacttttggggatacaatgcttccctgcctgccctcctcagaacaccgtattggatcatcaaaaaaatcaagcactggatggcaagggctttgatttcagcccttctcttttatgactcaacttcctcttagaagttgagcaaatcactcaccttcactacttcccagtggttttttctataaaatagatacaatatccaaaaacaaagtgctgaagtgggtgcattcttggtggtactaatagtttcaggttttatataaagacactgccattggccgggcgcggtggctcacgcctgtaatcccagcactttgggacgccgaggtgggcggatcatgaggtcaggagatcgagaccatcctggctaacacggtgaaaccccgtctctrctaaaaatacaaaacattagccgggcgtggtggcgggcgcctgtagtcccagctactccggatgctgaggcaggagaatgacgtgaaccccggggggcggagcctgcagtgagcggagatcgcgccactgcactccagcctgggcgacagcgacactccgtctcaaaaaaaaaaaaccactgccattgcccaaatctttagttattattttcctcccctttcactgacttttacatattctatgcattttgtctttgaactgacagagggactccaactaaagtgataatgtagaaaaatgagaatgcagctactgtaaaaataatggtktttgttttaatgttgcgtttctgagttgtgtgacttatgattcaatttaagtcaggagttttcaagacaaataagaaggtaaagtcaataatgtttgggaaaataatttttgaacagcgaagctcagaagaatttctgctcaaattgcatgtcttctccctaagcatagataaagctggagcagtaagagaagcttaggaaagaaaaatgcagaggtttggtgtcagagacaaccccatctattataaatataagccattaattccaaatgcaattctctacaagatatgccatacttaatatttcttgatgttaatatatgccattatctgcttatgaatccctttgcaacttacggtttgaattaagagtagttttatataatgatcagcctttgagaggtttggttaatttatcatgaattctttggagttctaagactttcagatatgtttgtagtctatcaagttatacaaactttataaggcacccttctgagatgtttttaaaattatgtcaacaataatcctttttataccatgcctacgatagtatcatgggcaaaacaatttgtgataaatgtttgtgctaaaggtaatataagttttcccacccaattttaaacaaagtttctattttttattttccagacaatgtctcttaacactcatcagaaaatatgacttccacctgaaatacctattgaaaacccaggtattgacttttgttactttatccatcaattcagtaagcgtttttaacgcatctactatttttctaaaactttgcaaattttgaagatgacaaaaatgaataaaacagaggatctacacttgaaaggctttcatttcaacctggaaaaatagacaactagaaaggcatatgcagtaaagtgctacagctgctgaggaaagactgtatgtacacaagatgcataagaaagaatggtcagttttatccatttgagctgaatgttgacaaatgttgactgtatgtgtctcccagccagagacgggcattgtgaaggaaggtggggagtagagataactttcggcaaagaacaacatgaacagaggcactttgggagtccgaggtgtgcagatcacgaggtcaagagatcgagaccatcctggccaacatggtgaaaccccgtctctactaaaaaatacaaaaattagctgggcgtggtagtgggtgcctgtaatcccagctacttgggaggctgaggcaggagaatagcttgaacccgggaggtggaggttgcagtgagccgagatcgggccactgtactccagcctggtgacagagcaagactcagtctcaaaaaaaaaaaaaaaaaagagagagagagagaaaagagtcaggaaccagactgctgtgattaggaaactatgacatttgaaatggctgcagttagtgttcaaagttagaggctggaaaaaaaatcagatgaaagaagcagacaggggccaaattatgtaggatcttatggaccttttatggccagttttatgatgttctactttgtcagctgatgacatggagccattaggcagagtagtagaatgactgatggatgattagaaggacatttcattagcccaaagagatgatgagggcatggacaaacactctactatagggatgatatgaggggacagattcataagaagtgaaaatgtgcaatttacatgatttggtgaaattatgtgcctagaataactcaaaattctggactgctgactgactctgtggagacatcaattcactataatagtgaagagagaaggtagcatggcagagggaatgatgggttcattataaggccactgaaatttggtcacctattgggcactgaagttgtgatctccattaggcagattatttcttacagcttcttcttccagggaaggtttagccttccacagataacacatcatattattacagaatattgtgagtcagggaacattttttaaacaagtgacttctttctttctgttaaataattgattcctgatataaataaaagggtacataactcagataataactatttgtaatatcaataaacactaaatatatctgaaaataataaattctacttattgatgtagatactgaaatcatatgtgacttccacataaatatgtaaagacatggagactacaaatacaagacttaggtttctccctaaagtgtaatcctctcaccctaattctattttttctgctccagcctggtctgagtctggaagtttaaaatgtggaatgtgaaaagaatccacaattagcttgttttaagtctcataaaagtgttttggttagtacctctaatcagccttgtgagagtcattctttctcatgtagaatgtgaaacttaccaggttaccaggatatattaagacttaattcctagagtatttttgtctctttactatgtgtagaaatacttttgaggttatggtaacctacttatgaatgaattttagttatctaaatgtctcagcactgctcacatatcatagacatcttttttcacacacaaattattaataatttataacagttcttaatttccaaattcagaagtttgatcttattacttatgtatgaagcctcctatatttctagtttgaaagaaatgattgactattgtaaatttttctaatatgacttaaaagttggcaaaataccaaagaaatgctgtctttccattatcactggcaaacagcaatcatcactcgcagctaaattattttataaataggtcacagtgtatgtgattttccagatgaactcaatccaaaacaatgagttctttaatgagatttttgcctatgaaacatcaatagtaaatatcttagaaatgaggacagactatgatattatcagttcacaattttgcgctttctattcatttgacaagtacattaagtagcatttcatcatgtccaaaacagtgtcaattggaaaaataatgtttttttcatatttcccaaacttggattattacacatgatttgaaaaaacaacaagcatgcagctgaataagtcagacatgaatattattgaataatatgaatattttaaagtaccaaatattttctttcttgacaattattatttcaacatattttagatgataacaattttaggccaggcattctggctattatgtcaaatggctagttttgtatctaatttacaaagagctttttcactggacattttttcctctcttctattccattaaaaccctgaactatagagaatatttttgaattcattctgtattcttaattttatagaaattgaataatatgaattcaataggaatttcagaaatattaagaatggaaaaaagagaatcctcccccccaaggtatcactgaatgcttacttcatgcaaattatgaaactgtttactcactgaaaccaagagaaatgggagttcaaaccatactctgaagttgtcgatgatctagttggagagacagcatatccacataaataatatacacaatggtgtctatacagagcaaagcagtataaaactaaatcgtagccttggagaaagaatcaacttctgatttaaaatcacttcttcctagtagtctctaatatgttgtctccaaaattctttattaaaatgccagtgaggatcatggtaggaagtccctaccatgaatgacaaatttacactagaatctagtaattgttgaatttattgtaaattagatgaaccagggttgaggaaaaatcaattcatgcttcaaaatgtggtttagcttcatgaaacatcgatctggtcagaaaataactgagaacccctaagtccttctaccatctagcccatgactcagaggctataccaagtagataaccaggagaatatgacatctctagtgttcaggtttaagtaattcagtgaggagggcaaaataatcttatttaacacttgctcaagaccaaaatctaactgtattcatctagagagagaaagaaaattccatatatgagtagaaagaaagaggacacatagggattttatatttagcttcttttaaactgaagctctcttggttacaagcaaatctattgttagactttcagaagttccaatttcaaacataacttaagcctaatggtagtctaaaacaaaatttaggagcagagattccaaagtcagataaatgtataagtcaaccctccaccactatggaagttttgtattcgaccttcctcagatttatatgattcatcactagagtgaggataataaatataatataatgatgttttaaataattaatgaaacaatggatataatgggcttagtataatatagtgatggaagataaaacatttttaagaaaaggtgagtacccgtgttactttactgctaccgtttctatcactattattcaagttgaggattgtatagaatccagaagaaaattttcacaaaattgatttgcattcagaatagaacataagtaaaggtgggaaatgagcaaaaaaagtgtaagaaaattggataaaattaagaggtaacaaggagcagttgcaaggttgcaaaagaagtcaaggaaataaaggcaataattatttattattatacagcacaggaaaatgaagcacaactgcagaattgaaactgaccttaaaagaaataaagggcagattgtactaaaagtcaaagctatcatgtatagaacactctcagacttgaagaagtataaaaaaattaaaagtagattatcaaaatagaagataatcactagccaacataatctgtgttgctaatgagatggagaaaactagagggttttgtgcgaaggaataacatgatctgacattctactagtgatttatgtactaaattatataatacatgaagaacacacaattaaagaataataatagaaaacccactcttattaataaattaaggaacaaaatatttttggtatcacacacctgtttgccacttcatgtctcctctcctctatgtaaaaggtcctatttgatgaaaaggattttgtagactttctttatcatttcatcaccaaagtttgcatctactagcaatataaggtgttgattttctttctaaggtctccatgaatggaatcaaactatatgcactttttgagccctgtatctttcactcagtattatttgtgagatttatccacctttttccatgtggttgttattagttcattttcattgttgtgtaataattccattaaaagactggacttcaatttatctatcccacttgttggtgtatatttgaaataatatcacgaggttttctagagcacatagctagggacatagatttacaaggcaacaccaaacacttttctaatgatgttttaccttttacccattcacaatatatgagagttcctattgctgcattttcccaccaacttatagtacagtccaaattataagtgtttgccaacattaggtatatgtaatgctatctttgtattaactttaatttttctgactcacaaattcatactaaactcataaatttgtctttaccttttttaaaaatgtactattcaattgccctctttcataacttacctgttcaaacttttgcggatatttccacatttctgtagatttttcaaaaagatttatgggagttctttatatatttacccttccttcagttatgtgtattgtaaatgtcttctgccatttaggggcttttcgctttaattataatgtcttatttattaagtcacttttcttaaagtttaatttatataaaataaaatgcacccatgttaagtgggtagtttgactagttttcaaaatgtatataattaggtaacaacaactggaatgaagatacaagatatttgcattacaagagaaaatgcccaactgcgtctttacagtaaatctctctcatcccagatttcatacaccaaaaatttatttgctctcaatttggttttattttgccttgacttttatataaatggaatctcatatacaatataagagttcttgtggttctgcatcctcaccaacacctgttattgtcagtgttttaattttagccattctagtgactatgtggcaatatttccttcagtttttaatttgtatttcctcaatggctgatgatgccgaattacttttcatggaattattgctcatttatatattttctgctgtcaggtgcctgttcaaatcttttgcctatttttaaagttgaactatatatcctcttgttatcaaattgtgagggtccagaaccttacctgggtatcaatgagaggccagggatgaggagcagtaaactccctcctgcacacgactaactgcaattgtaatcattctaatatgttccagaagaaagttcactgtgaggtgtaggacatatgtattgaaaactttgtctccctgtctgtgactggttgttggttcgttcgcttgcttttttatttcacttacgtgccattcaaaaagcagaagcttttaatctttgtgaagtccaggtttatttttactttacagtttatgctttcttatcatatttaataaagatttgcccacagaagtttgcatactatatttttcaatactatttttagttttagctgttctttagttctatgatccatttcaagttatagttgtagttctagaccccctgttctgtttcataaatctatgtytatcctaataccagtcaacattaccttaattaccatacgttcatggaaagtcttggtatcaggcaatataagttctccaaaatcattcttgtttaaaaaaatatttggctattctaagtactttgctacgattgcgttgaatatatagattgatgtaaggaaacttgatattttaaaaaattgtattttctaatccatgagagatcaatttaatctgatctatttcttcacctacacaggtttcttaaatcactcagcaatgctttacaatttagcatagagattatgcatagtttattaaagttattagttcatgtttttgtctaatattttaaataatatttttatattattttccagttgtttgttactaatacgtgggagtggaactcactttcatatattgaccttctatactatgtcttcttgaaatcactttttatatctaagagttattttttggattccttaggatttctacatatacaatcatgtcatctctgaaataattttatgttttcctctttagtctatagccctcttatttttttacttgcctgccttataatttaacacttactgagtctccaataggattttacaagtagtcataagaacagaatccccgccttgctattttgagggagaactttacagtcttttatcattaagtgtaaagttatttagaggttatgttataatataaaaagttagttatattttactgggttgaaaaagcttccttctatagtttactaagagcttatttcttgaatggattatgagttttgtcaaatgctttttgtgcatatgtacaaatgcacgtatggtttttctcttttattcttttcaaattttaaaaatctttttattactggtataattacacttactaagaatttataatctgtttcatatatttctaacttaaattaactaatattttgttaaggatatttgcatctatatttatgagggacatcagtttgtgtttttattttcttataatatggttagattttggcataagagtaatgctggcctcataaaatattagataagctattattgtctgagcttacagtggagcctgtggtaccatgacatttccctccctgtaggatcctgcttcatcctcagctttgacagctcctgcttgtctgtgccaaagagacagtctctctaaacactgttgtcactctcccagcggtactccacccttgcttatttattactcaatgctagacctattttggcagtggggacaaggagagttctgtgttgtaatgaaccagtcacagccttaggcagactctgtgtacttgagtctcaggactaggactcttggagcattcctgcccctcctccacatggcggccaaactctgccttatatctgtgtcgttcacagtaaacgagagtttattgctccttatccctgacctctaatgggtatccaggtaagatcttggacccaagacaactttcctggcctttccccagaagcaaaggccttttgcttctacccttccttcaacagcaaaggagcttctcatctatgtcctacttctcccccagagacaagactattttgctttttacttctccagaagcaaggggtttttgcctgggctcagggaaatgcagggtttgctgctcctcctcgtgcagcttagagttttgcttcttatgcaaaaaggatccacagaagtggacagagcgccgtaactgtctcccagaaacagctgattacctacacacctgagccaccgaatatgacttcagtttcctgcacagccttcagtattttccccgaaaagctggtaggcgtccatggaaaagagcttgcaggagactgtaaactccccatgtgtcttgggcttcctgatattccaaactgacatgctagctcacacctggcctttaaaaaatctgttaaattttagctaatttcttaatatcttcttactcatggatatggtgaccatctctttctcctgtgctctgccaaagtttgaacattttgtgtgccccatctctctttggagcagttttcactgtgtagtttggtttacttggtcactttatgaccttagatctcagcggggttcagaaaaagttataattttgtatattatctggatttttcattgttgcagagagatcgatgttctatattttcatttgtttgtttgtttgtttattatactttaagttctgggatacatgtgcagaacgtgcaggtttgttacataggtatacacgtgccatggtggtttgctgcacccatcaacccgtcatctacattaagtatttctcctatttctctccctcctctaaccccccacccaccgacaggcccggtgtgtgatgttccactccctgtgcccctgtgttcccgttgttcaactcccacttatgaatgagaacatgcggtgttaggttttctgttcctgtgttagtttgctaactaagaatgatggtttccagcttcatccatgtccctgcaaaggacatgaactcatccttttttatattttaagccaagctgcatttcaaagctgtttttaatctttaaggaaaaaataattcatattggcactaactactgaacctggaatgaacggcattctaaattctcaatttgtctccaaactcattaattgaatttgataattttcactgtgtctaatataaatagaaactcatgaaagtttatataaaatctggaagatggtaagctgttacatggctgtttaaatgcatactgctttggtctccatcacagctaaataagagaggagaataatcaaccacttatgccgttttgtttggttttccagaaagatgcaggggagacaaggctgttacccaccttttcaaatgttcaaaacatttttcaagtatgattaattaattctaaagtattagcatatggctccttcaaagtccgggacacatccaatatttccaacgataagcttagaatatactacataaaataacatcatagtgctgttttcagttttcattaatccaaagaaattagaaagaatttagaagcagtttagtctaaactcctatgcaatgcaaaaatcttctctaaatatccctgattgatcatatacctgaatctggagcacctttctactcaacaggcagcctacgcagtttttggacaaataattttaagaaaaatttttcttatattgagtcaaaagaacctttctaggtgtgcaaccatttgttctcatttatcatcttagagctacttacaataaatctaatcctctttttacctgaaagaccatcaaatacttgaaatggttataatgttttatttttcttcttttttgccaagctaaaattttgtaataccatcaactaccttcacgttgatgtctattaagctgtagtcttctggcttatgtctccacactaagtgctccatctgtgacccaaactttctcctccatcattaaaatattaaatgttctgaaatgttatgcacccagtgttcaactttttttttctctgtctacattctctctcgggacaatcacattcaaattttagtctatgtatcacctctatgaaaatgttgcccaagtctacctttgttatttcttgaaatagggtgctcaccctgctgcattttgtgtctgcaggggatctcaccttgcgaatcagccatcatagggtttgtaaattttaaactgatattcccctcgtactctggtgtgtgagtgcatgtgtgtgtgcatgcatttgtatatgtatgtgtatttggggagaaactctgtaggtcagtatagaaaagtgtttatacrattgtgcatttacttctgcctgggtccaaaaagtcacaatagcctagtgcaatttttaacataaattcctactatgagtagtataaattaataccccagagacacacagagcacagacgagggttcagttcctcacataatcatttttcttactcaagggctgagtagagagaggcttcatcaaaagtgtttctgatcagtaggcatagtttttcttctcccactttttacaggtggctgctatccaatgtctgaggactattcgaggatcttagctccagttctgccccttccccctaccttcaccaagtgatttagtcctaagatttcagcacttgtcccactgttagcaaaaaaacaccaatcctacagctgaggatctacatctagtctgatatttcctccaggccattacagcatcactgttggagctactgctcaggcttgaaattccctctaaatgtctgcaaccctgagatttatcttgcctttcttaaaatttgtgtaatgtttatatgaacatgtggggagtgtgtgtgtgtgtgtatgtatgtgtggtgtagtgtgtctatattttctcagtccaacagttgctagagatagaactcccttgcatttcctctgggaagctcaaaggctatgtatcaaaaaatactcacatcacaattctaccagaaatatttgtctgtgtttctgccataatgaatagcaccccatattcttagtttccaaaatttggaaatgaaactttggaatcatcttaaatccaaactttctgttggttctcatatccagttaatcaccaactcaattttacaattgcaatcttttacttcacatattctagcaatctcagttatgcatgaatataatgattatcttcagaatgtcagaatgtgaagattaaatgagataagtagatcacataagaagtactgcaagactggagtaatagattgaataaatcagctactagctacctagtgacccaagtcaacccagtattagtatttcaattagtgatgtttatgaattttcacaaacccatgtatcacacatatttacttagaacagatgaatgaaaaaaaacatagaacctaatatgacttttcagttttttatgattttctaatttttattctattagttatctctgcatatacagtgtttcatttctcttataaactgaaagattggtgtaaatgaataaaattaattagttaaacattaaaatttagccctcattatctgccaggcaccatatttcatattttatctaatttaatctttacagaaacttatttattgttctcacttcacagaagagggagtctaggtacatgaaagttaaatactctgatgatggccacaggtagaaaggggcagaaccagggtgtaaacaaacagatcttgacttcagagctgacaatattgtctatgatgttcttctgaatgaatactgtattaacagtatattaatagtgagattgttgtcttttggtaatttccaatttgtttagtactttctcaaatctagtacccaaactaaactccagtttggataatatacattgaaaatgtggtggaactaactttctagttatggagagcatgtgtcttttgattctatttaattgtgaactggatctggtagccacatcacaatattgacttacattgagttcacacataagtgaaataaatgatttttttccatttggatgactcataaatttttcttctccatgttattattgagcggatgtattttttaatccatgaaagacaaaatagatctcaactaaattgcatctttttacttttagctcattaataaaatctgtggacaatttttggaatcctcactttgtcttttatagtattaattagttattcttcaggtttttgtcattggtttcggatttgtaaaattacatatcagagatactggctatttttccacaaaagaagcaaagtattatcccattatataaaacttgcattgtgtctttgtactgacactttgttaagaaaataccctagaataaggagaattaaaaattttttatgctgtgaacacatatctttgtgtgaaaataaaaggaaaaactctgttccatctcttcttgaaataaactattgtaattctccattggaaggacggtggtgctggtgacaaaactgatgttttttgaaaaaccacaattgttaacgataaagacaaagaatataaaaacattgtagagtgaaacatgcttcacacagaatcaatgaaaagagagatttctcactatagttaatggaaaaacatggaaaagaataaggtcaaaacagagaagattttttaaaataaatgcttatttaagaasatgtgtaaatctgagatacagaacggctaatgaaaagttcttagaatggtgaccataaaatcgctgtctagcttaaggccagcctgcrttgttgattttaagaatttgtcattgctgtaggtgtattgggccatttttgtgttgctataaagaaatacctgagtctgagtaatttataaagaaaagaggttgaattggctcatggttctgcagacaatacaagaagtgtggtgccagcatctgcttctggtgagggcctcaagaagcttgcaatcatagcagaaggtgaagggaaatcaggtgtctcacgtggcgagagctggagcagagggaggcgggatgtgctgcacaaktttaaacaaccagattttgtgagaactcactgactactgcaaagacagcaccaagccattcaagagggatccgccctgtgacccaatgcctcccaccaggcttcacttccaacattgaggcttatatttcaatatgagatttggagaggacaaacatccaaactatatcagtagattatatttgtcatcagcgatttttttgaaaaatcagtcacttcaaggatagtgcaatcagatgattatcaaacaccttaacaccacaactggctgtccagagtttgttccgattttctagtaagtttgcccaactatacactgattccaaacaataggtgtattttgaaactctcctggggtcggccatcataactttttcttcatagtgttttgtggaaaccacagactttgtctaaggctgagtttccctgctttccccacacttcttcctccctctctttctctcttttcctctccctcttccttaccacttcctctccttatacctctctctctcattttgtttcaagtaatgtcaaattagagctaagttagtaagttagtgttaagtcagttctaattttgaacatttgctcaatgaaaattaaagccccagtcacaggataaccagagtcttgagaactttctttttgtgtgaaagcaaacaagcatattttattccacttgctcctcatggaaaaagaagaagtttgaggataaattaatgtcccctcatttatttcaatagattgtaagatgtgaatcttgttatctacaggaaaacgtgtataatattattgaagaagttaaaaaaatatgcagtgttctagggtgtgtggaaaccaaacaaattacagatgcagtaaatgaactaagtctaattcttcagagaaaaggagaggtaagtacattcatttattacacagtagttttaaacctgagttcaatacttaattaaggagagtgaaagactttttactaacaactatatttccgtgtgtatgtttgtgtgtatctgtgtgtgtgtgtgtgtgtgtgtgtgtgtgtgtgtgtgtgtgtgtgcatgcagccaaacagtatatttcaattgtttgggggtattggcagcttgagtctattatgccaaatagatctgattaaactataagaacactgattacacctttgaagtttgtaaccaccttataacttcaggtgatattgtaatcaatcctacaatcctacctaaatgaacgtaattatataataatcacatgtaagtgtttgtatagattgttaatggttctcatgtatacgagtgtatacaggcattaagtgtcatgtttgtatggataagcatatttataaaaaagaaaaaatcaatttttgtggtatcttttgcgaattttgcagtgcacactgcctccatgatttctgtgtgactttctatggatcccacatcatgatttggtgggcttaaaaaatgggcattatgtgattttcttttgaattctcagaaatctgatgtagacctgtaagtgattattttccragaaaaatattacgacatctggttacaataaattcatttatcttattattagtttagcaaatgataaagcagaaagatatgatgataataactagcatttgctagtccattgtaatgtataaaatagtttgacatatgcattacctcactgaatttaatttttattttatctcaatagatgctcacagcaatgtcataaagttggtattttaatgttcatttcactatgaaaactcaacacttacagtgtgtgtgtgtacagagaattaataagtggcaaaatacagatttgaacctaggcctctacacacattacagtgtatgtgaaactttctaagatagagtgaatacatacattctctatctgcatggtaaagaacaagagaaattctactacttttgaatatgccaatcttgaaattttcaaaagactgatttacaatgtagataatcatattaccaaacagaaatagtcatgcttactgcttattgtttcaaatagataagtgggtatgaaaattcagtagtttcttaatgttgggctttctagatcttatttaatccaaagttttgtgtgattagacagtaaaaaaatgaatatagaaatttaaatacgttctttacatgaacaatgacaatgaagattttgatgagtcatggaggtataccacaaaaatattttaaggataaacattgctgaaaagctaaaatgcaaagcactaaagaaatcaaaatttaaataatgtaaacaataaakccagaaattaaatatcaaagacagatttgtgtttatttccctaaatttttcttaataaggaaacaccttctcttttactttccaattatagaaggaaatggaataactatgtagtctccaaaactgtttttatatgtagctattaagacctagtgcctttacaaataacaacaaggtaaaacaatctaatttgatcatatataatataatcatatttttctattctgcttcagagtgaaaaaaatatactacagcagggtgttcaatcttttggcttccctgggccatgttggaagaattgtcttgggccacacataaaatacactaacgctaacaatagctgataggctaaaaaaaaaaaatctcataatgttttaaggaagtttacatatttgtgatatttgtgttgggccacattcaatgtcatcctcggccacatgtggcccacaggccgcaggttggacaagcttgtatcagagtcttaaaaagcatttcaccagtatgttttgaaaacaactattttgatgagcttataaacttggcaattatatgatgctgaaaaagggctttctaaytggtgatgttaagtcagtataacaaggtagtgagaattaactttgaacaagcagttattactcttaaattgtcacattttagaaacattacaagctccaagagctgataaaatacatgagataagataatgcagatactaagatctaccagtttctatctaaacatcctgtggaaaactaattcactttttggagttttaattttcctcatgtttaaaacagaaaaataaaataatttcctgagttcttgtgagtatgggaaacaatgttaataaagggccctgatgacagtgtagcttaaatgagatcattgctgttaatggaggtattaaggatggtgctggtgctagttctggagaatctttcccacaacgccaatatgaaggctttaattcacacaagcaccaggaaggttggcccttgtcacctcatggccatcgattacagccagcctcctgacaaatatgaaccactgccagaggaggaaaccagatgtgtggatgtcgacacgtcttcccatctgttaagactatttggttattcttcgacttttatgtccagttcttaacgaattggcaaacaactgaccaaacaacgaggaaaatataattttaggatgaagtatttcaaaggatgttaaagtattgctggttataaaaagttttatcttcaaaacactcattttctgaaactccttaagagaataaaaatgacaattttcagaaatatcaaacttacaatatttgaagctaaaagaattcttcacaaaggaattgggtatttcataggaaagccataaacaattataatactcaagaaaaactcatcttcacatttcactttccttatgtactagtataaacacaaaattttgtgtgatatttcyttgaaacttttaaactcgtaatgtctaaatatttatcctatattttgataagactaaaatgattttcatgcatagaaattaaaaaaggagttgaaaataaggagtttatttaatatatgtcaatagacaaaatagttcaatattctgtaaaaactgggtcccacttattttgagcagactgctgaaagctcatttattctacatcagttgcatttatacttttgttcatctctttttccatcccattttaaatgtgagcccacctatgtaagaryactggcacacatagtaagtacattttacagaatttgtgcagtaaccagctacagttaacaatgccaaagcagtctatccacccaccatgaacttaagattgaagaaatgacaaatacaggtcttctgccaacaaactgtgaaatttaagaagcttttctttttcttggctgcatttttggtcaacatgcaaaggactatttcctgccatacagggaagtccttaggtgtttattaaatgtaagttttggcaagatgaagaattatatgacaaacatacttgtactctattttattctctgacccagcactggaaacaatttgcatccttcaaattatattccagaactcacataatttaatttccattaaatgcttacataataggcgaaccacgaagtgaaaatatggtcttgcacatcatggtgtaggtggatgtcacggtgattttctaatacaagtytatatttctaaataaattgaattttagttaaatcagtctaacatttttaatagtctcacccacatagatagagtggggatcttatatgtagttgttaagagtagcaactgatactatactctaatgaaatattttgcctaatagaaatgcttctgaaaaggttcatgcaaatgatgcttttaattaaaaagttgcatataaatgtaatgacattttaaacatgatcaaaatgttctctctctaaaggaatactgtaacaatttttttgttayggaaaaacaattattctctaatttatttgtttgagaaacctggcttttaactaattgtatttccttaaatgcaagacttgaaattttatttttttatttttacttttttaaattttgagtttataaatttaaaaaattttaatgttaattaaaatggatcttattaaaaattgtatttccttttgggctgaaaccattttttaggatgtctataaatcaccttatacagttttcatgatagtttagttacaaccagcaaatcctaagccaccaaagtaattctaggcttctaacaaggataaaaataaataaataaggaaggccaccacactaatggacatgaatttaaagaataatgaaaatgaaaaccaaaaaaataggatttcagattgtattttttatttaagatatgactcaagatattttattttttcaagtgttagactatcagatttttaaaaattccctaagaagaaaaaaagaaagaaaactatttagtgaatctgtactgattttgtccacttcaattcagtcttgtttttggtgctgtccaaagcttgctgaataactgctaggaataagagctggacacggcatacagagagaattagaaatgcacttttatcaaaaaatcagtcactgttatgtaaggaggattgagcttagacaatctgttgtggtaatttctttttaaaaaaatacataacctacattgcttattacaatatttagaaagtttttatttcatcatacaatttaaattcatcctgtttaataagcaaattgatatatgatgccaagaaatattttgttgttttaccatgacaaagaaattataatgtttagattttggacattactatttgactattttgtgaatttgttgtgcgaataacaagtataattttacattttttttcagaatttttatcaaagttcagagacttcagcaaaaggtaaaacatacatgtactcaagtattttgaaataaagaaaaaaataagttacagaatccaaaatacttttttcaatttttttatgcaaatactgtggtaacacacaacacacacacacacacacacacacacgagctttttgaggagaaagatgcttttctaaagttctttttattaatggaagtgattattctgcaagggaataaaaatctgcactctctaaacttttagcctgatattttaaaaataatgagaaaaataaaaagatctataaaaattataatactgaaaatatcttataaccattccaagacattgaaaattttaccatttacttaattatattttgatgtaagaaaaattagaaaagtagtagatgtctgtctgcaaggtcatccacttcaaatttgaattccagctctatttgaaagaccaagctaatataacaggtaggaggatttggttctggaataattagtgtttacagaggcttcgagtctataaaattgcaagccacgggaggactttgcctctatagaaaacagtaggtgtgagattgcatgggacggagcagtctgacttttggaatcaggcagaactggttttgaatttcaactctcccaactcaaatctcaactggttttgaatcaaagactctgctttcagagtctgtgaatctagattaaactctttgatcccgttatagtaatatgcataaacaatataataggatttaatgtgcaggatctggtcaggatcgttcttggttgtagatggtacttggcacaggaatactctgagtatctgcaagaaaactgcctgcccctcagatgttcaactaacccctggattcagaacaatccattggaaagcaaatgaaaacctaacctgccctccacacccttaactgtttcagtaaagagtcacgtacaaaagtatatcctctcaactctaattcccaccactcaaaagaagacactcaattaagtttgaggaactcccccgtctcacatcaaaaaggaaaatagggtggcggagggtataaagaaacttgtgcaagtacaaaaaccctattctaggtgttcataaaactccagaacaccatagagggagggaaggaatggacacttcctgacagtattgctaacagaatctaagtggtcgtatgtggagtgagcgagctgcaggcgtgtctgtatgaaactgattctccctttctatcaggaatgttgtaatgaggtctcctcccccatattcctcaggggactggaatatgagatcccacaaaactgtacagaaatgttcctggagacttatattctataataaatcatgatagattttaattgagtctaaattgcacatagattgtccttgcctctttatttcatggcactataactcttttccagagtaaaattaggtgcgataaacacttttcccaccatatttcaccaccaagccctgtgtcttgggttcttaatatgttttgatgatgttatttgaaatgtagtctgcatccagagttcaggaagtaaaacataatgcataagcatacatctctatgcaaactcaaagtagcaaattttatccaagaaccatgtttctgcatgaaaagcaaaaagtagagtttaattaaccaaatggctaagttttccccaaaatatacgctaaagcttaaattaataaatcaaatttatgatttattttagatgtgtgttcacttgcacaatgttgggaattcttgaaaaggagtttgtgcttcctgcttcagtataccaaaagtacaatttggagataaagaaacaagatgtttccataaatttataatgctctgcctcctgctgttcagcagaatctctgttggttggcctccaagtttgatgaggcctcttttaagactatttttacactgctttactcttccgcttcattaattgctactgctgacttctcagagaattttaattacaggttttctttttcctctgcttgtcccccccagactgtttcaacagagggcacaatttaagaaatataacaaataaggaaaattaatctaccttatatattttgtacaaatttatgaataactaagtgaaaaatagcatgtgttaaacaacaacaaaaatgtttaattatagacagacgtactgaggcacagacaggatgtgggaggaagctccatgtcaagctggcccctttcctgaagcatccaactgcctgtgtgctggaacactgtagattatcaaaggaaatatctagctctttgcactattttcatttccaaacaattagaaacaaaaggcaattcatgcttttttaacttataaagtgtttatttctagaattttcttttaatttttttttacttaagtttacttaaggtaacaaactgtggaaagcgaaagtactgttaagactgaactactatatagggaattgcatgttttaaaagcaacttataaagaattgcatgtgtttgaataaacaactgtatcgactaacttagcacatggaatcatcacagcagatcttaagaacacaatttctgatgatgtgcttacttgttctcaatttctacttagctgccagaggaaaactattagctcctataactagtaatttttcatttttcttctttcatgacaagtcacttttaggaataaccagtagactccttttaaataactaatggcaaaactcaagaaagtctttgattttgaagagatacagtaaacatcataaatctttcatttcaagctggttttaaatcctagccttgtactattttcattctctttttaatatcaacacattgtatatgattagtgttcagttaatagtaaacatgatagcatcatcaaatttattatgattaattctttagatggaatttgtttgatgtacttataagccatctatattccttgtctgaaaattaattttaaacaatcacaaatcagaacaaaaattattgcaaattacagttgatcagaatgtcaaattaataattttttaaattccaaattgttatgaaaaggccatgcttccaagatttctgcagctgaagatcagaaagcttattgatgtctaatctagcagcaactaaaccaggttgcattcagaggtacagatagttaattctcttcaattggtaaagggtcactttaattaaaattattgaaattgtattatatgacatttcaaagctgtaattgatggcctatgataaatatggcccttcttagtgacttgatctctatctcttcctttctaggcttgatagagaaggtaacaactgaactatccacatccatctaccagctaatcaatgtctactgtaacagcttttatgcagattttcagcctgtaaatgtacctagatgcacttcctatctaaatcccgggcttccttcccacctcagcttcacagtgtatgcagcacacaacattccagaaacctgggtgcacaggtgagtggtggtgagtttttcacaaaagcattcatttttacatagcttctaagtagaatgcaatttgtcatgttcttatatgcaggagcaaagatttcataaaattttggaattaatcagcatagttttatccatattcttaaaatcacattttaaatgtttagattcaaaatggatatttaattttctttcttcttccatttcccatatttaaataattgtcattgccaatatatcgttatggaaatagaaaatactaattccatttagtggctcctctaaaattttctttttcatgtttgggtttaaatggctaatgctagttaagaaaacatagtaagacaaaaacatatgcacatgcagagagatagagagtctttaaaaatagaaaaaaaaaatcactctgatccccaccaggtttcagtggtattttgcaagaattgtaccttgataaaatgagaattagccaagaattatttgcgtttcaatagaaatgaacgacaattacacatggaatatcatcagattttaagttgactctgtagtattttcttcaataacataattacagtaatatagagataattaaagttgataagatagtaatttggtaatggatttattatacttactgcatttagcatctcaaggaaaaactgaaataaataatttcagtaaacattcaacttttggccgggcacagtggctcatgcctgtaatcctagcactttgggaggcctaggcgggcaaatcacttcaggtcagaggttcaaaaccagcctggacaaaatggtgaaaccccgtctctactaaaaatacaaaaaattagcagggcatgatggcacgtgcctgtaatcccagctactctggaggctgaggcagtagaatcgcttgaaaccaggaagcagaggttgcagtgtgcagtgaactgagatcgtgccactgcactccagcctgggggacagagtgagactctgtctcaaaaaaaaagaaaaaaaaaatcaatctttatcttgatctgtattttttaaaaaataaactgtataaatattcagagtaaattaaagaggaaattttacctatgtatataaaaaacactatctacacacatatttgtttagaatccataaaataatatttttattctttttccttttataattttatgaaaaattttaaagggccgatgtatagtawaataaattattactctaattaatgttttcttttaattttctaaccatcaataaatactccttagtttgaattcccatggaaaatccctatagccggataaatacagataaagctatatgtatagggcatgcatttatatatgtgtgtctatatgtagagagacaaggataaatatatatataaatatatacatatgtgtgtaaatgcaaaatgtaaaatatatacatatgtgtgtaaatatacatatgcgtgcaaatgtaaaatgcatatgaatataaaaaagtgtgcatttacgcgtgtgtgtgtgtgtgtgtgcgtatgaatgatctaaccaactctcctttttctgtctctacatagtacctacatgcagagtaaaaatagagcactttctaatattgttatatacaggtagatgtgtacatatgtacatataattataaatataaaataatgcttttctgcaaatgttcctataatcaataaataaattagggctttgatgaaggaaacaaaatcatcccagccattcattactggaacaaactataaagggctggacatgggaaaacatgaagctattcctgtcttaaggaatccatggaccagtcaaaattctttgggaagaggctccagcaagatgtcttacctcatgacaaattacatctttattgtagattttcctagggacctagtatataagttatctattaatacataaccaattaccccaaagcttagcagtttagcacaacaaactttgatgagttcacattctgaggctcaagaatctgggaagcagttttgctgggtggatctggcttaaggtttcccatgagttgcagtcaaactgttgactgagaccacagtcatctcaagctcactggggctgaagaatccacttctaaggtgataytgatgtggttattgaaagacctcagttccccatggtgtataggtgtgggagcctcaattccttgccacagagttttcaacaaaygtcctcaggccatagagttggcttttcccagagcagatgatccaaggaatgagagagagtccatgagcaagggaacaccacagacagaagagacaatctttgtaatctaatcttggaagtggtataccactacttctgccatattgtatcctgtgggaaagcatgatacaagggttcgcataccaggagacagaatcattgggggctatcttggaggcaagacacctgggaagaaaccaggccagaggtatctccagaagcataggtactgacaaactgagggggtaaaataacaaagtgwcaactttctagatggctttagtcaaaaggaccataattaatgtcagcaagtgaaactaatttgttaaggtacaggactctacaataaaaaagagtgaaacattcactatcaaatctgaggatctgaaactgaattatcatctactccacagatgccttcagggaacaccccactcaagctatcaaagacaaatgagaatgtatcttacttagaataatttgattaaacaaattctttccttgattcattacactgattaagaactcattcatatttatcctaaatttctcattatatagaatagaaatttaattacttaactttatcctctctatagattgaaagtgcctttatctcactcaaagatgagataaatttatcgttttgtgtatgtatttcatgatgctcattatcttaataatagcatattgttagttctcccccaagtccttttacaatgtccgtgtgaccatgcacatttgtaggtaggactatagtttttaaaaacctctagtacccaaaacatgtcctggcatgcaacaggcactcgataaagattggttaaaaatgtttgaacaaaatcccttgaatagagaaatgtgtcatacttggtttgtgaaattgttacatgggtctcgacagcaggaatacgtagtccatgtcgtggttattactgagggcaaaaatgtaagctgagctgaaaactataaagaagcaatgaccatacaggaaggtagaccaggagatattccaaggaagccaagaaaatattacaatagaggtacaaagctaagtgcctgaggtcaagagggccagcatcagtgaaagtgagtccagagcaattagtggcagtgtaagagtggttgactagacaattcttaaaatgattgttagtaataattagtaagagttcagcagaatcatattgttatatgaggagattataartaagtcagtaaacattatttttaaaaaatcccttaagtcactcataaagtatggtatcattgtttgataaatagaatgcaaaaataattatgcaaaaatgcataatatgtacagtaatacatattatgtaataaartatatctgtgcaaaaaatgatttgacagtactttcaattatgggatactgtgtgcacaggggcaagttgaaattctttctcatcaagacgatgccctttttatggggaagattcgaatggcatatagaggtttcttgtcccataacctttgccattaaaaggtacatgtgtgcagtttatgtcttccattcatgtcactaaagtctaatttataaacttggctcatcgtattagcacattaaggaatgtgtgggaaacaggcacaatctctcaatataaatactgatgcatataccaaccaaatattggcataaagaccaacataatggactctgaatcaagagcatcattaaatataaagtcctgacatggtattgaaatattcaattcaccagaaagatgcaacaaagtaataacattgacagaaatccgaagagtttgatggggccaatatgatagtgggggataccagtattcctctctcaggaattaatacattactgagaaattaggaaggatataggagtgagcatataattaakgagcttgatccaataaatatatattgtacttacagaagataatttggaaatacaaattcttctcaagcacatatagaatatttattttaagtgaccaaatattaaatagtaggcaaatttccaataacctatataataaagatctcatccactttctgagatgcaacttagaaaacagtaacaaaaaataaatatattcataaatttaagtatgtacttttaattttattaatcaaggagttagaaaacattataacttaaaggtaataaaaatatataataaacatatggaatatggtcaaagctattcttaaagtgaaaaatatagcctcacattataaataagacataaaagactaaaaattaatatagcaatcatgtcaccatttcctctatgccattttgctttgttttgtccagcttataaaaatcaaggataataaagtggaagaaaaatcttctaccagcattctggtagaagaacaacaaacaagtcctatatcctctgatttatcctcatcatagtactattaactgagcacattctaagagttttgctgatttatcctcatcatagtacttactattaactgagcacattctgtgagttttgcgctgggaaaaatacttaacctgcattacagttgtcccttgttatctgcaagggattggtgccaggacccctggagataacaaatgtcacagatgctgaagctccttacataaaatggcatagtatttgtacatagcatatgcacgtcatcctgtatactgtaaatcttctatagattacttataatacttagtgcaatgtaaactatgtaaatacactcatgcatagcttatgacttggggaattatgttctgagaaatgtgttgtgaggcattattgacaaccacctacagtcttcaagacagtaacatactgtacaggtttgtagcctttgagcaataggctatcccgtataccctagatgtgtagtgggctttgccatctaggtttgtgcaagtacactctgggatgttcgcataacaataaaatcacctaatgatgcaattctcacaatatatccctttgttttatttttattgtcatttcaaaaatatttctgatctgtggttggttgaatctgtggatgcataacctagggatacagaggaccaactctgttttatttaatcctcacaccagtgacacaagagcactatcatacccattttgcagatkaagaaattacagttctagaactaatctatgacaactccagatgttgtctttctaaagtcccttctgtttaccacagcagaagtgagtatacttcagtgtacttcatccttaactggttactagagttgattctgaaacaggacagttcccgtgacccttctgcaggactcatgaaggggttggcttgtttagtcagcctacagctctcaacccctcatgggaggggaggacatacaggtgagtgggtgcaggggccaggacaagtgcttctgggtgctggcaggagtagaactctgtgtagccccatggcagtgtctaggaggggtactcaaaatccctggatccccagaaggcatctgttacagtgctctctttgccatccgcagatgacttaagtgtttaacagctcagtgtgacagccctctgcatcgcgagctgttgttcrgcatccaggaagaatcaggtcacatgaacaaattgaagatggtaaatgcaggagattttattgctgatgaaggtggctctcagcaggatggagagctagaaaggggatggagtggggaggtagtcttcttctggagttcagccattcctggccaaactcttctttgagatcccgctgtcaagccacccctctgaagtcaagctgcatcttgccgatgtcagactgctgcttctcttctttccttctctgccactctgctgctctgccagtctgccactccaccactcagctgctctgccacccctctgccagtggaccctggggtttttctgggtataggatggtgggtgggacaggctaaaaagcaacattcaagtaggaaaacaggaatgcatgttctcactttgggcygcaggtccaagcttgagggttttcagcctggtattttcctgcctcctgtccatatcacttccctgctctgaagaggcacatcttactgccattaaaatatggaagatgaccaatcttagctacttcctgctgacagggggcattgttttggggaaaacggcagtcagattcctccctaaagtttacctaagggtccctagcaaaagggagccattgtccaaggctccagttgcctgactgttcagagtttgatggcctctaggcacatgaggaaaaaaaaagcccaagttttacaaggttaagtatgcatgggtcacacatgtgtattatacaaggaaagaatctagtgccaaagattacagaaagaagaaatgaaatatgctaacaacattgtaccccaagccgtttcactttggtgaaagaaattaaaccttgtgtgggagcagttaaactttataagagagataagtattcttgccatatctgtagcagtcaacaggtgcaccttgagaattctgggatttgtaggcttgcatggtggccattaaagcttctgcctctttcttgtgtccccccatctctactgtaaaaaccgagttggccactttcaggaggtcctctaaagtagtatctgttcccagggcctgtttctgcagcttcctccttatatcaggggctgcctgagtaataaatttatcctttatgtttagttatgcctcaccagaatcagaagatagagatgtgtgctttaccaaggcctctcagcctttccagaaaggcagtgggattctcatcaaatccctggtctttcatgaataggtcagtatagttgagaggcttggtccaagtcctacataaatcctccattatgcacacctgtaagtgtctcttcttccattctcccatctcatcattgagatccattccagggtcatccattgatactgcatctttcatttggataaagtttggcaccttccctgatgctatatgtgatacaaagctcataaccaaatcactctgtcacttgcagagcagtctgcttctcagtgttagtcagggtttgctttcaaagtaacataacgtctttctaggagagttcaaatacttgggttaaattctggaaagcctctctatatctgtcagggtcatctgaaaacttgccaagatctcccttaatttgcctcaagtcctgtaggtagaaggggacctggaccttactggggccaaattcaacaggcatctgttggaggggcaagagtgatactggggcttgtctagggtatttctaggagggggcaagctggagagaggacggggagaacccggaggagcagggmtgaagggagctggctcccctgtgggaggtgtctctggggtttgtttctttaattccctgagactgccccttgcagcctctcctgagatggccaataggagggatggatcaatcctacactgttggcaaaggtctggattgccctgcaaggtaaagaaagcctgcacatatggggtctcagacaatttgtccttgcatttacagaaaagttccaactgccagatgatatcaaaatgaatggttccctcctgaggccaagccagtcctcataatttggccaaacctttgtgcaaagggctaataggcatttttcctccagatttggagggtcaaagcagtcgcagtcattcaggatgcactccagaagagtataaactggtgatggtggagacagttggttgcccattctgaaagacaaggaaataggtatccctcatttcccttccttctttcagcaaaaactcagatgtgagggaggggaagcaggcatcgcccctttctcttctgtcttcttattctcaagtcctggtgaccttacacagatgccacccacaggtgccattgcagcctgcacccatgaagcagggaggtcttagagaataggaattgtccacattcacttatgccatgcctccattccccctactgtcagcaacctttgggtttcccaggccttatctgtgccatggagcatggcctccttccatgacgtggaggcttaattagcagaaattgtcctgcccatttacattgtgcctgtttccttgcttggatccctcagatctggttttccttcctaaggccttaacctgaagcttggaatcaggttgggaacaaaaggtatttcagggtccttttaaattaaatcccaaatgggccctgccaaatttgcagttatcagccagcagggctcactcttctgttgcctccctatcgtaagcagagtgctgaggtaggaaaagaaacctctcacttagaaaagaaaaaagaacaaaaatagtttaaaaggcaaatgggggtggtccagggaaagaacctcttgctttctacgaataggttactttaatcattgtatctctcccctagttccaaccaggctgaactccttgccagggaaagaaagagtctatgggcttgtggcaggaggggaaggcatgcagagagcactggccagccggctgcacggggtccctggccccaaagactaccctggggcctgggcagcatgcaccgctaactcccaccaccccacttagctgttgggcacagcacatgcatgctacggacatgcccaggcacccaagcctggaggggaggggatgagaagggaaccaccattcacctgcccatcccattcacacacctgtggccattggggtttggggtcatacctctaagaacatatggaaattgtattgttctgagttgcatatctgatggctggactaaacatacattctgcctagtatcattgctgctgtttgtagtagaacccttaacattataaaagaagagccaggagccatttcaaaccatgaaagaaggaaggaaagatatcaaaggaaaagtctgggggtcttggctgacaccttgatagacacttggggaacaggtccagtcttgtggccttccggcaatactgaggagtggcsttggcaagaggccttcagtttccccaggactttattccagtcccacatgacaactagacctccaggaagggaaacagagccaacattccttttacccaaaagaaagagagagatggcaggttgcatcctatcccctgcaaatggcatagctcagaggaaagtctgaggacaaggagagataaatccacattttgcttacccttctgaagtatcctaggcaagccccccgatgaaacgggatggttcccttgaccccttcacaggattcatgaaggggttggctcatttactcagtccatagctctcagcccctcacaggagggggaacacgccggtgactgggtgtacgggccaggacaagtgcttctgggtgctgataggagtagaactccatgtggccccgtggcagcatctggggggtacctacaatctctggcaccccagaggacatgtgttacagtacacttttagctttgccatccacggacagcttaagtgtctaacagctcagtgtgacagccctctgtatcctgagctcttgtttgatgtccaggaagaattaggtcacatgaacaaattraagatggtaaatgtgggggatttcactgccaatgaaagttgctctcagtgggatggagagctggaaaggagatggagtgggaaggtggtcttttcctggagttyggccatcgctggccgaaatcttctgaaagatcctgctgtcaagccgcccctctgaagtcaagctgcttcttgctgacctcaagctgctttttctcttctttctttctctgctgcccatctgtcattggagcctggggtttttatggttataggatggggcggggggtgggccaaaaagtaacattcaagcgggaaaacaggaagacacgtcctcactttaggcttcaggcccaggcttgagggtgaggctttgccaggcaccccacccttttctgtctagtattttcctgcctcctgtctgtatcaataccaaactctttcattctaattatcacattaaattgttaggcaacagtacatataaaagatcaagagatgacagctataaaaactaaaaaaagatatctcaaaatgttaagaacattttattttaaaagacctgtttgctgtttagatatgtgggaaaatttgctacttgcagagaatttctattatatacatatataatagtttaaattaatattgcttttacttattaagattttttacaagattttatagttttgtcaggaggtgtgggtgtgtgtgtgtgtgtttaatgttggaaagctcatcagatattgtgtacaaacatgttttacatttaagttaaaaatattcaaacacagtatgtactttccagaactgctgcgaaatattagcactattgttagttatcctatgaattcattaaatgtttaaaaatctaatgcacacaaattctcattcaatttaaaattgcaaagtgaataagtattcttagaaactttggctccaatgctgaatttcacattagaagtttatacaaaaatctagtgctaaataatttatgtttaccagaacattagcatattgtttcttctttttcaatcttttaaaaattgtggtaaaaatacagaaaatgaaatctaccctactaaaaaagtttaattgtaaagtacagtaatgttaactacatgtgcattgttgtatgggagatctgtagacctttttcatctggcatggctaaaattcttcctcttccttttctatctccaagtgcccggtaaccaacattctactttttgctttcaagaagtggtatatttagtatttgtgtttctgtgattggcttatttaatttagcataatgtccttaatatttatccatgttgtagtatgacaggattttcttccttgtcaaggttgaataatatatcattgtatgtatataccatgttttcttcatctattcacccactggtgaacatttagattctttctacatcatggctactgtgaacaatgttgaaatgaacatgggagttcagatagctcttcaagatcttaattcagttcttttggataaatacccagaagtaggattgctggattatatggtagttctatttttaatattctgtattccacttttttctgctctcatatttattatttcttttcttctgctaactttaggctgagtttatttaccaaactaacatttgccagttctgcttaccggaagtagtccactaggcacttgcatcccacacttggctttatgccagcaagctgggatgcttacccatttaaaatgtaaggatagtttgagatcatttcaaccccaagatgtctaataatttatgatcatcacattggatcgggcaccttaactcagcatttggttcatctcacagcagcagtgctgaccatcaaagtatcaaggaaaacaggttagaaatttgactctcaggacccacttaattagaaagagaccaaattctgaaatggtgtcatacctttctgccactgaagcagtgaggcaaaaagacaggaaaagaacttaacccagttaagaagaatgccaggacaaaagttaaccaaaaaaaattcctatcctcagctggtcagcatcatcaaaatcatcctgtcccacaaaatcctcatctcttccaggaaccaaagaaagagcttcagccttgattctcatgactttattataaattggtaatgtttgcaaccacattgtaaaatgggggctttggaaaattagactcatctgtgtagtcaaatataccatactctctgcagagttgatgccataaggtggaggaacctcacctgaagccttctcaggttcctcaggctcttcctcattctataaatgttggtacttgctgctgcagaccagctcaactgccactggtgccactaatgccaactccatggtgcagcaggctacagggaagggagggcgagtgagcaagctgaacaggtgaggagctgcagcctgggagtgctgaagggctgaaggcaaaaggctgaaggcaaaaggcctcaggtggatctcaatggcagccactgcacctgggcaagatgctctcctcaagctgtaagcactgccaattctgagatgttttgtaattgcccttttgatttcttctttgaactgttggttttgccggagtgtgttgtttaatttccacctatttgtgaattttccagatttctttctgctattgactttgaatttcattctcctgtggtcagaaaagctacttgatattatttgagttttcttaaawttgttgagatttgttttgtgacctaacatgtcatctagcctggagggtgtttcctgtttgcttcagaagaatatgtattctgctcctgctgagtggaatgttctgtatatatctgttaggtccatttggtctatagcgttgttctaatcctctgtttacttaccttctgtctggttgttctacttattaaaagtgggttattgatgtctagtattattgtattgctgtctatttattccttcagctctgtcaatgtttgcattatatgttgggtgttctgatattgctttatatattgggtgttctgacgttgggtacagatatatttaaaattcttatatcttcctggtcaatttacctttttgtcattatacaatctccttctctttttcttgttatagttttttacttaaacttgactttcatggtgtaagaatggccacccctgctccccttggttactgtttgcatagaatagctattttatcctttcatttttggcctatttgtgtccttaaatctacattgagtcttttgtaagtagcatctagttggatcttatatactttttgtccatttagccatgctgttggttaaatggataatgtcttttgattggggaatttaatctgtttacttttaaagtaattaatagtaaaggacttactattgccattttgtccattgttttctgtcttgtatcttctttgtcttttcctctctggctgtgtatttttagtgtttgttgttatttttgtgggggaggtagtgacttgctttgatttttttcgtaatgatatgttttgattttttttcttgttttttgtgtatcttccataagtttcattttgtgtttaccatgagtcttatacaaaatatcttatatttataacaaccttctttaaccttttaactaaaattcaatcacatacgaaaactctgtacttctatttctcctcccaccacactttatgttattgatgttaaaaattacatctttttatattacatatcaatttattgttgtagctatttttgtacttttatcttttaaatgctacaccagagttaaaagtaatttatttagcaccattacggtattctgtatttgtctatatatttacctttaccggtgagttttatagttttacatgcttttgtgtttctctatagcattgttgcatttcaatttgaaggacagtgtttagcatttcttacaaagcaggtcttgtagtgaggaactccctcagtttttattcacctcataaagtatttctctttcatcatttttgaaggatgattttatcaaatatggtattctttagtgacaggtttttctttcagcgtattgaatatattatttctctcccttctggcttacaaagtttctgctgaaaaatacactaataatcttacgaatgttctcttgtacatgattagtcattttctctagctgcttgtgaaatggtcttttcatctttttgactttttatgatttgattctaatatgtccctgtggggtcttcttgggcttcttcatagttggcatccagtgggtttcctgaatctggatgttcattttcttccccaaatttaggaagtttttcaccattactttttcaaatgagcattcctctttttttctttttctttttttctctttctgaaaatcccataacgatacattgatatattggccggcttgacggtgcccattattctctttggctttcttcagttcattgtggggtttttgttattgttgttgttgttgttgttttcatttttggcttctctggctggataatttcaaataacctgtcttcaagttcactgattatctcctctgctttatcaattctgcttcagaatctctgtagtaaatttctcaactcagttattgtatcctttagctccataatttctatttggttatttttataatattttctatatctttcttgatattctcattttattcatccataatttttcattgagtatctttatgatgggtattttgaactatttgtcatgtaatttatacaactttattttcttagacttgatttgttttgttcctttgtttctttagctaggtcatgatcccctctttctttgtgtgccttattaccttgtgttgagatatgtgcatttgcaaaaacagctaactctctcagtctttatggtctgtctggcttcccactgaaaaaaaaaaaccttcaaaaataagccttgctagagattctgggtgccttccaaacctttcatatgagcacatcttcactctgcttgtacttgtaaattcccaattagagggattttgctggtttctgtcttgtggagctcatgttttcttgctttttctggtgtctgtctgtggtactgcaggttctctggaatttctgtgaggtgatcagatctttttgttttcagtagtgtggacctaaagtatgctgcctcccatcagtgcttctagttggataagacagaaaccagtccctcaggcaatctctttaaaagctgaagtgttggacatatgctcctttcttccccatcactttccctgaccagggagtggctgacaaggtatataggctttgtccactgtaccataggacctctggaacaataagaagccacccaactttttttttttgttctcaacagtctccaggcatctagggtatgcagggtcctgtcagtgctccaagacagacaagacagaaactagtccttctgatagtagccccaaaactggaatgttggacacacgaatcaactcttttcctacccaaggagaagccataaattgggtttttttaaaaaaatcattctatgctgagttgtggagagaggcaatagcaagtacgtgctagtaaaaaccatcatctttgttttcagtggcccctaaactggtgacatttcctgtcatcatttatatccaggaaagacaaaagctagttccttgtgtagcctcaaaggtgctaagtctaagtgttagatgtacgtccccgtgttctctttccctccttggtgggaagccagaagttgagagtttctttctgatcatgccacactgtgccagggaagaggctctggtaagtgagtgccacaaatttttctaccaactttgacatggctggttttgaattcacctgggatacaggagcctcttaactggtttctggttttctttcaaaaggaatcggtcagcatatttttctctccatgaataaaggaaggtcttagggcctcctattccactgtctttttgacatactcagcctaaattcttaaagcaatttttaaagcatgctttatgcaagcagtcatcactttatcatttgacttttgactacaaaaataattgacccatatagaaagctagtttctttaaagtgctaagcatattgaattgatgttgtttcattttagctacaaagcgttttcttttacctgttggcttacatatgctggaaagaagctgtgccaagtgagaaactacagaaatattccagacaagaaattattttttttcttggtcaactggaatgaaacgtaagtttaatctttactgtatctggatcatttatgtaataaatgtcagctttttccccctttttttaaaagcaagggatgtaatttaaaaaaaatatgctgccagttgatttgattcagtggtatgataagtacactagggctaatagataactgattgttcaattcaacagattaaaagtccatttagaaacctagacaagtgtccaattcacattattgaactgagaaaaagggaaattgaaaaaagaagaagacttattaatcattcacacactgtgcatatcaggaatatgctctctttgaggcaggagtggagggagtccaggtgtaacaaagaaaagacaaccctcctgataacgtgggtaatctccattttctcaattttctcacataagctgaagtacaaatttatttaaacaatcaagtttttttgacaataaacatctatagatgtgtaagcttaatttggggtgactggctcccacttccttcttctgtaaagatttgttaagtcaagaagataaagtaacttcctaacattatcactgtctttctccacttttttgctccccgcacccaacttaagccctctctttactcagaaccccagggggctcatcagcctcattcacagctcttccatggttactgctgcatttcctcactgctctgccagcttgctctcagtcatttccctgcagtctgtattgcttcactcagatcaatattcttcccacctcaagcagaagaaaattccccagcctacttcccctcagctctttcagatgatctggctttcttagaagacagtttgactcccggtatgatgcttttccattaataaatacgtgtcagaatttgtagaagaggatgatgttagatagcaccatctattctactcttaccacaatcaatggagactgtgtcctgaaacatggcatgtgaccttcaattctcgcatacctcatggcccctcccattccaaactaaatctgccttcttataggaccatgacaatctctatctccccttctttgggtaaggttctttattcctttgaccaaagacctgacattcaataataatatccctttttctttcatagaatcaactctgcttgtaaaatttttcagtagctctccaattcttataaggcaaagtacaaatcatttagcaaagcacacaaggccttttgtagtgtggcccctacctatctctgcatctttacctctagaattaaccccattccccgttcttgctatccaccagtcatttgcatcttatctacttaccctaactatcccttgactgtccaccagtcattctttgcatctgatctatttaccctaactatgaactgagaagtcaggcctctgccagggatcctccatgtgtcaggaacacagtattccacttgcccatctgggaaacacataattatctttcacgatgcatcttttacctcctgtataaacccttcctgtatcattgggcaaaattgttcatcttttcttcccttgcttggtctaacctgtaaatttctcttacagtacctactgtttgtttagatttctgtatgctcctaccgaataatacaaagattttttttttaattttatttagtcgacagcaggtaaagcagcaccagacaaagggtccagtaagtgttattgggcaaattaataaattttgtgtaacaagtgactcctttaaaaagttattaaccaacccaggtgcggtggccacatctataatcccaacacttcaggaggctaaggcagatggatcacttgaggtcagaagtttgagaccagcctggccaacatggtgaaactttgtctctactaaaaatataaaaattagctgggcatggtggctcacacttgtaatcccagccacacgggaggctaaggtaggagatttgctcaaacccaggagacagaggttgcagtgagccaacatcactctaccttgggctacggagcaagtctaaaaacaaacaaacaaacaaacaaacaaacaaaaccattaatcagttcaatccctaaaatttttcttctgatttaattaaaagtaatttctggttgttttaaaacatcagatttattttcaactcacacacttatgccatcatatagataattcaagataaaaatctaattctaaactcaatttcaaagaaaaaattctgaatgctagttctgatacttactgattaacttggcccagttcccacaaccagaaagtgtcaaagctagcatttagacccactgtgactcctaagctgatggttttactgtgacttacatacttttccatacaacatataaaatcttgacaagagtatttacatcccatgaatagtattcaagttttaacttaagaaataaaataacaacctctattctgctccatcctcctgccagcagctaccccatttcttttctctgctttgtagtgaaaccttccaaataactatctatattcactttattcagttatcttttctctgctctataacatactccaatcaggctttcatcacctctgctccactgaaattgtcaccagtaaccttcatgactgaatccaatgtttgtttctcaatcctcatcttacatgacctatcagaagcttttggcactgttgatctcaccctccatcttgaaatttgctttccacatggctgactcttacctcactggccatttgttctccatgtccttctcttctcccagactgattatgatcttagcccttaaccctcttctctgttgtatatgtcattattccctcacttttctcttacagttatatacctttaaatacaatttaaatgccaacagctcccaaatttatatcactaacccagccatcagtcacaaactccacacttagagaatcaatatatcctaaactaaatttctgatcttacatttcaaaccactccacctatggatggccattctggataatcaattctaattctggttgttcagatcaaaatccttagcctgaatctcgtttcagaccctatgttcagaaaatcttaatggctctcttctcaaaacatatccagaatatgttctcatcaccttcaatggtctaaaaaaccatcatctctcctctctataccacaatagctttataatggtctccctacttctcttacacctttgtagttcttcttgcacagcagctaaagttgtctctttaaaatatcagtcaaggcatgtcattcttctgtctaaaaatcctgaactagctccccatttcactcagtgaaaagataaaatacttgcaatggtctattgtttagtgtcttcattttgtttcagtattaataggagagttctaaacaacgtactttcagccaggtgcagtggctcactcctgtgatcccagcactttgggaggtggatcatttgaggtcaggagttcaagaccagcctggccaacatggcgaaaccccatctctactaaaaatacaaaaattagccaggcgtggtggcctgtacctgtaatcccagctactcgggaggtcagggcaggagaattgcttgaacactggaggaggttgcaatgagccgagattgcaccactgcactccagcctgggcaacagagtgagattctgtctcaaaaaaataaataaataaataattaaaagtgtagctttcaaaatctctcatytttcactctcagaagcttactctggtcttagcaaaactatttcatatacaataaaacaattttaagaaaaattgtagtgattattcattcttaaatagtatagtgaggcaaacatgtggttaaaacttgagatctatactatacctgttccttggtttaaaaaaaaaaagcaatctgtttccgcttactgatgtgtctcttatttttttttccttttttgtctgaaagttcattcctttgacttttaagtagctatacaaaagttaaaaaaattttcagtgaagttgagattattctggctttaaaaattcataggtattaaagaatggataaataactccttgggaagcacttattcttatcctaaaggaatttatttttcttaataaaaatgacagaatggagattggcagtaactatccactgtaacttatataatttctttcattcttgttataaaaaaagctcactaacaagtgaagttatacatgaagaagccagacttaatgggaaaaaaagaacattctagatcatgtgagaaataaagtgaaattacagttttcatcctagcacagaaatatgaaagctgaatagaaagtcaattataagtaaaagaaagaacattaaagaaattgctgtgcattccacaggatcatcagcattttatgtcaagtttcagagcttcttttaagctgagaaatatgtccatactaccttaaatgaatatgacaagtgtgaaagaatttgaaagaaaacaaagagaggacgtttagttttggataccgaaatatctaggtatccaatttaatattttaatctaaaatttgacagtctttaacaatagaagattcttctcactctagtattttctttatttttctccattaagtctagctagaattacgtatttgtcagttctcacagtgtcataaagatactacaagagactgggtaattttttatttttatttttatttatttattttttttgagatggagtttcactcttgttgcccaggctagagtgcaatggtgtgatctcggctcactgcaacctccgcctcccgggttcaagcagttctcctgcctcagcctcccaagtagctgggattacaggcatgcatgtgccaccacgcctggctaattatgtatttttagtacagacagggtttctccatgttggtcaggctggtctcgaactcctgacctcaggtgatctgcccatcttggtgggagtgctgggattacaggcatgagccaccacccctggctgagactggataatttataaaggaaagatgtttacttgactcacagttacacatggctggggaggcctcaggaaacttaaaatcatggcagaagggataggagaagcaagtaccttcttcaccaggtggcaggaaaagagagagagcaggagaagctgccacttagaaaaccatcagatctctaagaactcactcactatcatgagaacaacatgggggaaaccgctcctgtgatccagtcacctcctcccaggtgcctctctcaacacctggggattaaaattcgagatgagatttgggtggggacaccaagccaaatcatatcaacttacatttcatctgtctacaaggaatgtgttttttacaaacctgtgtattaaatgcacaatggctgatacaaattattgtaataataattgaataaatgaatataatgcggtatacaacctacaatttgccatatattgtgttatagaatagcagttccattttgtgmaaaaggaaaagtaagacttagaaaggttaaatgcattacttagaaaggttaaatgcatcttagtcaatagggtcattttttgagcataaatagatccaaatagatccaaatccaaacttggacccatcctatccgcagacagtttatatattggcatctcacaattatcattaactcaataacatcataccctaaactatactaattattcccatcccatcttctttattccctatcagttaaaaatatctgtcgtaatctagaaactagaattcgtctttaattctttattgtcttattccactggtatgccatcagtcaggtattagttatgccttttacttctaaaacagctcttctatctttcatcctgttagctgctctataaccacgctgggtctggatttgattatctcagtggacaccatgagtaggagagacagatgtacttcctcaaattcaattatggtcattgaattaaattaacttctccttatccccaaggctggatgctgtacaggcactgaaaaaaagaagtcaccaatgtttgatttgaaaccctgggtaaaaactgctccctaggctccagattagaaagccaactcctagtgtgagaagatgcttaatattacctgaggcctcagctgggtgaacctcagtccgcacctttcagttggacaataggcttttgtcatcttcagtactctaataatcacctactgctctaataatttaacatcaaagttcaactgggaatgacaaggccagtagattctgtgtatttccctcacatctcatggccatcaggtatcatcccataaagatgctcggtcactcttcaagtctctttgctctttatccttcccattcatctgtgatttatctcccatgactctggccctgtctgccaaactttgttccagttttctcattcctctttagcattctcacctactgtaaacatatctccccatctcaactcctagaaaaaaaatttctttcatctccttgtctcataaatagttctttcctaaacaccaggcttctctgaggcattatcatataatgatcatataattgacatatgatcatataacgatcgtataattgacatatgatcatataacgatcgtataattgacatatgatcatataacgatcgtataattgacatatgatcatataacgatcgtataattgacatatgatcatataacgatcgtataattgacatatgatcatataacgatcgtataattgacatatgatcatataacgatcgtataattgacatatgatcatataacggtcgtataattgacatatgatcatataacggtcgtataattgacatatgatcatataacggtcgtataattgacatatgatcatataacggtcgtataattgacatatgatcatataacgatcgtataattgacatatgatcatataacgatcgtataattgacatatgatcatataacgatcgtataattgacatatgatcatataactatcgtataattgacatatgatcatataacgatcgtataattgacatatgatcatataacgatcgtataattgacatatgatcatataacgatcgtataattgacatatgatcatataatgatcatatatgagaacctgatcatataattctatacaattgagatgactccagaaaagaatgaaaggtagatgtctccctgcccctattagggatgccagatcacaatctcaactttctgtcaaaagccccttctcaaacaatcatgccacctacgtataccccatccagtcttacagtagtatttatgaccttctggacacttccttacatatattgatgatttcaacccaaactcgagtttttctcatcattaaaaatcctgtgtctatccttagccaattttatttgctagtatctataatccatccaggatctgagctcggagagtcttgaccttatcatatccagagattgtatatgtgttacatttcagtgaccatcctccaaattcctaggacctcatcatgacccagaatggtccacatttaaaatggcaaaaaactctctacactttggctgttatctttcaaatatttctttttgactttagggaaaagttgaaattcttttgcctggcatgtagagctcttaagcattctggcaaccacctatctttctaattacatcctccacaatctcccctatcaacttgacttcatcttttgttctagccacaatgaaccattcaccatttatcagacacacctagttgttcatccatatatgcccttgtctgtgctttttcctctttctggaatattcttttccaaatctccatctcattatagctaacttaaaccttgagaatcattttgagttatttcctgcctcctccaactccctaacacagtgtctttctaagtctgtttttcatctgtgcttgcaacagcttaagagtaaatgttcaacttattgtaacttttaaaaatatacctacatgtcaacattatcaggaataattttcatcgattaacaaaatctcactattctacatatttctgttaaattttcatttttacaagattaaacaaaaaatttcaagaggcagcctcaattcaaatagttaaatatctttgtcccagaccagtacattataagaacattttcattaaaatatcagtacaattgggtaggtaatgcttcttctttcttttattctcaggatcaattttccccttgaaataaagtcacttccaagggaatccatgctcactgtaaaactgtttgggattgcctgtgcaaccaacaatgcaaatttactggcgtggacttgtcttccactgtttccaaaagagtaagtgtatcaattgtgagtaataagcctatcatttcaataaaacattcctagaagtaaatattttggagtatatggcataatgaggaaatcaagacattttattctaaaattgacatagttcaatataaatcgtgactgctgaaatcagaactgaaaagtgaaattgtagaaatggctttcaaaacaggactcatgctgaacttgtcagctggatcatttataatgaaaaggtattggcatgaccaatctcaattactttttcttttctgaccagctggtttctttggaactagtaattcaaaatgatttggattaatattgtcatttagaaagaatgtaagtcatggaattctggctaaagtaaaattatacaaggtaactggcttactgaccttttcttgtgaagaagaaatatttagtaattttaaggtgatattttccagaaaactaggtcaattataagttcagatattctctcagaactaatgaccgttgcaaaatgaagtgttgattcaaccataaatcttggaaaatattaatattcagaatacttgataaaatcaattacatgatgttctatggtattaaggaaaaatattttttaaaaatcaaccatttttcacacggctagtcttgcttcagaatcaaatgataaaattcaggactttcaaaaaatcagaacatatattgtaatgttaatatttttataaagcatatttttccctctgctgttttagaaagatatggtgatacaaaaatatttttttaatttattaatttttatttcccagacctaatcaatataaaaaattattatcagcaaccataatagatatttcaaatcttctttgttggattaattctgatgtaagctgtgtgtatgtgtgtgtgtgtgtgtgtgggcacgtgtgtgtgtgttgttctgttatttgttttcatgctttagcccatttctataccattgttccttgaggacagggaatgtatttatctttgtcatatctatcatctaatgtagcacctcatataaataggcaatcaatacaagtttgtttactaaattgaattgaggaaaaaaacagtccctatataggagataaagaatgaaataggatttcaaggtctataagaaacagtttatccctaaaagcaatacctactgctgttagcagacatttcaaagatatgatttgtatgcyaagaactttattttctttctcactaggagcagctatacaagtgtctttccttctcatgagtgagtttccttaaagttttacctgcagtatttgtaagatctaccattttttgtagaatatttctagctagtcactgaaaataaaaaaaggttaagtccattttactctcccatcatgtaacacactacttgcacatatcaataaacactaaacatataagaattcaggaatatttttgtctttaaaactaatcttcaaggcatttttccagatggttacgatagtaaaaataccacctccatgttgttttgtcatatgtcacttaccactggtaagcacgttacaggcgagtggtcacagaagatgagcatttgtgagagatggcatctgggactgatcctaggtgttattttttaaggggatgcgtcaaaattgtagacaatgagacatcaaaaaacacaactcacttcaacaattacacaataaggatttctaaacatttttcaaaaaaaacctgtttctcttgaaaatcagaaaatctgcttttctcctgtgctagacaatttaaggaaataaagatatttttaagaaaccagaaatatgtcacatggggcaattgggaggctgcaaagactccactttgttcgttgcttcaagttacaaagattctaacccagtttatttgatgcagatatttccagatcacagcaaattggtgactgaatttcatttcctttcgggggtaatccctgctcataaacatttggtattgaatctgtcttttattacagttcaaattgcccatagctagccacgtggaactataatgagcgcttatgtcattattttttccaacacatatatcaactgaaaatatgcagaattaaaggtttcctatcgctttgtggtttccagaagtggatttcagaagaaccaatggtgattaaactcagataaatcagttagggctgcatcaacaaagtctgaaaataaaaataaacttctacattttcaagcatgcaaacttgtcttcagttctatttttaaaagtcttggccgggcacggtggctcacgcctgtaatcccagcactttgggaggccgaggcgggtggatcacaaggtcaggagatcgagaccatcctggctaacatggtgaaaccccgtatctactaaaaaaatacaaaaaaaattagccggccgtggtggcaggtgcctgtagtcccagctactcgggaggctgaggcaggagaatggcgtgaacccgggaggcagagcttgcagtgagccaaattggtgccactgcactccagcctgggcgacagagcgagactccgtctaaaaaaaaaaaaaatgctcaagtccaaaggtaaatttggcccacagaagttttataatcatgtcttttgcagacaaggcttccactccatctgcatttgtaatgtagccacaatgtagcgagaaagtgttatcctcacctcagcaatttccatgagcttcctcccctattcaagttcaaaattaatagtatggtagttacttagcatttctaaattgtggtaagctacttcagcacagagattctcaaccctcattaaataatagaattttctgaggagatttaaaaataatcccaaagcccaagcatgcccaaagattctaatttrattggtctgtgacctggcctgagcaccagtattttcaaagctcccaaggtgagtttaaaaccttgaaaaatcaggatgtttttcataatttcaaaaaaggcctaaaataaaccttaatctcaaaacaattagattccttagacaattgcctgagtagccaaccctgactccactgtgtcaagtcatttcagatgtatcttcaaaatcataaccaaaaaaaaactggatgagaatttcttattgtttttctctcctatccaaaagaccctcagttagtccaaatacgtcatttatagatgaagaactctatgatgaaggaagattgaaaaaccggcagttggttaccaggcyacttagaatagaacaagaactagaatgcaggtctgagctttaactaccttacgccacctcccttcctgctcttaggtgccatgccttactccatgcacactctgtaaacacttcactaccctacaagagggatataatttagatattgtctgctgtaaatctcatattgaattatggtcctcagtgttggaggtgggacctggtggtaggtgtttggggtcatgggagcagatctcatgacttggtcctgtcctcgagatagtgactaggtaatcacaaggtctggttgtttggaagtgtgtggcacctcctcccacctgttatcaccatgtgagacacctgctcctcctttgccttctgccatgattgtaagcttcttgagrcctccccagaagcccagcagatgccagcaccatgcttcctgtaaagcctggaaaactgtgagccaattaaactcttctcttttaaattgcccagtctcaggtatttccttacagcaatgcaagaatggcctaacccagaaagtcggtaccaggagtagggtattgctatgaagatatctgtggatgtggcattagaactgggtaacaggcagaggttgaaagtttggagcactcagaagaagacatgaaaatgagagaaagtttgggatttctgagagactagttaaatagttgtggccaaaatgctgatagtgatatagactctgtaaaggctgacaaggtctcagttggcaataaggaacttattgggagccaaagcaaaggtcactcttgttatgccttagcaaagaatttggttgcattgtgttcatgccttaagaatctgtggaagtttgaacttaagaatgatgacttagagtatctgacaagagaaatttctaagcagcaaagcatccaagaggtggcctggctgctgctaacagcctcatctcagattcaggagtgaagaaatgacttaaaattggaatttatacttaaaagggaagcagagtgtaaaagtttggaaaatttgctgcctggccatgtggcagagaaagaaaaagcattatcaggagagaagttgaaatggacttggagcaaccacttcttagacatatctgcatgactgaaaaaaagccaggtgctaatagccaagaaaatgtgaaaaaggtctcaaaggcatttcagagatattccaggcagcacctcccatcacaggacctgaggcctaggaggaaagaatggtttctggggccaggcccaggggcttgctgccctgtgcagcatcaggacactgctccccacatccaggtggctctggctccagcttcagaccaaaggggcgcaggtaccgcttgggccaccactttgtaaggtgcaagctacaatccttggcagcttccacaaggtgttaagcctgcaagcacacagagtgcaggagtgaaggaagcttgttaacctccacctagatttcagagaatattttggaaagcccgggtgcccagccataagcctgctacaggggcagatccctcacagagaacctctaatagaaaagtgtggaggataaatatggggttggattcctcacagagtccttactggggcactgcatagtagagatgtgggaagtgggccaccactctccagattctggaatggtagagccaccagcagcttacaatctcagcatagaaaagccacaggggcatagctgagcaaggtcttgggagcccaccattgtatccgtgtgcttggaatgtgggatatggagtcaagggttattttggagcattaagatttaatgactgccccgctgggtttcagacttccatgggacctgtaactcctttcttttggccaaattctcccttttggaataagaatgtttacccaatttctgtaccctcattttatcttggaagtaagtaacttgttttgattttatgggctcataggttgaaagaactgatctccagatgagactttggacttggacttcagacattttagttaatgctgaaatgagttaagactttgggtgactattgagaaggcatgattgtattttgcagtgtgagaaggacatgagatttgaggagccaggggcagagtaatatagtttggatgttgtttcctccaaatcttgtgctgaattgtagtttccagtgttggaggtaggacacggtgggagatgtttggatcatggagatgggtccttcttggcttgtggctgtccttgagatagtgagtgggtacttgcaagatctggttggttggcagtgtgtggcacatcttcaaagcttgctcctgctctcaccatgtgagacacctgctcaccctttgccttccaccatgattggaagcttcctaaggcctcccaaaaagctgagcagatgccagcaccatgctttctgtaaagcctgcagaataatgagccaagtaaacttttcttaataaattattcaatctcaggaatttctttttagtgacacaagaatagcctacacaacagggttccagctcagccttgcctgggctctactcttgcacatgaaacctgttagacataataaagtcagcagcccaaagaattttataacatcagatcctttggtcctgccagctacagattctttggctccaggatgccagcaatgggcacatagaatattatggctaaaattgataattgctttatttaaacacctgatcttgttgtttgaggaaatggggcccaaagagggtaaaccagcccatctgttctcctggtgtcacaaattttgtgttggcttttctagtcaatgaatttatacgatatattcaaattaaaaatattcttaaggatactccagaacaaatattttgaaatactatgtttagcagcatagtccttcttctaatggcatcatattaaaaagtctcaaagtgtaagaatgattacatggatgtgttgcgttacaagaatttacaaacccatagcccagcctaactgacatcttcccatctttctgaagttcaccctcaaacaccagcagaacctcaaagctatatgtaaactctgaagaccattgattttgtccaaaaagctcaaaaaagttaagttaataaagggaaggtaataaaggcaggctccagatgtcctgacataaactctggtgttctttccattatatgaaagtctttttttgtgtctcctgccttcaaaatgtttaattttaactaacataataaatgttttcacaggagtaatactttaaaaaatgaccagtggtccccatttgcctggtcttatatatggctttaagttataaatattacatatatatatggctttaagttaaatattatattagcctttttgagatggagtttcactctcgttgcccaggctggagtgcaatggtgtgatctcagcttaccgcaacctccacctctcgggtttaagtgattctcctgcctcagcctcccaagtagctgggatataacaggcatgcatcaccatttgttgatacattgccccatacacacatctatgtcagatgacttcactctgccacatgtgcctcagggttaaagccatggtgactgttaatacatccaagactccatcaaaggacagtaattaccatcaaattcttgagtcccctcatcttctgtcaagaccagcttagaccactcagatttctggagtaaagcatagccaagacataaaaatatggtaaggacacaaatataacacattccacaacttaggtgtgaataaataatgcaactcatgtatcacactcttcctcatgagttcccccccccgtaactaatgagaagaaataaagtttcatctatgataaagtattagttcagtaactttaaatagtccttttagaaatatgcagtctcttttggataaaaaacctaagcaataccattcaggacataggcatgggcaaggacttcatgtctaaaacaccaaaagcaatggcaacaaaagccaaaattgacaaatgggatctaattaaactaaagagcttcggcacagcaaaagaaactaccatcagagtgaacaggcaacctacagaatgggagaaaatttttgcaatcttctcatctgacaaagggctaatatccagaatctacaaagaactcaaatttacaagaaaaaaacaaacaaccccatcaaaaagtgggcaaaggatatgaacagacacttctcaaaagaaggcatttatgcagccaaaacacacatgaaaaaatgctcatcattgctggccatcacagaaatgcaaatcaaaaccacaatgagataccatctcacaccagttagaatggcgatcattaaaaaggcaggaaacaacaggtgctggagaggaagtggagaaataggaacacttttacactgttggtgggactgtaaactggttcaaccattgtggaagacagtatggcgattcctcaaggatctagaactagaaataccatttgatccagccatcccattactgggtatatacccaaaggattataaatcatgatactataaagacacatgcacatgtatgattattgcggcactattcacaatagcaaagacttggaaccaacccaaatgtccatcagtgatagactggattaagaaaatgtgacacatatacaccatggaatactatgcagccataaaaaaggatgagttcatgtcctttgtagggacatggatgaagctggaaaccatcattctcagcaaactatcacaggcacaaaaaaccaaacaccacatgttctcactcataggtgggaattgaacaatgagaacacttggacacaggaaggagaacatcacacactggggcctgtcatggggtggggggaggggggagggatagcattagcagatatacctaatgtaaatgacaagttaatgggtgcagcacaccaacatggcacatgtatacataagtaacaagcctgcacgttgtgcacaggtaccttagaacttaaagtataatttaaaaaaatgctgggtcactcagataaatttctcacaccctggctctcttcctaagaggggaaaaggatatataagaaaaggagaaaacaaaatcataaaagcagatcctttgccctggtgacttctgatatccaaatgaaagcccctttttaagctgacggatgcttgttacagctgaagtctgcagctcatgactggggctcccccagcttggccagggtttcctggcaagccctgggtgactcaggctctcacaggcaccatagaccctcttgaggtttgccaacgactcccagttggccccaggttggatggtcctatcacatgcccttgttacagaagcccttatccccaccagggaaactctggaaactctccctctcgaaaatctttagatatttccagatcccatctcacctacagagaaaccaaagaaggcccacaaaagctaaactcacgagttcctcctgcctgttaatcacatgacgccaagtttaatggccatgccacaagcagtgcagaacctctcaagaggtgatttccttccaggatctgaaacggggagtgagaagaggagcgcctctgccttcarcattatgttttgctcactgatctcacacttctccccatctgcttgccaaagcagaggagaggcaaactgggacgcctatgtccgccgtgcttactcaggtccttctttctctgccttctacttctcaccctcccaaattcccaggaagtgatgggcttttctgtcgtcatgttctcctatccaatatggcacatcctcctccctcctcacctctgttgactctgtcccatgcacagaaacattttctctaaatgctgtggagaacaatatgacctccaagtttggcattggacatgtttcttcctcctcttgcattctgcctaacactaatccaaaacttttctcaggcagatggggatttggccatttggggtgaagctcctatgctctgacaggcaaaggggaaaattacaataaaaattttctaatctttacctctattaaactaattcataccttactaatactggacccctgatattgttataccaagacagattttctctagataagggagggatggaacaaagaaacaaagaagacccaaaattcatcctgctacaagaatattcttgagtcatataaaacatctgcctatattttaataaagcacattatactcctctaggcagatatgtgctgacaatatctttaaatagagaaaatgataaaagaggcagtcttcagaaagctaaaggtctaaagaaagctttatttgttgaattttttcctcatgctttgcataagatctgttaaatggcaagatggaattgtatattgcttttagaaaagctcactggatgcattaaagttctttataaacttaaatttaattttgttgactttcagttttgcactttcaagttggcatattaaaatccaacactgttttctgtgatcactggaacattttactgatattctgactcatatacctagccaggtacaacttcttttttaattcacataaggatctgtggatttggatgttactgaagctgttaaaaccatccacaaactcttccctgtttaaagcctttcctgtatgcactctcatttactatggtaatttaccaccgatttttaaacatttagaatatgaataatctttctatttatgcataaggaagcgtttcctccgtgaagccccacaactatttttattctgcagatcatatgctatgctaatttaaatctttttttttttaataaatttagaacttgtatctttaaagtttcccaggggatttagtcactccatggagcaaaatatgttctgaagagttgacatctttattgatttaaggcagttgtaactccaataatataaatctgaaattcttagtcccactttataatcaccattgatggcaattaaaaataaatgctacccattagaaaccactgtgggcaaataattttctcatgtgcaaaataaatgtaggcatttatgaaaatagccaagcatgtggtatattagaaacgaactgttaatcagtgtctaggctggtggactatctcatttcttttctagcaactgaataaagcccctgtaagagcggattatgtttatattccaaaagaaaacatttacagataattataacttccctcatgaagtgactcctgtctgtgtgtgtgtgtgttgtcttttgcagaaaatccattctcgggtctatgctgttcagcatgacattacagagtgagcctcccgtagaaatgataactccaggagtgtgggatgtaagtcagccatccccggtgaccctgcaggtaagtgccaggctaaaagattaaagtacacatggcaagtattggttgatamgtagtttgttgtcaattatagaaacaatttcttccaggatcacacattttaatagccttctctgcctccagccttctgggatttgtgaaacctctactgcttttatgtacagtactctcaaagcacttttctcccagcttatataatggcaatttcaaaccattctccatcctacaaggtcatgttggagaactatggagtgttgccattagtatactcattatgggcattcattttctttctattgtctaaaaacagtcattggtatgtattattaacttggtatcctactcacacctgcctctgctttgtgtcatatttctttaaaatctcttctgttatatgtttcttaaaatgactagcaattaactgagtagtagaaaaaaaactgcaaagtaattatccttctttttttcttaaagtctctctactctgtgtgattagtgatcataaaagaaaggtggtaaatgacttcagcctttggtccttactgctgacagctccttatgggttcctgattgtagtttgtcaggttggttggaaacgtgaggcatgcacagtctcatacacggaaattcatggaatatgaacttttcatctctataggaaaaattagaaaatgctctctgggcagcaccctctagaacagagtttttcagctttaccagtgttgacattctggacaagagaatgctttgtggtgggggctgctctgtgtatttcaggatgtttagcaacatccccggcttctttccactagatgcctgaggcactttctcattctgaaaatcaaagaatgtctccagatattgtcaaatgtgatttgagaaaaggatttcctcagctgacatcactgctctagaagaagtcagtagagtctccaggctcttaagtttccaggcttgtggtgaggggtttgggacatagagttgagaaagatgcgcagaaaaatatttaacatggaaaggaaaaattaatgctactaaaatatggcatcacactcttgcagaggaagattcgaccacgtgacacctaaaggtccacttctaatctgtggacatgttaaaaaagaatgcttattcagattagatcttggcacaatatcatagacactccacacacgatatcttatcaattagcacttgttctgttttaaaagaacaaaaagataaatatatccatgaataaagaggagagactcatcacaaacccggtaaacatattctactaatgaagaaaaatagcaaaatgccagaggttcaattcaatcacatttgattcatgttttacatatgactactatgctccaaacattatggtaaacactcttacaaaaatgagcgaatatgtaatactaagccaggaattcaaggaatgcaaaatccagctggagagacagactttcgcaactcactctgatgtaatgtgacagatactatagccattgtagggacactaacacagcgagaatagcaatgaatatttctgagggaaagtaaagaaatgtaaaaagtctggggacagacacccagaggacatgacatttgaatgccctttctagaatgagtaaattctcactaacgagtttaagtgggaaggattatccagtcataaaggaatgcacaatgcaaacacacagattcagaaaagagttggcagtttcaaaatatggcaagttagttaagattaaagaataaattatgtgaggaacagtggtaaaaagtggaaaatctttagggcactagattgtgtaccaggtttggacatgattatctgggcagtaagtcataaaaagtagttccagcaatgttgtagaaaatgccttaaaaaaacaggaagatcggatatgtgaacacttgttttggtttgggtttgggtgttttttttttgagacagaggctcactctgtcaccgaggctggagtgtaatggaataaacatagctcactgcagcctccaccttctggggtccaatgatcctgtcatcttagcctcccaagtagctggaaccacaagtgcatgccaccttgccctgttatttttattattattattattttttttttttttgtagagatgggagtctcactatgttgctcatgctggtcttgaactcctgacctcaagcaatcctcctgccccagcatcccaacgagctgggattacaggcgtgagccactgcacccagcctggacatttattagaagaatattttagtgatctaagttaaggatcatagggccaaaaactaagaaaaaacaattaagtggtagattttagaaactttttttaaacagaaaggggtgcaaccatatgaaggaaatatatagggaaacagagacagaaacttgagttcctgagttcatagcaatatcttcagttttaagaatgaacacagagaaaagatagacagtcttcaacagagtaatatgaagaactcagtttgagataccttgcattttatataggcctgtggggtgtgtaagtgtagatataagtgatctttctttaagaagacaaatgtattttctatcaaactatttcttgacaggtccaaaccaccttagcttaatgaaaattttcaagtatgaccattgtcagagttttgtggatataaattcatgattttaaggttctatggggcagagaagagtgatggtggtagaagaaggagaagaaggtctatcagatgagactatccttgattcttctcagatgaggtaaatagttcctttatcaacatagattttagcaagtggaatttgaaggaaaacttcaaatattcaatagtggcaccgatttccacgtaaagatctggatccataatagaattcatcttagaaataagtggaagaggggcatgtaaatcattccacagtatgcgaaagttaaaccatcccatttttacaaaataatttcaaattgtatagacacatgaaaagcctctcagcatgattttaattggtgatgcaatatataaaataagagttattaaggtagtaaaggcaaaacctttaatagtatcagtttaattaaatagtcagctaaatttagagcagaatctttcaacctaaagattatgagatggtgaaattacaaccaagttctgcatccagtgtttcgttagggagttagtatgagtctcggggaaagacatctggctgagttagaaaatctggattctagtcttccttttacagaaaactttatgaccttgaacaagtcacctaacctattttatcctctgcataatgaaaagattatactaagcctacctgacttcacttttccgattgtcctcattagatggtggttactgccacactgcagccactccagtatgacaagggatgtaatatgacacagatgtgatcacttccaggcaatacttttttcaggtcctatggttgattgatgtgccgaccggaagcagtcgacagagtgaaatagattttagttcagaagtggaggcagataatacataagttactgcttgactcacttagcctgggtctccttcaacttcctgcctctccccgaatgcaatctagtggaacagctctgtcacatatttaagcacgaaatgcagagctgtttcatagaattcatgcggttcttgttctagtctatgtttctttattattattattatttggagatgaattctcactctgtcgcccaggctggagtgcagtggcgcgatctcggctcactgcaacctcctcctcccaggctcaagcaattctcctgcctcagcctcccaagtagctgggattacaggtgtgcgccaccatgcccagctaatttttgtatcttagtagatacggtttcaccatgrtggccaagttggtttcgaactcctgacctcaggtaatccacctatctcggacccccaaagtgctgggatctatgtttctctacttcctcacctccccgtttgtatctacaatcactgtattctggcttgccaccactcttaactgtggttaggtacctgctagttcctaggtgccaaacccagtgatggttttcagtcctcatcaggctagccctccctctgctcttcttggcactgtctgtctcttccccataactgaactccctcctcttcttcaaagagactgaactttctccctcctccttccacagaaccaaaccccctcctcctctggctttggtgttactgccctcggttatctccttccactgctctctgatcatcctttgtctccttcccaggctctcaccaaagacaattctcaaaggttccagtctgcagcccgctgccgtgcacagtggacatattctccctggatgctctcattcatttagtttcttttaaaaaacagctttcttgagatgtaattcacataccatactatcctcccatttaaagtgtgcgattcagtagtttttagtattttcacagatatgtgcgactatcactgcagtcaatttcagatcatttccatcacatcaaaaaagaaatcccataccccttagctctcacctcctattcccccaatcctaagcaaccactaatcttctttctatctctgtcaatttgactgtttggggcatttcatttaaatggaatcatacaatgtgtgatcttatttgtggccagcttctgtcacttagcataatattttcaaagtgcatccaggtggtagcsccgattgggattcattcctttttctatattacagatacatttttatacaataatattacattattgtaatatgcacatatgaatataccctattttatttattaatttatccgtcaatgtacatttggattctttccactatttagctattaagaatattgctgttatgaacatgtatggacatgtttttgtgtgaacatatgttttcatctttcttgaatatgtacttagccatggaattactgggtctcatacatttctaaggttcttgtctcaatatctgtgtaagtgcacttctgagtctgtatctctagttcagacttcttcacacatcaagcttcagacaaatatagccacatacttgctgaaacccccacctggatattctattggcagcttcaaacgaaacatgccccaaacggagcccacttcctctccaaaattactttcaccctctgaattctttatgtctgttcatgccccacatacacctacctgattttcttgtctccttccttctttctctctactcatatccggtccatactatatcctgccaatttatattctatatttttattgtctatcctctcaattcctcacctcatctgctggtttccttggctttagttttgtcattctctaatccaaaatttatacagtcacaagggtgattcttctaaaacttaaatctgaacctgccagttccctgcttagactcttcaataactcagcactacccagaggattaaggccaacctctgtagcatgacccctgtcccatcgcttctcttgccagtccctgtttgacacttcaagcttcaataactttgaaaatactgtcgtttctgacatgcactgtcttgctttcaccttatgtgaatttatgaatactgttccctgtctataatgtgccctcgccccttcaccctccactgtccacccctcctctgactctgtgtaaatgagattcatctttttccacccacggaccctctagaaatctctcccttaccccctccactcttctcacaccaagcaaagttaagtgcccttcttctatgttcacgtaatacccaatagcatttttatcaacacatttatcacttcgtattccttcccactgactgagtgatctctgatggcattgaaggtattatatcacaaacatctagcacagtagttggaataatgtttttgttaaattaatgatatgtatccatatttctgatgactacaaaaacactgcccacacgtatgtctcaatttagccctttggtccacttatctgaacctgaataccaaaatgtttggctcttccttttatctaagcaagacgtctccttaaaccacagaccttactcactcattcgaagtattttactttttctaacattttagtacatgcttatattccattatcgtcagcgttaggaagaagcaccagtcttatcattgatacaaagtttttagaacacattgtatttttatttctaatgtaacggagatccttttttttttctcactccaaaaccaccatatggatccctcttttacaactccttttttcagactcaccacaattgccacccagttagcagttatctttccttcctctgaactgcaatagaactcatggtctaacatacgtatgtcttttcttttctttttttcttttttatgagacagtgtctcactccatcacccaagctggagggcagtggcgtgacctcagctcactgcaacctccacctccatggttcaagcgattctctcttgtgcctcagcctcccaagtagctggaattacaggtgcatgccaccatgcccagcttatttttgtatttttagtagacacacggtttcaccatgttggccaggctggtcttgaactcctaacctcaagtgatctgtctgcctcagtctcccaaagtcctgagattacaggcatgagacaccatgcccagcacgtgtgtcttataataccaacctacgcacagtccaagtggaagttctttgaataatctgacagaatcatgggaacccaaaattggcccaggggcaccttatgggtatggttgtggggcatggacgctagggacattcacaacagctcccgtgagcagtgccaagtaatgaagccatagtagaaatcatggtggccaactgtgaatgacaaaggatgagcagaagaagtgaagcaagatggataaatggaacacaagaagttgatatccaaatgtgtaaggagctgtgaattagaagggaggataaccaggtttgaatatgttcctctatcccccccaaaaaaacatatttttgttgctgttgttgttgttgctgttgttaaaataaggagtgcatcctcaaggcttagccaggaatgtgagaaatagatgtcatggcgcatgcaatgttgacatttgaatagatctcctgaagcgttcctttcaaaagaaatttgaagccaggtgcggtggctcacgcctgtaatccaagcactttgggaggccgaggcgggtggatcacaaggtcaggagatcgagtccatcctggctaacatggtgaaaccccgtctctactaaaaatacaaaaaaattagctgggtgtggtggtgggcacctgtagtcccagctactggggaggctgaggcaggagaatggcgtgaacccggcaggtggagcttgcagtgagccgaaatggtgccactgcactccagcctgggcaacagagtgagactccatctcaaaaaaaaaaaaaagaaatttgagaccaaagccaggcttggtcagccacagccatagaaggagaaagaacagagctgagtgtttgtcagtactgaaagcacaacaatgaagcgcagctttggggtgctatgtatttattattccctattttaattgttaatgtgtgcgccttttctcctcaattaaactttaagttatcagaaaataatagatattacttatatctttcattatgtatggtgcttaaaagtgttctaaagcaaatgcattaaagcatagttttggggaagttttctcttataaaaagtagaaaaggcaactaggaaaaattccaatattttctatagtaactcaagaatcagtagctatttagcctcataattcatgaaaaaatgcaatttgataaaagatctcacgtatcagaaatgaaaattgtttcctaagtgaaatatacacaaataatttattataggtttgtacacaggaattcttttgtatgctcatctacctttctcagttttctcatctaccatgccatttacttagtatcaacataaaattatactaactcattaagagctatttaaaaatatttgtccatataaagagtagcatgtaacttgctcgtactggatgcccttcccctctaaggtaccaaagttcatctttcaagattaatctttgtcaagaggcaaactttgttgtaatgtttcagttaagctgatctcgtacttgtttattttatcatgttggagtagtaattgatatattgtaacacagattatatcaaaaacaaaacttataacaaacgttagaggttatagaatgaaattactaaaactttttcaaataaataagcgctcaaatatattaaactgtatttcaaactgaaactcacaccatctactttgtaaggttcctcaattttttctgagattccaacctaacataactcagcagagaaaaataatgtctgtgggatctctaatattaaaatgaaaaaaacccagtatgtgtgataaccttaagcaaacctatggagccctagaatatccagcttatttacatagcctggaactgtctttttgttaactgtaattttatttactaatcagattctgaatcactgaaacatggtttaacagaaagtagactgagccagaaaaaaaaggaggctggattctagaactgtctataaatctgaactacagaaccaaagcagaaatattctatttgattttttactaacacaacagttctttaccaaagaagagctcactcatgtgtacataatgattctcagacttgcaaatttcatgaactagagatcaatatagattaactctattttttcaggcgggttacatgaaaaaagcataattaccaatgttaaatttcatcatttcgtaaggagacattttaacaccgaaatgtaaaaaggatataatgttagcattaaccaaaaatgtaacatattaatctttatggagagaccatatattattatttctctcattttccctcagacaacattaccggtgacccatctataccatttgtatacataattggctaaataacttgtatatttaaatcctaagtccaacctctaataattattttagaaattattttaaaattataaatagcacagaaaaaatagaatttattctgttctttagtttctataaatctaagataggaatattaaatcaataatgtattttgagacaccttcaacacatggcaaatcattttttttctttcagattgattttccagctactgggtgggagtatatgaaacctgattctgaagagaatagaagtaatcttgaagagccactaaaggagtgtataaaacatattgccagactttcacagaaacagactcccctactgtaagtgacctaggtcttgtgaatgaatttttgcctgctgtttatgatttcctcaatcattcttgaagcatgatagcttcaaagagtgagtgttccttcctacataactggtttcatttcctgatgtcatgcttcttggatggttaattaatgtttaggacgtaaataagtaattttgtctgcttttaacgatttatttcctgtggtcttaaggaaaagtaaaaagtttggaagttattcagttcaaaataacaaagcagagagtgatcatatatacatcagcacatagcagtgataaaccatctctcaaccttccttccaggaggtagaaagttgttttagtcaacagggaaaagcaacatttaattaaggcagatttttaaaaagagcagaaaagaaataagtcttgttttaacagcacaaattagtgactaaggagtactttgtaaaataataattctttgaatagaaccaaaatcccaggaagaactagtagggaattagtggcatttgtagttgatacttggcaaaatgcatgtcacagctgatcatgctcattaataacaagccaagggcatcaaactgagaaagtgtctctctctctctatctctttgtgygtgtatgtgtgtgtgtgtgagagagagagagagagattaagatatgtaacatgataacagactttactccaagagtgaaaattaatgtaaaggttttaaacaagggaatcatgtgaccagaaaaatcttgagtgatacctttgaygacaagttgaagaatggattggagtggacgtgacagtagaagcaagcagtgcagcaaggaggtgaatgtaacagtttaggcaagaggccatgatggctagaactaagatgatagcagtggatattcatagaagtggctagatttgggagacatattttggcagttgagaagacataacttgatgattaattagaattttggagtaagtcccttaagaaattaaagaatcaaggttaagtcaatagagagtccaaatcaactgggcagatggtagtcattttctggaggaggaattagtttgggccctcccatactagggcactgagtgcratcaggagttttcttttgagtaatcttgctactttcctactctctaatttcaatatttattactgtttttctcattcacttcaagccagtaacatcaaactcctttttaaacttcaaatgtgctagtcctgctcccatctcaaggcctttttatttgatattccctctgcctgaaaaactgtttcctaagttcttcacattactaaattatctcatcctttaggctttcacttaaatgtcacctcaaaaagtccttctttggccactctatgtgatgaagccttttttccctcactctctatcatattaccttttatgttataacacttaacacaagctattatcctgcccactcatgtgtttagctcttgtccccctcattaatttgcaagaackggaaraagtaaggaacctatctttcttgtttatcactatatttctaatgctatacactgataacaatgtgtgtgaataaatagattataaggactgaattgaccttgcatagtttctggtataaaaagyygccttaagaactgaagatgacagaarattctcatagtcttcatgacacatatattgacaatccattgtcatactagactattgtcatcttaactagatgaagcatctttttctgtcttacttgaaaatgtaaaaccgtgtgttcaacaagtgtgccacaaataagaggctagcatatttacacttagaggtttttaatatgaaaaagatgccttgaaattttaaatatattcaagcaaaaagaggtcaaaaccaacaaataataatcatggtaactccctttaaatatcagaggtttgtgtttttaaattaaccctggtgatttctaattgttttatatttcagtttctatttaagctaataacactcataaaataagcaacattttcctctgtttcacccactcaaataaaattattaatgatcagtgtggtgcagttttattctggactgtgaaaatagatggagaacagccttcaatgtggtgaaacttgtgttagaatcagattaacctcagtttcccagtaccacattttatcatttagttgatgacttaattattccttctttcaaactgaccaaaagtaatcagagtgaggaagttcagactcaatgaaactcagtgaaaatatgcctgtgatatttgtaaaaaataaaaattgaaaaaaaaacttcttgatgtcaaccaaaaaatgcttccaaatctaaagaccccagaatgaaatatataacaatatatgttctaaaatagattagtacttctacttctaccatgaagaatacctagtgcaagactaacccccatgactgacagaattatgacaagagaaaaatagatacgaagcaactgttttcataaattaaacagacaggacttgaggtaagccttgggattaaagtggctttcagcctggagtcactttctatacctgggtcctcccacatgacttgcgaaggtagaatataagaagagaatgcagctcctgctgagatatttttaaaaaggcagaatttagagttcagtgatgctgaggcagctggcatcttcagagcatcatactggagagcaggatgagagctacagaaatctgtattggagtcttcttaaatatttggttgagtgctaaactactcaactttccaggtggaaactttccagggcctacaagagaactgcttcagggagatgtaaaataaatgtgatttgagaagccacacaatgctgggagacatagaaattctgaccaataagaatggagaaagctcacaggctgtcccttacatttaataaagaaaccaaaaagatgcacattaggattaagtccactctagccctagattaaagactgtagtagactcaacctaacaaatcataaaaaccagtctcaaaaaaattaggctgatcttccagtaattgaactgtctactaaaaaaaatgagatctgacccctgaaaaatagcagaatgctgactctcaataatgtacttttctaaatgtctagcatatgatcaataattgagaaaactattggaaaatgtctagcatacagtcagtaactaggaaaataattggaaagaatcaggaaaatataaacatagcctggggagaggaagtggttaatagaaacagatccaaagagttttaaattagcaaataattattccaatacagctattataaagatatttattgattttttaaaaagatgtatatgaatgaacaaatgaagaatcttattaaaaatggaaatttaagaactgaaaacacaatacctaaaatatttgtttaaaaaatcagcaaatgggcttaatagattgtgaaatgcaagaaaaaaagaacggtgagcttgaagacagggcaataggaattatcccccatgttgaggtacaaaaagaaaataaaccttgaaaataatgagagcgccttgtaacctgagggacaatatcaaacaatatgtgtgtattggacacaccaaaaaggagaaagatagtgaggcaaaaaataattaaggagatggccaaattttacaaatttgatttaaaaaaaattaacctacaaatataagaagtaaaaggcttagtaatccctaagcaaatacatactctccctttctttctttcttttctttctctttctttcttctttttctttctttctttctttgtttctttcattttctctttccttccttctttccctgcctctttcattccttctttctttctttctttcattctttctttctctctttcccttctttctttctctctctctctcacacacacgcacacacaacaaacacccccaggtaccttatagagaaattgctgaaaaataagataaatttaaaaattttgaaacatcagataaaataaacaaattccatatagagaaacaactataatattaatattatgatgttctatataaaacactaaatacaggcctctcatcaaaaaaaaaatcaagacaaaaggaggttgaatactatctttgtgttaaagatgaaaacaactttttcaaattagaactctatacacagtaaaattatgttgcaaaaattaaggccaaatgaagatattttcaaccaaatccagctgagttagtttagtataagttcatccgtactatacaaaatagtaaaagaagtacatcaagctggaagaaaatcatactagatggaaactcaaattggtaagaagaaatgaaaaataccccaaaatatgtaaataaataaaaacagtttcatttacacatttattaatttatttaaaaagtgattgaagaaaaatgaatcacaatgtactctggtttataatgtataaaaaataaaatttataataacttcaataagaatgaaaatggaaaatggaagtaaactgttccaagtttttcatattatatgtaaggatgcataatgttaattcatggttggctgtaatatgcttaaacaaaggatattttaatctctaggaaaaccacaccccttaaattttaagagtatatttaaaaaccaaggagaagataaaaatgaaatataacaggaaaaaaatatgaaaggaaacataaaaaagaaaaaaggggaccaagaaatggtttagacaaacaaagaaaaaaacacgccatagaaactaatagcagtacagtgagcctttggtatggttaggtaatcatatcaataagacattaaatgtaaatgcactaagaactcaaattaaaaagcagaaattgtcagcctacatcaaaaaagcaatatataattttattctgtttacaggaacatgtatataagcaattagattttatatataagcatttatatataagcaattagattaaacattttatatataagcaattagattaaaagtaaaagaataatactttccaggaaaatcctatcaccttgctagatctaggaaaaaaagtggtaaagttcagcacccattcatgataaaaactcacaaaactagacatagaatgaaactttctcaaccttgaaaagtgatctatgaaaagtttatagttagtatcatgttaaatcatgcaagaatgaatgctttctcctaaggttagaaacaaagccacgatgtctgcttcaaacatttctttaatgttgtattggaaatcctagccagcacacaatgtgaaaaaaaaattaaggtaaaaattaaaaagaaagaaataaaactgactatttttacatagcatgattatgtaaaggtcacagcatttgagatcaatgtacaagatctaattgtgttccagtaaaaatatatataaaataaattctgttttgaaatgttacttactgtaacaaaattttatttactaaaatttagtaaattatttaataaaattttatttacagaaaagtgcaaaactttcctaaggaaaattaaagaaaatctaaataaatgaaaaaatatactacatttattgattgaaagattcctgtggttaagatgataattctctccaaactcatctataaataaaatataatcccaatgaaaatcccagcaggtttttgtagaaattaaaaagctgactccaatatttatgtggaatgcaaaagarcctagaatagtcaaagcaatcatgaaaaaagaacaaagtctcacttcataacttgtatggattcatgtactataaatttacagcaattaagataatgtgatattgcttaaggacaggcaaatagatcaacagaatacaattcaatgtagatagaatagaaagccagagacctatttgtatgttcaatttatttttgacaaggccacccatgcaataaatgaaaaatgtactttcagcaagtaaaatactgctttcagaatacttcagaaaaaatcacaagaatcaatgttaagataggcaatgttttcttaaacaaataaagaaagtaataactatttaaaagtttctgaattggacattatcaaaatttaaaactattcatgaaaagaccccattaaagaaatctataggcaagccacattctgagaaaaatatgtgcaaaacatttatatggcaaaatttttgtattcagagtatataaagaaatcatgcaaatgaatctaaacaaacaaaaaaattgggaaaatacatgagcagagagttcaaacaaaatatataagaagatagtatatgaagaattgcctagaccccaagtaaatataaattagaagcacaatgagataccactatacacccattggaatggataacattgtaaagacagacaaaatcaagagttggcaagaatgtggtacaaatggaactatcatactctgcaggcaatagtgtaaaattttacaattacttcagaaaacagtttcacaatttcttgtaaagataaatacctaacatataaccatgtccttcctctcatagatatttcctaggagaaatgaaaaatacattcatataaaaacttgtgcacaaatgatcacagcacctttattcataatacccccccaaaaggaagcaacccaaatgtccatcaaataggagagtgaataagtaaattatggcatagttatacaaaggaataatattcattaattaaaaggaattaactattgacaaactcaaccaatatggataatttcaaaaacattatatgatggagtgaaagaagccataaataaaaacatatttactctatgattccatttatatgaggttctaaaaggttaatatttatcaagagagaaaaaaatgataccagtgcttgcctctgatgacatcaacaaaactattttatatcttgataggagtgtggttgttatctggtacatgcatttgtaaaaatttattgaactgaagctgcggaatgtccttgaatgtgaatttgctttaacaaaaagagctaaaaaaaagaaagaaagcattgttcagtattggggaaaaaaatttaatctgagcaaatatgttttagtaattttactatggattttttttcttctgtgggcttttcagaggaaaaggtggtagcaaaatataaaaaaaggaacctaaccacaccttcaaaatcacctataatccagtcttttctttttacagatgaggaaaactttaaaatgaattatagagaaagatagacctttaaaagatttttttatgtttcattagctttcttgggagtttcagcagattcaagctcagtgtcactttggaggagagtgcgcaaaagccattgtcgtgtgagggaagctgtcctccaattgaactgtggttctgaatacttctactggagtgtgagcaaaacatgataaattgtcagcaagtcaaggccctagtcctagatttagatcttttatttcagactactctccaggggcaaatacttgagcatctaagaaactagcatcaatgacattttcacgccaaacttcccatgaactctgaacatttaaagacataatccagggatgaattgagatctttgtttttgaagttaacaacagcaaagatttcttaactccgataaaacttgctttaagatgaagaaatatcattactaaaatatgccattttggccgggcgcagtggctcacgcctgtaatcccagcactttgggaggccgaggcgggcggatcacgaggtcaggagatcgagaccatcccggctaaaacggtgaaaccccgtctctactaaaaatacaaaaaattagccgggcgtagtggcgggcgcctgtagtcccagctacttgggaggctgaggcaggagaatggcgtgaacccgggaggcggagcttgcagtgagccgagatcccgccactgcactccagcctgggtgacagagcgagactccgtctcaaaaaaaaaaaaaaaatatgccattttttcacaggcccacttggatctcagttaatttataaaaaataaaaaaaataagaaagtaaacggttgattacctctgttctaaataggatgtgtcgcaggattcagaaaaacttggttttccctagaggagagagattttgccaaccaaaatgacatattaaaaaaaaaaaacacgaataagagtgaacaaaaataaatgtgagttatctgaattgatgttatttttttcaaaataataatacaaaagaataaagttagtggaaaataaactgatgaaataacctatgaaaatatccgaagaaggtaaaagatgtttttgaaagtaaactaaaataaaattcaaagaactacagtaaggttttctactgcatatttatagcaacatttgttagtgcagcaaactccagtaaattacagtttccaatctggtttttcagactctctgaagaaaagaaaagatatttatggttttatcgcttctactgcaataatgaaaactgctcccttcctttagtcctgggtagtgcccctggatgggatgaaaggactgtttcagaaatgcataccattttgagaagatggacattttctcaacctttagaggctcttgggcttttgacttccaggtaagaattgcataacaagcatgatattactgactgagaagaacttgcttgaagagaactatagaaccatataattaattcaatagctattctgtttgttctcaattttgatagttatggatattaattttagataaatgtaagctatgaatataaattttaaacaaatctaagctataatcatgtctgctgccctaagcttgtagtataataaattgtagaagtttcttaaatgaggattctagttcttacagaaataatttaattaagcagggaaaaataaaaatccctacttcttctctcaaactaaaaatgtctttaaaaattaggatcatttttgtactattaaaatatgcaaagtttagcaaaatgccctgtgtaaagtagttgtacaattaatatgataatgatgatgataggaataaaagaaaaaaatctattccttgcatgtccttgagatcttcactcagaatcaaatgcatggagcaccaggaaagggctaatgatgtcttcctgttaaggagaagcttgtaggaacaactgtggtagctggctctggtccaggagaaacaagtcttccttggttttccttttatattcaaagccaagaaaagatattttaagtttgtcctgatagcatcagctcactgatgccatgaagaaagtctgcaatctcttgagccaggcaaaaaattgtgaaaccccgctctattctgaatccattctcaagaacccaagaggagaagaaaggtgggaaagggagttacatgaagaactttcttcatgtaacctaaactgacttttaaagatttatttaccaatgagtgtccttcagaaaacttctggggtgggtaaaggggagagtgggtttttcttattatttgtaagagttactagcttctcagtcacccaagctcgaaatttacatactatttttgtactcctcactttgaagattttattagttttatggcttcttccattaactgatgtgtgctcggatgcctacctctttctttatatatataatggaatatatatatttatatttgtttctatttgagcttgcaacttttttcttttgtaagccttcttgtgtggggtcttctctgaccttgccatgtagaattgatcactcctggactagtacagtgctctgttactttacacattgcattttatggtaatgtgtttatatgcaacaggtaaaatgtgtatattttcactcacatctgactcagagctactcaaggcaaaacagatcatctcaatgtttctgtttcctgaaggcttagtattacctaggacgtagtaattcctcagtattgaaccaatcactttctaagatgcattattattatttttacagtagtttaactttaaattataagcaatttgaggatattatcattattatttatttcctacatgactttgtgcagttgcattagttaataaaatagtcatgtggtaattaacaattgattggtttcattgggatattcacaattcatcatgctagtgtttaaagatccttttggaaaaaaggtctcattcccaacatgatcctacccctttttctggtttagatgtaagaacagctaaaatctgtaaaattgttatgctaaattctagccggtttttgctgaagttagacttgggctattagcacaattattattttgtcattcttgagttgattawctaatagagaattcattcaaaatgtgacagtcacaactgacagaataagagaaaataaatatctgacaaggaaattttattcaaaacatataaagactcttaaaactcaacaatagaaagataaataacccaactgtaaaatggacaaaggctctgcatgggcatttctccaaagaaaatacacaaatgccgaacatttacatgaaaatatgctcaatatcattagccattaaggaaataaaaatgaaaatcacctaacacctaagataccatactcactaggtctggctataatcaaaagatacaaaaaggacaaaaaataaaaagtgttgatgaggatatggagaaattggaaacctcatttacctctggtgggaatgcaaaattgtgtagccaattggaaaacagtgtgacagtttcttaagtgttaaacccagagttactatatgacccaacaatcttactatgaagtatatactcaagataaatttaaaaatatgcccactcaaaaactcatgcacgcatgtttgtaacaacattattcacaatagccaaaaagtagaaacaatccaaatatccaccaactaatcaatagatatgtaaaatgtgatctatccatacaacataatattatttgataataaaaaggaatgaatactgatatatgctacaacatggaaggaccttgacagcattatgctaagtgaaagaagccagttacagaagaccacatatggtatgattccacttgtatgaaatgtgcagaataggcaaagctctacagacagaaagtaaattagcagtaacccagagcgagggcaagttgggagaaaatggagattgactgctaatgggtatgaggtttccttttgtggttataattgatataattgttgcacaaatctggaaacatgctaaaaacattgaattgtgcactttaaatggggtggattgtatggtatttcaatatcgtggtaaaggtgtttaaaatttttgagaaaataattgtgaaggtaatatctatgaatctctctaatatctttaaagaataattttctaacaagataactttccaaagtttaaagttcatggaatattttttagaaaaatctttaatagaatgagattgtaatactgctctgtttactcacttattaaataagaggattagctggatgaacttcaatatcctctgatccctgataactaagcagaattatgcttcgtgagtcttctttatctaaacagatcttcaaaatctgtttggctcattcaatgttttatgtgtccagataaaatttttacttagtgccccttagtactatctcatattaacatccataacaaccttatgatggaaatactattattattcctattttacatatgaggaaactgaggcctatagaggttatgttgcctcaagtgccctgtaagttgaaaacctgggaatcaaatccaggcattcatgagagcttataatctgaaccattctgtttaaagccttcctgcataaacatgctaggctatttacatatgaaatatcttggctatcctaaacggttttttaaaattgtaaataggagcacttagcgatctcggtcatgctcagatgtttctacttcactgtgtaatttctttttttctgaataatcagatttttagaggttatggggactgattttaaagtagaaggtgtttattaaacttcattcagggaacttagtagaatcctgatttatttacacactggaaagtttcttatcatgcaccaaataaggtcactgcaaatgttggagtatttccattgtactcatcctctgactcccactctcagttttactgaactattaaaaaacttgaggacaagctgtttccagaaatgaacctttcaactcctctaaattaaaaagctgacttttctgagaacaaacagtatgtgcttattaagtgagttgtcagagtgagtacttgagagatctrtatttttcctcctttgaacaatctatttttttaaatggtttaacctcttgacaactggtgtgctccatttccagcttggggagtttttaatattgctatttacttaatctgtccaaaggttcaccatctccttttactttaattttagcaagaggcatgatgaaatttaatttacctaggatgggccatacagtgttaatatttctactactgagtgccagcagagagctccctgggtactgataacttccattagagaagggggtgctgtcaggaaaacagagaccaagggctaaggtctgtggttcctggcagatggttgctattttcctgaaccctcattcccaggcacaactattcaactgctaataacaagcaaaaattacccaaggaattaaaagtcagttcaaggaaagtattcatttaaaaatagcaactttgaattggcatcagaggattacatcagaagcttaaataaaaatttgacaaggtatgagaacttgccatcccacatgatgtaaaattattgttttgcaagaagaaaagcaatatttaacagaacagtgccttagcttccaaaattaggttccttggaaaaatatttccaaaatattttttttctccaaaccattgtattctttattgtacatttaatttatactgatgccattgtttactaacattgtaaatagaaagaatggaatatggcatagggaggcagttaaaactctcacatttgactgattaaattatgaatgatggtgtatcttttccatttatttattgaacaaaaatatgtgtacagacaaattggtaggcactgaatcaaagaggtagatgaataagccatagtgactgtctctaaacaaggtacaatttatagggagagactcaagctagaggttaccaggcaatgtgctctgtaccatcaccaaaataagtattaagtactctacgagcccaaaggagagagaggaaaattctttcaaggaaagtaaggaaaagttcacaaagaaattggattctgacttgaaatattcataggaattttctgagtggagaagcggggaaatgacattccaagaaggaagactagtgtgtgcatggttatacaggttcagaaaatagtgaatcattttatataacattagaagagaattgtatcaggaaacaaagttgaaaatggtggttcaatttagattgttttgggcctgctgagccaggtaggtactatgaacttgttatggcataccatggaattttgttaagaacaggagtcataaaatcagatttgtgttatatgtgcacaaatctggcatcagtataaagaacagattgaaaaaagaagaaaatgagagaaagaatattagatagataatagatattgaaataatccatttgaaaaatggtctgggactgaactaagaagtctaagcagtaggaacgcacaaagcagatttgagagaagtttcagaggaaagtaaaaaagagagaagaaataaggaagactttaagctttcagacctgggaaacttgatagataattgcatcattcaccaagataaaagttttagatgaaagagcaaatttacgtagtgaacgttgaaaagttctattctggatatgtcacatttttaaaaacccatgagacacatagaagaagatgcctggtatgcagttgtgtatacaggtctgaattttagcagataaatcaaaacttgaaaaacaatgtgggrgttgttggctttcaggcagtagttgaagctacggaagtagaggatgtgtgacaagtactgtgtgtagctatagagaggaagtatagaaagaggccagagatggaactctggagaacagcaacatttgtgttgttgttgttgttgttgttgttgttgttgttgttgttgagatggagtcttgctctgtctcccaggttagagtgcagtggtgcgatctcggttcacagcaacctccgcctccccgggagaacagcaacattttaagaacagtgcaaagcaagaaaaaccaggaaaataaactgaaaaaaaagtgaccaaaaggttgcaggagatccagaaaagggtggtatcttagaactcttgaaaaagattttcaaaggctttaaagaagtattaaatagaattaggtctaaaaacagattaatgaatttggaaatcaggtagtcactgatgatatcaatgagagcagttttttaaatttagttttaattgacataataattgtatatatttatgtggtacaatataatcttttgatctatatatacattgtagaaagattaaataaagctaattaacaaagtcatcatctcacaaacttatttttgtgtttagaatgttaaaaatttatttttagcaatttcaaaatatatgatacattgttattaactctgatctccacgcagtgcaatagatcacagaaatttactcctccaagctactgaaatgttgtaccctttgacaacaatctcctctttttccatttctcctctccccaaagcctctggtaaccacctttccattccgtttttatgacactgactttttcagattccacatttaagtgagattattaaaatatttgtgtttctgtgcctggcttattatacttagcataatgtcctccaagttcattcgtgctatcataaataacagaacttccttctttttaaggatgaacagtattacattgtgtgtacataccacagtgtcgttatccattcatcctttaatggacactaaggttgcttctatatcttggctattgtaaataatgctttcatgaacatgggggtacagatatctctttgacatactaattttaattcatttggatatatatccagaaatgagattactgggtcgtattttaatagtgaagttagattccatacttcaagttcctaaaaaggaatagggagatataaatggtgcctcttggaaaagaattgatgataaaggcaaaaagatagctaaagttggaagtggtcagaaaaacatgtttgatgtttggggtttgtatccctttttaaataaaagagcttccagcgtgcttacaaggtgaaaggaaggatatttgaagggaagatcagaaaagagatagataggtgaagtagcaaaatgggatggtactaacagccaacagcctggaacacaagtgcaagcaagcattttatccagggaaaagagtgtaacttcttcctctcaggtgagagggaaggaaaaatatgaatacaattatagataagtgtggatacagaagagaaaaatgtggaaatttcagtattccctatcgaggaagagtgaaggtgagaatgaagaaggtggagttatataaacacaaagatacatattttgtccttgtatgcttttggagtttcttgagttatttccagatttcacagttgataacataagctttgaaatcagacttatctggttctaccagttattccttgaatgaccttggacaagtttatttaactttaaaacaaagagtaatattatatacctcctagggttcttgtctggaacaaataaggtaaggtacatatgagagcattcaataaatgctaccaaacattcttatcatgaatccttcattataattacattttaaagagaattttcagctttcagattctttcattgccaaatgttaaatataaataaattcatgagaaatatttaatttctattaaacataaatgacttaaacacacttgttaaaacttacatgataaagagttagcatcttaataatattttataattgaaggacataatttacaaagcatttcacaatatatgacttgaaatacagaaaaacctccttaatattagtcccaacatctatttcctccattttactgatctccattttacagatgaagacattgaaacccatttgtttattcatttattcaatacgtgtatattgatggcctactcaccttagacactttgctaggccctgaaactagcaaaaagaaacatgatctttattcatggtcttgcaatcttctggaggtagataataggccattaccaaattatgagtgtaaaacaacagttgttatcacaactctgaataaaagctacataatcctatgataacatacaacaaaagaaccaaacctttcttcaaaggagaaaagtcttccttaagtaagttatattcgagctcaaatctaaaggataagtgggaatgaattgacaaaagggaaagattaagagaaggattttccgggaagaaagaacttaaatatgactaagtcttgagacaggaactgcacataggaaactggaagagagacagtgtagctgaagtccaggggaggagtacatgatttaagatgaactgacatttgaaggtcaaactagaagaccatgttgaggacttctaaagcaggaccaagttgggcaaattggcctttatgctagtagcaacagtaaggcataaatgattctaagtaacagaatattttgaacagatttgcatctcttaaagatcactctggtttctgagtgaagcatagatttggtgaggaaagcaaaaataaatgagcttccattaagtctttgcccatgactatgttcygaatggtattgcctaggttttcttctagggtttttatggttttaggtcttatgtttaagtctttaatctatgttgagtcaatttttgtataaggtgtaaagaagggatccagttttagctttctggatatggctaaccagttttcccaacaccatttattaaatagggaatcctttcccattgcttgtttgtgtcaggtttgtcaaagatcagatggttgtagatgtctggcattatttctgaggyctctgttctgttccattggtctttatatctgttttggtaccagtaccatgctgtttttattatggwagccttgtagtatagtttgaagtcaggtagcatgatgcttccagctttgttctttttgcttaggattgtctttaacaaaagccaaaacagacaaatgggatctaattaaactaaagagcttctgcacagcaaaagaaactattatcagagtgaaaaagcaacctacagaatgggagaaaatttttgtaatctagccatctgacaaagggctaatattcagaatctacgaagaacttaaacaaatttaaagaaaaaagcaaacaaccccatcaaaaagtaggtgaaggacttctcaaaagaagacatttattcagccaacaaacatatgaaaaaaagcttatcataacttgtcgttagagaaatgcaaataaaaaccataatgagataccatctcaggacagttagaatggcgatcattaaaaagtcaggaaacaacagatgctggagaggatgtggggaaataggaaygcttttatactgttggtgggagtgtaaattagttcaacctttgtggaagacaatgtggcaattcctcaaggatctagaactagaaataccatttgacccagcaatcatttactgggtatatacccaaaggattataaatcattctactataaagacacatgcacatgtatgtttattgcagcactgttcacaatagtaaagacttggaaccaacccaaaggcccatcaatgatagattagataaagaaaatgaggcacatatacaccatggaatactatgcagccataaaaaaggatgagttcatgtcctttgcagggacatggatgaagctggaaaccatcattctcagcaaactaacatgagaacagaaaactaaaccccaactgttctcgcttgtaagtgggggttgaataatgmgaacacatggacacagggaggggaacatcacacaccaggacctgttggggagtgtggggctaggggagggatagcattaggagaaatacctaatgtagatgatgggttgatggatgcagcaaaccaccatggcatgtgtatacctatgtaacaaacctgcctgttctgaacatgtaccccagaacttaaagtataatttaaaaaataaaaaataaaaataagcttcctgttaggaagcaatggaagtagtttaggtgtcagagaatggcagtcatcctcggaaggtggcagcaatgatgtaattaaatgaacagaatgagaaaatgggagtgaaaatggcagaattgaatggagagggtctgtgaaaaagagatgtgtcaaggatgtattagtctgttctcacattgctataaagaaatgcctgagactgagtaatctataaagaaaaggggtttgtctcatggttttgtaggctatacaggaagcatggttggggaggcctcaggaaacttacaaccatggtggaagacaaaggggaagcaggcacaccttcacatggctgggcaggaggaagagatggggagaggtaccacacactttaaacaaccggatatcattagaactctatcactagaacagcactaaagggggaaatctgcccccatgagtgaatcacctcccacaaggccctacctccagcacactggggattacaattcaacatgagatttgggtggggacacaaatccaaaccatatcaaggctcagttctatgtttctgtcttatgtaagtaggtcataatagaaacattcaccaacatggggcacactagctgactagcaaattttagaagagccttattgttcaggccaggcatagtggctcacgcctataatcccaacactttgggaggccgaggtgaggttggcagatcatctgaggtcaggagtttgagaccagcctggccaacatggtgaaaccctgtctctactgaaaatacaaaaattagccaggcatggtggcacaggcctgtagtcccagctactcaagaggctgaggcaggagaatcacttggacctaggaggtggaggttgcagtgagccaagattgcgctactgcactccagcatgggcaacagagtgagactccatctcagaaagaaaaaaaaaaaaaaaaaagattatttttcagattaggatccattggctttgaggtgtcatgaaatagttgcatttacagatttggttgttcaaaaagtctaagctagagactccaatttgttttgtaatcatccacagaaggatgtgaattaagtgaaagatatagatgaatttgcttagagagagggaacataaggcaataaaagaacagtctcgatgtttaaactcaaaatttctatccttttcagtgcatcatgttacttttacatataatgtttatgtttagtgcatccaaacataatatctacatggtgctttcagtacactactggctttatgacagtgactttttaagattagctacatgtaaaatcaacgtgtaattatataagaggagcgaaatcaagaactgctttttaattgtaaatagcaattttaattcactaatacaatgaccatctagttaattcccaatttctatatgcaagtccatatactatccatcaggaaatatctctgtatggcttccatgtctccttcggtctgagattcattattattcctgttatatcatgactgggtcaatgtcccagtccagttagacagattacattgcttactattaaatatctttactgatccatttagaatgcaataaaataaataatatacccaagataatcttgtgatttttgtataagtaaatataaaaatatccagtcaaaaaaatgaaaagtccttgctaggggtgctgtagaaagcctaatggcctagtgttttggatatctggatgatagtttcagtgacacaaacaaatggtgttgggaaaactgcttatactccgagtttgagttttttcatctgtataaggagattaaactaggtctcaagtttctttgggttctaatattctgtaaccatataaaaatccttgaaagaacatgaattattcagtagatagacatttacaatcatcttaaaaaaatcctattcaccactttgctagaaaaaaaaattcttgtcacatctgatcatttttagtactagaaaaatagcaaagatattcatattgacatttttcttccaagctgatgctgagtgtgtcatcagactcaaaatctgttggagaaacagttctgcacttctgatgattttctaattctaacctgacattggggcttttagctgtgaatagcctcatggcatattctgcatgaattcttgctgtgtattctgaagtctgacatttccattacacttaaatttgatctcagatttctttgcttttcagtttactcaaagttgcttttttaaaaggttgacatttgttacatcgcatttggctttcacccatcacttcaaaagttctttgagtaagatattttccctatacccttttcaaactagaaaagaggaacaagtgaaaaaaacaataaggggagaaaatctaaaaaaggaatagaagtgttttttttactgtcaaatggaagaacttgaaaaatatatttttctgttgaaattttatttcatgactccaccggccctattgacatttgcctaaatcctctggatattcctacagtgctctgagatgagagggactgtaaatgtttgagaamagagaagagtaatgacgattcccaagtctgaatgttggtcagatgacttcacagataatttgagcccagagaaaacacaggctgagaaacagtccacaagtgctaattccttaacttatggccacataacaatgatccatgccaaactgtgctgtgtacatcagaggttctaaaagtgaggcctgaaatcccccaaatgcttacaggggtgttacaaggctaaaattatttccataataattctaagatgctatttgcctttgtcacactcatttgctcatgactgtagggtggggttttccaggggccacatgatttaaaataaggcaacagatttaacgtggaagcagtaagagaatccagctctctttcattaagccacatattaaagagactcgcaaaaatgtaaaacaatattactaatctcaccaaatagtctttgttttggaaatattcttttcagaaatatattatttatgttaacataaaatgggtttattaatgtgattgcaaatgaattgataaatatttcttaaatgtcctgaatttatttctaatataattattgatagatatcattcacataaaccaaaactctttgaagtcttcaataatttttaagaatgtaaaaatgtcctgatacccagcattagaaaaggccactgttgtacaacaaatcctaaccattggtcacttattacctccaccttgagctggagagttacctaaacacttggtgctcttccttccctgcacgtgtaagcattaccatttcaacttaatcctttgcttggccctccattttgtgttttaccctacattgttggcaagatatagagttgctatttcattgaagttcctttgaaaataatcatgaagttgctttaattataccttttccaccttctgagtttttagccatgtgtctttgattctttttattaacccttacaatcttagccttcatagagtatttttttctttgtctctcagtgtcttcattggacaatggcccatgttcaagtgtagataatttcttaatggttaatgtacagagttatatttatcttagcgatgagatcttgtcctttaacagattccagagactcaattgttagctcaacttggaggccaattaaatcctgaaacagagagacagagtgatttgtgtttcctccctgttaagacacatttgggaaaataaattaagtaacataaagtgcttaggtgaacacttagagaataatgaactaccttaaagaattgattattgtacatgaattcttgtcaagcctaattttaagaagtatttttttcataataaatgagaatttcttttgctttacatgatctgcttcccaagaaataatgaaattttattgacctttatcttttttatatctcaagccagatgtccatttgttacattgtaataatccattttatgattgattataaggaagtttcttataaatgtaattaaggtcctagttgacatcagcctcatgaatctcctagcagtactttgtttaagtcccatactcaaagtgtaatattcacttcaatagtaattagtagttccaaggttagcagaattgctaaagagtgtctcctggtatgatataaaggaattatatgtgcatttttcaagcaaatctaataaagcaggataacctggcttgtggaaaattcaaaataggttgtagtttttctgttacatatgacatttcagtctgtaaatatcacaccaaagtcagagaaataatgcgtagccctcacctcattgaggatcaagttactgagaatgaaatgccaacaactatatcccaaaagagtgtttaaataatttcagataatatcacagaaaagaaatgccaggatttgtggaacatatttgtccatcgatctatacctgagttcaggagccctttttgaaaaggtatcaagttaagcayaaattctccagaggtattctatgttagaagaaaattttaaggcaactaaaaagtagaatgcttgctctttcacgcaacaatgtatactcttaaaagggcatatgatttgaagcttttttctagtgttagtcatgagttcgtaattattcatatatattcattaactagttggacaagctttacttttaaaaagtattattcgttttcttagcaattaataaaactttcgtatagaaaatttgaaaaactttttaaaacttagcttaaaaaagaaaattaaagtaatctatgacacctccattcagatatttggtattaatgttttcatccttctcatctttttgttaatcatattgagagacatatacatattttaaaaatggcattatactacaaaaaatggctcttagtatttttatttcattaaacttttttactatttttaaggaatgcatatattccatcacatagttatatcatatttaatttaactattaatttttagacatttatattattcccaattttgtttgcatacacatacatatcttcacacacgtcactcatcatattcttaaaataaattcccaaaaggtaaatagatagatcaaaaaaaataagcacacttaaattttgtttttggttttgttttaatacatgttgacctatattgccaacaagtatgaaagagcccatgttgcaggaacttcagcagtactgctggcatcatttttaatgcggccaacacttcctaaaatagtcaaatgcaagctatgttcggacatgctttaatgtcaagttaggccttagtcacatctcagaatgtcatgtggttagttttatagctatttctctttcagcttcttctggaacttcaagcaatagtaataaataaacagagacatccctttccattaaagtgcaaaaaattattcccagcatttgcatatattgatacaaatacacaattttcctttttgactatataggtactgtattactaattttttgttctcctgtttttgaaagaaaaatgcaggcataccttactttattgtgctctactttactgtaattcacagatagtgtgtttttacaactgaagatttgtggcttccttgagtcaagaaaatctatcggtgaggtttttccagcagcatgtgcttactttgtgtaactatgtcccatttggaaattctcacaatatttcaagtatcattgttattattatatctgttatggtgatctgtgatcagcgattgctgatgttactattgcaattgttttgaggcaccacaaggtgcacccacagtacagagtgaacttagtccattaatgttgtgtgtgttctgactcttccacctgctggctgctccctgtctctctccctttccttgggcctccctgttccctgagaccctacaatattgaaactaggccagttaataaccctacaatggcctctaagtagtcacgtgaaaggaagagttatatgtcttccactttaaatcaaaagcctaaaacgattaagcataacgtgaaaggcatgttgaaagcttagataggctaaaagctaggcttcttgtgccaaacagttaaccaaattgtgaatgcaaaggaaaagttcttggaggaaattagaagtgctattccagtgaagacagactgataagaaagtgaaacagtcttattgctgcaagggacaaagtyggagtgatttggatataagatcaaatctcacaacattctctgaagccaaagcctaatccagagcaaggccctaactctcttcaatttcatgaaagttaagagagatgaggaaactgcagaagaaaagtttgaagctagcagagttggttcataaggtttaagaaaaaagccgggcgggcgcagtggcttatgcctgtaatcccagcactttaggaggccgaggcgggtggatcatgaggtcaggagttcaaggccagatggccaagatggtgaaaccccgtctctactgaaaatacaaaaattagctgggtgtggtggcgggtgcctaaaatcccagctactcaggaggctgaggcaggagaatcacttgaatctgggaagcagaggttgcagtgggctgagattgcaccactgcactctagcctgggcaatggagcaagactccatctcaaaaagaaaaagaaaagaaaagaaaagaaggaaggaagaaagcaarcaagccgtatttgtaacctaaaggtgaaccagaaagtgctgatgtagaagctgcagcaagttatccataagatccagctaaggtcattgaagactgtggctacactaagcaacagattttcaatatagatgaaacaaccttctattggaaaaagatgctatctaggattttcatagctagggaagataagtcaatgctgggcttcaaggcttcagaagacaagctgactctcttgttaggactatgcagctggcgattttaaattgaagccaatgctcatttactatttcaaaaatcctggggtgcttcagaattctgctaaaatgactctgcctgtactctataaatagaataacaaagcctggatgacagcacatctgtttacagcatggtttactgaatatgttaagcccactgttgaaacttactgctcagaaaaaaagattcttttcaaaatattactactcattgacaatgcacccagtcactcaagagctctgatggcgatgtatagggaggttaatgttgttttcatgcctgctaacaaaacatccattctgaagccttggatcaaggagtcattttgacttttaagtcttattatttaagaaatatgtttcataagcctacagctgccatagacagtgattccttggatggatctgggtaaattggaaaccttctggaaaggattcaccattctagatataattaagaacattggtgattcatgggaagaggtcaaaacatcaacattaacaggagtttcaagaagtagatcctaatcctcatagatgacagtaaggggttcaggtcttcagtggaggaaggaactgtagatgtggtagaacttataagtgaactagaattagaagtggagcctgaagatgtgacagaattgctgcaatctcatgacaaatttgaagggatgaggagttgcttcttatggatgagcaaaaaagagtggtttcttgagatagaatttactcctggtgaagatgctgcgaacattgttgacatgataacaaaggatttagaatcctatataaacatgattgagaaagcagtggcagggcttgaaagaattgacttcaattttgaaagaagttctactgttaataaaatgctatcaaacagcatcacatactacagaaaaatctttcatgaaaaagagtcaatcgattcaagcttcattgttgcctttattttaagaaattaccacaaccaccccaaccttcagcaaccaccatcctgatcagtccacaggcatcaacatggaccgaacaccctccaccagcaaaaagattagaacttgctgaaggcttagtttattgttagcatttcttagcaacaaagtatttttaataaaagtttttaatttaatgatttgtttgacataatgctattacacatttagtagactacagtatggtataagcagaacttttacatacattaaaaaaaacaaaaaaaaaatgtgcgactggctttattgtgatatttttactttattgtggtggtctggaaccaaacctgcaatatctctgaggtatgcctgtacatccctctctttcattgccttcagatttgtttttctcctatgcttttgacggagagaaaaaaagatctggaatttatatgagtggtatttataaaattaaacctattgcaaccaatggaaactatctcaaaacacagaaggaaataaaattgactttatagtagtatttttgtaattattatcatcatgatcaatgcatttttattcattgcaaccatatatgaagttgctaaatcctagcaataaaaaagaaaacattgaacaatcctcatcttcagttgaattagtcagtagttgaggaataaggacacatatgtaaaaagataaattctaatacacactgtcatatcttaagtgggagtcaaccagtcaatatccttggctttcagagaagtgattactaaggactaacagaggcaccttcaagggaatttgatctacattttgaaggaggactagaacttaaagaactaagggagggttttccagcagaagttacagtgtgcacaaaggtgaaaatgcacatgcattttcagagtagaatatatcaatgagccagactggttcagtgaatattaatggtagaagaaaaatctagagtgttttgctagccttgaatatttagattgcagtgtgtactaaagggaggtttattagatatagaaaaccatttaatgttttatgacaaataaaatagtttaagggatttgataaggtattactattaaaaatgttagtattagcatgaggtaattatggcctagagtagacagcagcagaagaaattaaaagcaagcattaaaggctagagccattaggatagaaaaatcaacagaactcggcaactgattagatgtaaagataagagaatactaggaattccaaaaacttttattcaactgcgcttgggctagggaaccataactaaatgagcctgccctcaatgatgtatataatatagaattttatagagaagggagttatcaactccacagggtgttaaaatattgctggaacagcttcacaggtaaattgatgcttgagcttggagttcatggatgaatagaattccatcagatgggaaaggtgaaaaaagtaataaagaggggcaaaatattacctttaacattttaagtctatgtaattggagaaaggtgataacacagactacagtgaggaaggctggtagtaaagatgtttacgtgtaacgacaatgagttcaggttgaacagtcttctaagaaatatgtagagagtgcctacaaatctgaaggcattggggacacatctatgaacaaaacagacaaaaatttactgcctttctggagtttgcattctagtggaaataaacacatagttaaagatatagcattcaccaaagagcattgttttgttgtgatgttccttttatactcctcttttgtcatttctatcaataaggtaaaatagtcacacagggaagcatgggcgactgatagctaacttaacaagtcatcacttaggcaacaaaacttacctagtaactattccctccaagacttcaaactgtcctcacactgaccttgatgtctacaagtttcagacaaatggtttagtaattgagagcaataaattagagtcaatcacatttagttaggagaatctaaagtcttaatgtactaaaacaagctgaactgcttctagctttgcattttaattgcactctttctgccctccacctgtgcatgacgttatgctgagatcttctgacctttgcaatacttcaccaaatgtgtctggaccgcagttctcagtaggtctcgttgctagaatgttcarcaggagaaaaatactggaaatgtacttgcaggtcagaaataagagttttgactgactaaccttataggtaaaattcttgttgcaattaaaatgctcagtttaatgaagaaaaaatatgtaacttgcttagcattccatttgaagctgccatcaaggacaattgagttatgtgataccactgtttacttgactcgatggcggcatagttcccatttaacccttcagtaacctgatatgctgagaaaacactgaccattaaagactttacagttttctaacctcctactggaagccaatctttagagccctcacctgactggttgaaaagcattcagttagttgtctacaaaattaatttctggtttgtttgtttttatttgtaaataaattactataagcagttccttcacgttttaaattatgcttgttaatttttttctaaaaaattgtttctttaaaattaattcttcttaccaaagccctagtaatatctaatcaatgtcaaagcaatatggagccaaaattatctccaagcacttcccaggaactttgagataattgaatctatttcttctgatggagcaagatgacaatttgaggaatccatttcaggataaattgtctttggaacaggacttcaaatgctaaatacctcacaaatttatttaaataaaaaacatttattaagtgcctaatgggtgctaaatcttacaacaggcaaatgccatccaaaaatgaataaggcacagtttctttcaagaacttcacagtctactagtaagatttagctgtattaaattatttttgtttatttattctaaagaactttagatttctggtttgtggtaagatctggctaagactggttaaaaatattagatcacattttgaatcatataatcagatttccagttggtaataacttatttatcaaatgcttggctaaataagaagcaaagattttcatactactttagaaaagattttagattatccataatccacattttatagataagaaagccggcaggaatcagacttaaaaccacatttccaaagtctagttgaaaggattttctactgtagtccacacgagagtatagaatatgaaaaaataagaattatttggtgctaatattaccttaatcgattgtgggataattgttttaccttatgcactgggggtagaattcattctctgttctccctgacatgtcttatgcattattccttaccattaacagcttagtggatatatttactgtgtattagttttccagatcaagaaattcgtaaagtggcagttcaacaattagacaacctcttgaatgatgaactactggaatatctcccacagctagttcaggtaagaatagaagagttgctaaggaaacccagggttttaactaattatctctaaaaggttcctaatgaatcaacaatagtctatctagaagtgacattgcaatttggccacccaagggactaaatgatgtcaacatgggtaatgaagacattctctagctgaaattgttacaattacaaaatacattaattccaaaaaggaaaattttttaaaaatgatttcatttattaattagaatatgaaaaaatagacatgctcatgatacaaatttataaatatgtatatataaaatgataaaaattaccaaataaatgttatgtagaaaataatcatttgctaggcaggttttcataatttatgagtttcttgcacttctttagaggcttataatattgataataaattttatcacagtaatttctaatagccaaattttgccaccaaatagtacattttagtatcatcaaatatcacaatgttggagtaattttagaaaataatataaagttatctagaaatgtaagcaaagactgatttagtctgaatacgatgaaatataaacaagtaaattaaacatgccacacatgaccatgtaaataacagagtatctaatagatatagaatagaaggtaagttgtttttgttttttccaggatgactgtatgctgacagctaaatagatctaaacttgtggtttttatgctttgttttgtttttaatccagctttttttttttatctgaaaggtcaggttgttacagctagtttgaatgtcagttgcctcaggttttgaaaagtgactggaaactggtagaaggagcctatattaataaactttagtagagtatgactgcacagagattatgaatttctctgaagttctccttaaaaaagagagctggtttagaaatagctgtaccagagagtacaatccagtctttcttgaaaataagggttaatctaacttacaagtttaccgttcatctcatgactcatgggtatggcaacatgctatttcgagcccaattcaggagaatacgttttcacaaaagtctgtagacattaaactcatttgaaagtctctatctgagtaagtacacttggcatcaggaatgtcattgagacccatattgccacaaatccaaatgtataagacagtgtgcacacaatctaacacagcaaatacacagaaggcaaaattaaagtttcaactatgtcatgattaaaaaggaaagttataaaatgtcctgagatggaaagaaatagataatgtgactagaaaaattwaaaaaaaaaacactggaagaatttcaaaacactcattgtccttagacttctatactctaccttgaatttcaaacattccaacacataaaaaaatcctaacctgttggttgttctcttgaatcatgctattttgttacgtattatcatgttagaattatgcagtctatattaaagctgtaagaaaggaccctaaggctgtaacaaaacagaagatgcagttcatagctaagagtcaaataagacccagacccaggggttactgcaaaccacttcagataatgtggtgttcaccagaaaaaytgtctacattctagatggtcaggcgggatttagggggaaattgtaacagtggacagagtaaagcaggaagcttggaagcgaggggtaacacatagatactgggttcaagaagaaataatgggcagacatctaaaaaggcaagcatgtaggtaattctgaaacatacctcctgctcatatgctcatataatatgctcactattagggcataaataaaacccatgacctagtcagtccagcagtagcacgtgaatgatagagtgccatggctacagtttaagacagcacacattattgtccttctatagtcagacagcatcaggagtttatgcaaatttgctgaactcatcttcagcaccctcacatcttaggaatttataaactttcccattcttgaggatggctagcatattgaggtgtttcttcaagtgtatgtatgactggatattgtactcattttttcctgctgtctgtactgtggtataaagcctggcttagactctgaagctttgagagagagagagagagtgtgtgtgtgtgtgtgtgtgtaagagagagagacttaaatggtttatcaaacaactaaagatataagctttgtctctcaagcaggaatgggcatttttatgagaactgggttttcattttcatatatacagattcctgggatgatgatagcagctcagctacagattcctgtcagtgaagtccctgcagaggacagatgaagccctaaattaggtccctaaggatagtgggggctgccactgttatctctgttttctacccagttgagtatcctaaaaaacttaagagttgttcacagtggagatgaaagaaaggatttgggactgagttacggtagtaacagtcagttttgaaattttaagcaaaacctcaaggcctggaggttgataatgatacaccagttgatgatgatttctgttaaggctttgaatgtgcattaatttcatctccaaataggaaaaaatatctgtggcttaataatattgtayttaataatccaggactttttgtgtcagtattctcccctggtacatggttgaactccaccaaccacctgcccttatttcttatccatatacaaggaaaggaagcaaaactatacaaatccaaatggtgtaatgtatatgtgttttgttattagtcatatacygactcataaaatcatcgaatgtgttattagcattttgttaaaatatgcatgctgttttctctagtcttttctcaagcctctgaagtccctctgtattctgctataattttgttactgagaagtaaagtaattgtgtctcttacttcaggctgtcaagtttgaatggaaccttgagagtcctttagtgcaacttctactccaccgctccttgcagagcatccaggttgcccatcgtctttactggtaagattaactaaatcaggcaaggatgcctttttaattgccaccttctctatggggcagctttagaggaagcagaatatttctttaccttataattgatacagaccataaaattcaggcagttttgagtctttgtcaatgtcatttttatttaagaggataatgtgtcatcattttcaaaatctaccagttggacagttgctactgttaatcaggaagttaaatccaaacagaatttcaaatctgaatgatgcctttcttgtagctttaaatgacaagtgcaatttgtatatctactccttgaagattttaatgtaaaatctagttatgagactgaatgtttttggaagaatatgtggtataaaaatactttctgtgcaatattagttataaaccataaaattcaaaggctaatgtatactcattctgttgaaaatttctagagcactaaacttttcccaaagcataaatttgaaatattattagtgaagaaataagactgattcataagatgccagaatgtctatagcaacacctgaggatattagcatttcagtttccccatagtttctgccagaacttagcttctgtacatcaaccccactattccttcacacaccgaattaagattgtcaaaagatgctattcctgagaaggcttgtcagttggacagttgctagtggagactaacgaatgctaaaggtgaagtagaagaagttcaaggacctggattagcttgtgaatttccagtcatcagcccaggytgggtatatgactggagcagctgtaccacattctctacaacaccacgatatatggaagggtattatacctaccatttcctgtactttaaatatctttaatgttgccattctccaattccatatggcatgtccaacgttcagggtgtctatagtatgattggaaatgggtcctgatgaatatgaagagatggaagagaaagatgagggggaggagaaaaaatgataatgatgatgctgatgatgattcagcagatatggatgaatcagaagaagatgaggagaaagagagagtagagtctttgatgttcccatttgtagatgccactgctcgtgccttttttagcaagccttctgctgatggaagcattgggatgattctagtctgctaaatagatttctcaataatgtaaataactaaattattctcagcatatagcaggaaaaccagaatgaaatattgttccaggccctgtgttctgtatgacattacattaggaattggattgttttggtttgttttgtgtttttgaagtaaagaaggaaatgggttgctttttttctctagctaaaggacagacatttcttttttttttttttttttttttttgagtcggagtctcactttgtcaccaggctggagtgcagtggtgcaatctcagctcactgcaacctccaactctctggttcaagcgattcttctgcctcagcctcccgagtagctgggactacaggcacacaccaccacgcctggctaatttttgtatttttggtagagacagggtttcaccacattggccaggattgtcttcatctcttgacctcatgatctgcctgccttggcctcccaaagtgctgggattacaggtgtgagacaccaagcccagctgacatttcttccttttaaaatattttatacttaaaaacatagagaaatggagagagaattgttttgaataaggatttaaagtgtagcagaaatacctacacaagggtagataaataccatgtgactgaatgattctgtgaaaagatttcctgaagttaagagttatttataaatgaaataaaatttctaattaggccaatccatgtagtgatttcttatattttgtactcacagagaactaattggataaataacttgaatgctagtggtttgtcctttcttacacaatatatccttggatttaaagtctttgtcatcaagaccttgactttgaatttttcatcactacaaccttgaatttaatttcaagtcttcaacatgatgaccttgaatttaaagtcttcaacactatgacctttatcatattattcatagatgcatcatttttgaaatgtagtatgtaaaagtatttatgggttgtttattaacaaaaaaaattctttgcgatgtctcatgtggtttaaaattactatttctgttttgtttctcctttatacacttgactatctaactttgtgataagtgacatgaattttatgttaggattaagtgtgttttcctgaaacattgatttttttttgtgattatataattgagagttaagaataaaatccttctaatgttaaaaactcacttattaaaaacaaattttggttccaatcctgttttcaaaaaacgatttatcctattatcacctacacttgattctattgaacataatattctttgcatactgttcttcctactttcctttgtattgttaaccttgttgattcaattttaatttcataggacaaagttttaacaattataagtttcaatgacctaaggataaaattagatctatgttttactctcctgaatgtatgacaggcatcatttagttgctttgattgatagttaagaccactaaataacaggaaaacagcaagtcaatatcattttggagtgtcatatttttctgcttcaagaaatgttactcataatgagatcactcttctcatgaaaatcactcaagaagatgtagcaaagaagatacacaggaacttggtcggagactgtttgatttgatgcttattttcattttaaatgcctaatttaaaaagcagaacaattcctctagcatgttattataataaaacataagatacattgactggmatgaggcccttccatgaatagactcttattaaagctctgaatgaagtcttattttcttcagtttttcagaaagctactttggggcaaaggaaagttaagtggatacactttgtggtgttctgctgtcatattaaatgtaagactccattaaactcaatgtttaattcccttaaaactttactgttttttgcatgcattattaaaatgcacacatattaaaaaagtaacatagccagataacaatttttattttaatatttgaacaaaaatataaaaatatataaagtataaaatatataaaagacaatgttttaggcgggcgtggtggctcacgtctgtaatcccagcactttgggaggccaaggctggtggatcacctgaggtcaggagtccgagatcagccaggccaacacggtgaaacccccatttctactaaaaatacaaaaattagccgggcctggtggcgggcgcctgtaatctcagctactcaggaggctgaggcaggagaattgctggaacccgggaggttgcagtgagccgagatcgcgccattgcactccagcctgggctgacaacagcgagactccattaaaaaaaaaaaaaaaaaaagttttaaaagtatattaaaaatataataaaatattaaagacttattctaattgactaacgattgttaaaatacttggaccacctcagtaagttcttcatttgctaaagttgtatgaaaagtggagtcatttgaaaggcaacaatgggtgcacacaaagtggtaaatcaatgtcatacttgcaaattcatgtaaacacaattacgtcactgtttccaaaaaggttggaagggaagcttttttgtgtataattctcatcctttcgaaaaaaaaaatcaagcccatttttcctttcagtgattcaaggagaaactaagaaggaatagaaaagaatataaattataaatggactgtttgttttgagagctttgtttgtaagaatatgaaaaaagagaaataaaacaggaaggagttttctttaacttttaagtccagggtcacacgtgtaggtttgttacataggtaaacatgtgtcatggggatttattgtgcagattatttcatcacccaggtattaagcctatgacctattagttattgttcctgatcctctaaggggggagattcaaaagtgcctacatccccttaaaacaaataaaaattaagaatcaggcaacatgcactaagcataaaataatattaattatatttaaaatatatcagagttaaaaaatatagctcaagccaagcatcatatttagggagtgactgcttctgtgcaaaatgtttgtgttaaaactttaaagatgcagctcccatctcacgattcatgaaaaaaaaatactcaaaatatctttccttaaaaaaaagtcttatttaaaaaaaaaaaaaactagaaacccatcagtcatgagtttatgagattttttttcacgtggatgaattactgcttcctcagattcaccatattcaaaactgaactaaatatcctgtcttgctcacacaggtcttgaggtcttccttgtttctcactaacatgaccaattattcaccaagccctataactctatatatcctcaacagcgctccctgctccacaacttccacctgtcactatcagtgatcagaaagttgcctcaccagatactgagctatgaataagtaagattggaatgaaaaccatcttgactacttggcatcactgtgggtagcctttctgagaggtgaaattgacttaggctcacgtgagtctcttccactggaagagtgaatgtaggatgaatagcccctattttccaaggcaagtgagttaactagaagctttgtgtttgaatttaaaagctttacctcacagtttgcatcctaaaaggtggctataaatgggaaccataacatttggagcttatgcccaggaggcccctcccccattatgtaacaattaattacaaaagcttaaatgtagtgcccctttccatttggaataggaaacactttaaccactagtcaagtattgagttgagtggtggccccaaagaagatatgtccacagcctaacctcagaaacctgtgatttgtgaatgtgaccttatggagaaaaagggtctttgacgatagaatttaattaaagatcttgagattagttccccctggattatcagggtgagccctgaatccaatgccaagtgacctaaagagaggcagaagaggagaagacacacacagagagaaggtcatgaaaagggaggcattgattgcagcctcaagccaaggaatgcctagagctaccataagctggaagaggcaaggaaggttctccccggagccttgggagagagcacagccctgcttacaccctgattttggacttctggcctccagaactgtgagaatacatttctgttatcactagtttgtgttaacttgttacggcagccacaggaaaataatataacagactttatgaaggctctgagtcaattgcctaggatgtcacatcatcaggaagctttccctgaccctctcccagccaccatctgggattgagtattgcttccacatcatgtcaaacagcatactgttcatgactctgccagacatcatatcacactcccttgacaccactgctgccctgtcccttccccctcttagtccacagagtagctcaagacagcaatcatgtcacactcttccatgtaccaatccagcacagtatctgaaactcagtagatactcaaaaaatgttttaaaaattatgaatccacagaaatgtctgtaaggccatcaatattttcacacacagtactggaaattccatggtactcagggaatatgaaattgggcactgtcaaaggcactgctgtgcgcctctacctggctgctgcacccactcccatctgctgcagtgactgctaacaaaatacggccccttctctggagaattagcctctgattccayagccccctggcctacgaagtgggaaaatctctaagatataatttacattccagagcctccccataaatcagatcaaggttagacttgacccgagatctcatccttgttaattcctttcccttccctataattctgctcttactccctcataagatttttcctgaagagcacttcttcagtaaatcacaaacagtgaaattctgcctcatgtcctgttctagagaacctgacctacaataagtatttcttatggaagataaaaatttaaatatgtgtttttagaaactggagcatcagtatgctatgggatacatcgtaggtagaacaacagtattgcagtctttcccactcctcctaccaagtctgattgaacaaactccaagagagaaccaattggaatgaaaaactgtctggtaggaaaccatattataacacagctccttttataaggtgtcacttaaggcacctaatgcaaaaatctcttcaaaatgttcctttcaaagtatggggataacctgaagtgaggctcccatttgcaagctctatcaatgtaaggatcttttttctgctttattcactgatatatcacaagtacctagaacagtacttggcactttatagacattcaataatttactattcaatgtatgaataggattaagtttcctggactcagctgtgcacatgcagacttatgtcgatagggggtggaggagagctgcttcagaggtcaactaagagctggcctggctaaagcaattccaggagattgacctgatcagaaacgaggcaatggatatcactagtgaaaccaaaactggagaagagggagaatgtgagcagaagtccaggacaaaccaagacaggagttagggcctaagaacaagttgatggagcagcatcttctgtaccagttgagaaaaccacgaaatgaattaagccaatgttgtctctggtacagggtattaaatgaccatatcctgtgactttaatatgctatccataaaactgagatgatccaaaaatctgtccattttttttttaaataatcytccctcaactcttttatctaaaattttgggggcaagttctcaagtcacagatgactttaaataaagcaaaaagatgtggaaatttggcatcatgagattcaaagtcacagttgtctctctcacccgcctctccacaatacgtatcccctaatgcctgaaattctctcatttgcaagtcactccttgaggttaagtattgctctcttccagcagttctcttctaatatgaaaatatatatattctgaacctaatgattatgggaattagtttatcattttttcattaatgtgacaaacatagagatgatggacactgttgaatgattaacaataaaacaaaggatgatccttgccttaaagaagctcaggggctaacattagcatccaggcaggaggaaagagcccactggccacgtggcagggacagagtagagagagggaactcaacaaattttgtccactttacagttttgcctatgaccttttccaaataaaagcagagaggcaaggccagacatccagtgagtaaaaaagtctgtgtgctcccattctgtcagttttaaatactgataaaggcttacaaatgaatacacaaaggaggtaaatgctctctctttttgttttgatgtctggaacactccctgaagcaaggggaaagagctgtacttcagggaggtcttgcagagcaatacagcacacatgatacagaatccatagggggctttaaagcctcagccctttacctttgagaatcattattttgcaactaatttatttktttacctttacaatgtaataaatgatgaattattgcttcatcttttgttagggaaagatatgtctcactgacttttaatattgatctgctgtaatcatctttccactttgttgtcctcagaaatgtatacacaggatagaatccctaccttcagcaacttgcttaaaccaaaagcaactgttctctatcccaaccaacctgaagraaaagaggcagatagtggtaacaaggtttcctttgtacacaataatctgtaaaatccattagcatagttttccagtgaaggcataatacaggaacagttgtttttgtctgttttgtttctattttatgcaatagagattttatgtagttcctttaataaaaagatttttaaaataccatacaatctttaaataaatttggtgtcatttaagccttattactgctaataaatatctatgaaaatagaatcttatacaaacttctaccacaaatcaagtcaaaagccaagaaaagagctccagcatcaatgtatcactggtttaaatcatttttccctcaaaatcttctattttgttaagaaaaagtgaagagttatggaaatgaacattatgtatatacataatgaactcaaatgttgaaacttggacccacccaggcctttgggaactgagcttcctaatccactgtccagcaatttttcattataataaccacatccaattacatcactgcttccttagatagtaatctggtttccctataataatgttagtcccccactgtcatagtttatactagagatttgggttaagtccctgaaaagcagtattatagtgtttaattatttattgtttctcaatcagactgactttgctctagccaacaaaaaatatggttggcaaaaaggcattctgtttaraaattattcttgtcttctaataatatttgaatttggcatccaaaaggaatacaytaacagatattcatagagttacagtattttgaagccaaatgggacttgaaggatcatctgctatcccagaaagggatctcaacatgttaagtgatttttccaatgacaatcatctaagctgactgaagaattgaaattaaaatacgtttatgatatctcatgcccaattcagatttctttctaattcaacatctactttcaaaaaagggtaatttgaagaattcaggaaatgtttgttttttctatcaattaggaactcattcaagtactgaagatgtgactttttttttttaacttaagagcaaaactgaaatgaaaaccatattgaaaattgagatatttaaaagctcaaaattgttgcccctagttgttggcatgactcacaagtgctgtcagttgtaaatgttaataagtaggtatatacaataagcccactaaaattgtatccttgaaggagctttgaagtagatagcagattgtttccagaatctttcttttatagtgtctaattgatatttaaaacattaaatgtgtcccggcgtggtggctcatgcctatgatcccagtactttgggaggccgaggagggtaggtcatgagrtcaggagtttcagaccagcctgcccaacatggtgaaaccccatttctactaaaaatacaaaaattagctgggcgtggtggcaggtgcctgtaatcctagctacttgggaggctgaggcaggaggctgaggcaggagaatcacttgaacccaggaggcggaggttacagtgagccgagatcacgccattgcactccagcctgggtgaaagagctagactccatctcgaaaaaaataaataaataaaaataaaacattaagtgtgctcttttagttttactattaaaccatgagttatgataacaataactgagtaatctacttagtagactcactttgtacttatttttcagcacctatttcataaaaccaagactttctcagttttctcaaaaacactgttcaattaagcaactaccaattatgctaatacaattaagtcacccatttcatcaagttaaatgagttagaaaataaatccctctaggatgggaaagaacatgacaataataaaatgtaggcaaatsagtgtttggtttccttccaactaaaaatacacagtaagcagtagggtacaggcctgaaggacagggaaaagatctgggatggtgacagaaaattgaatgtcatcagctcattgatgggacttacccagaatcctttcatcttatggctcagtcattccctatcctcatccattggtgctgcagtaacagaatatctgagaaataaacaacagaaattatttctctaagttctggaggctgaaaaatccaagatcaagatgctagcaggtttggtgtctggtaagggcccagtctctgcttccgagattgcaccttgaacactgcatcttccagaggaaaggactgttgttcctcatgttgtagaatagtgaagaaaagcaaactgacttttgggagacttttttataagggcatgaacccattcatgagtgaatagatcctgaacatcttccattagacccccacctgtcaatactgttgcaatggggattaaatttccagctcatgaatttttaaagagaacacattgaaaccattacatcccctaaatttggaactctcaaatgtattccctgaacctggacccaaataagatagaatcatagcatataatcatagaatcatagaaagagaatcatagcatagaatcatagaaagagaatcatagcatataattgtagaatcatagcaagagaatcatagcatgatgttggagatgcttttagatgctaatagcagacatcacttttgtctatattccgtaggccagaagtcagtaataatgcccccacctaactgcaaggtggcaaaggaaagtggtccatgtatgtatatatacagaagcaaaatgcagtttaatttggtaaacctgtagcagtttctgccatacaagtacaacagcatagattattcaagaaacctctccataaagtggtagaggaagagggcatgaaagaaaagccaatatccacctttccacatattaattggctttcttttcaaaaaccaaaattagtcttaacagacaaaaaaagattactagctaactactccagtaagaatcatcattttaatagacatcctctaaaaatgtctttgacttttgtccaaaaattttacaaataattccaagagatttaacctatgggtacattttgtaaccaggtttttttttttttctggagggctcattattaagatatttatgtagccatggtataygactggcatctcagctcaagaaattcaaaactgarttcaatattcctaccctctaccatttcaattctttcacccaccattcccaaacttttaaaaatacacaatgccctagtttacagccattactaagatatccaacacagaaaatctagaagacattattcttacccaataatctttatttacttatttcttaagtcttgattctcttttctcataaatttgtctttaagttgtcctttcctttctactttatagctagcacctttggtatcatctacttggactatcactaccgcttccaggctgttttccttcactttcattcttacctatccccagtccatccatcctccacactgctctcagaataatctacacatgtaacaacttgatcccaaactcataaagtcagctccaggtcatgggtaacctccagctggttagcataatttcttaattccagtttcctcttttcttatgacagagtttagaattagggtatgagatccatgttaagagagaaaatccattctctcttaacatgacttggcaatggagcttcatagtttccactctgcctatctcccacctcatcttgtaagcctttctacatccaaatataatctttctttttattattctcaagtagttactcaaattctcaaatctttcatgccctgatgactttgcacacagttttccaacttcttgaaatgcagttgttcccttgtctgtctatatagaatcctttaggactcagctcaagattttatcctctttgaagatgtctctgaccttggctcccttgtacacatctacaatacagttcttaacatatttcatactttacttgaccatttcccttccttcacttgaagatacttcttcacttcaagatacttagagctacaagtaacaaaaaaaaaaaaaaaccctgattcaactggtttacaattatatgaagaattaattattttatctcacataacaagaagctcttcagtagtgtggttccaaagtttattattgcagcagctcactgatgatgtcataacctaatttctttccacctttctgctgtgccatcctcaccatgttgacttgtccttagtctacttcacatcattgttacaagaagattgacacaatgggtctcacatccatacatgattccatgcagcaagagtaaagagaatgtctcttcctcagttagaaaatttttccataaaccccaaagctgagttaacttctcatattatttgccagaattgggtcccttatcatgaacccatcatatgaccagatggcaatctgatgactcagcttacatgattggtttagcatattcagaatttatctctaaactggtcatcttcytctaaggtttttgatatctgaataaaagcagattctttttgcagacattaaggggagagtagatttggtatagacaaaccctatgtttctcttctgcactgtgaggacaaaacttaaccatctatccttaacatagaacattgcacacwgtatacaattcattcaatacctattgaatgaataaaaataatcacaccacatacatgtgtattgcctacaggttaatttaccttgactactatccttagaacagcaggtaatcagaacaagtcatattacaaaagatgtatttttctcttttaaaaaaatggactctctagctctctggaattgggtgaagttgagttaaatgacttacagaataatctgacgttctgaataagggtttttgaaacagtatcaagtgttacattgatcccgttcatagtgtgagttgttttgtactgatttaaaaacgatgtttattttaaccctgattgaaaatgtaaggctgcatctagttatytggcaaaaaagtgttttctggggaggccttgttaagcaaccacttaccaycttttaaaatacaattttctgcattgagattctctatgagcattggggaattactaaacagtttctgattttttctggcttctctattctccacttctattttgtttcccagggctgtgaagactcagagttctctgtattttgtattagttaatggataaggcttttactttcaggctccatcttaattttttgtatctttgttcatgaaaagattgctccttgaaaatgttgaatggggatttttcttgcttttcttctaattcaattttatacttcatttgtatacaattaatatttataagaaaatgacagttactttcttgtttattgtctaaagaacttcagatgtgttgcttttagtgtaacaaaaccaagacttggatattacaatcaaacacttgttacatttaataacttagaattcttgtacttgctttggtatgtatgatttatttttgaccaatgaaaaatgaacagcttccacaaatagtgactctttagacttgacagtctacctgatacactaaccactcttgacagaatgtcagataattgggttatcttgcttgggtttagttatctgaagttgttaaagggaagaaccctaatgtatgtgtcactttcctttttaaattgggcactaggcccatatgttcctgagagttctgtaaatgtcattaatttaccaaaatggtggaacttctgttttcttccaactaaaatttatgattatttttaaagaggctgctgctcaataaaatgttgacataaattgattgatgatgctgaaaattacacaagacagtctagataatcaattactagatattatagggacagctgcataagtagactggtagacgtcagtgaacagaagcaagaaactgcctaggaagcgtattgaggaaagagagttttatgttagtcattcattctttaattcaaatatctattctcccagtttttgttgactgcctgctatgcacataatagataacgcttgcagaggaaatagaaaatataaacaagttataataaacatggattaagcaatatgtgtttttttaaagtattctagctatttcaggcagctaccacaaacactagagtcatttttccaacccttttgtctcaataaattaattttaaacattttatttagtgattttcaagtcttccttgactggattgtaaacctgaattcaatgtatttattaacaattatttattcttagacataattgtgtcaagtgtctacagacccctttccaggatcaagaaatttcaagaactgaattggtgatcagacggtgacttggataatcttctggaaaattttgctgttctttctctgctataaagaaaggaatactaaggtttaaggttaaacagtagactccagtgtggctctgactgagagastgttgctaagaattctaatcatctaacttttctgctttgactactccttcttgtcttgacaagattgtcttatggtacacgtagtatagttaatgctagacactatggtagtcatttcaaatattacttcattaactgacaacaattctttagtctccatttctctgaaaaatattaatactcagagatgctaggtatacagagctataaagaagaagagccaacatttgatcctgtgcctcatacattagtacccatcactctacttacatattatgaaagctataaaaataacaataaaagatagaataatgtaatagagggagaacaagatttggagaaaaacatacttgaagaaaaatttcaactcaggcctctcctaagctgggtagcccttgaaaaattattygacctccctgatcatcaattttattacctatacaagaaatacaattgggcttaacacagtttttattaaacatatatattgcataatatatataatacgtatttataccttcaagaatatgtttttggagtcatttagaaaggataagaagtatcaccaaagtttcagttcccaaggttatatcacagattactaatgacatggaatttggatctcagattcctgacatttgactcctgactcctaccattgcattgctcttcttgtcttatcctaattgcaaatttaaaatttaagtttaataacagagtttgaaatgagtaaaaggagkagtagaaaaatcactgtataaacaaaccagtttatgggcctgttaagaaaagtttctgaaacatgctaagtgtcagaacaagttggaaatatgtgtgtcatttagtgtcagwgaaatttaacatacagagaaatctaacaaaagtcacagatcgccagttgatacatgtttttgcatttcaatagccaacacatatttcactcacatccctcatctgcctgctagtataatacagatcaagaaagtacaagtaaaattcttcatcaatttcttagttcttttaaagcgttatttaatgtattaaccttattacattgacgttactattcacactgaaatagagttgagtgttagaaactccacctctgacttcttcaagttcatcagaccactccataatttgacttgctttcccaccaactttctgagccactcatgtatgtatctggggtaatttcttttagcactccgtgtatataacaagtcacttgcaaaatgtctcatgaatcaataccctttctttatctccactaaacctttaactcagtatgacatcatttccttactgctagtgctatgtttttttactctgtctgcctcattcaagattctatccataccacgtcattctccatattgctttaaaactaaacaatgattttgcaatgtctatagcataaagatcaaatttattaatcacacaccatgtataatgaatcacaggatacatttgtaaaatacgtttattttattatcaactggttccaaagcaaccagtttgtgtttcacatatgaaaatattgttatcctctttaattcataaagtagtagttaatagtttaggatctacctcactgtacctggatgcaaacctgtttctactatttattaggtgtctcactttaagcaagatacttaatttttacaggactcatttttctcaggcactaaaaattagaataataatatttactttcagaaggttatagtaagaactaatgcagtatggggccacggtgttggatagccgtgtgaattcaaccaggagtcatgcaggcttatatctgtaagagttataagagttataatcctgtcccataggaagagcttgttcaccaaaaaaaaaatatttattgagcaccttccatgagttaagccacattgtagtcttcagggatatagcaatgaataaaagagacaaaaaacccagtccttccttatgtagcttttaagagaaataaaatccatacttgtaaggcattgataagtactagggagaaaaataaaacaagtaggaaacataaaaagtacaagggtcaggtagttgcaattttaagctggggaagcaagaaaaggccttattaaaaaggtgacatttgaaaaagacctcagtgaagtaagagagtgaaccgcctatgtatctgaaggaagaggatgccaggaagaagtaatagcrtgtgcaaaggcattaaggtgtctatttggggtgttgggaggacaacaatggggctaaggtggctgggttaacttgaatgaggggaagactagtagtagatgaggttacagggggaaagagtaggggtaagggcaggttatataaaaattcctaggcattattagaatattagctttaatccaaatgattagagggctctgagaagatgaaaggcacaatttggcttatattrtcaagagatcagttttgatctattgaagtgtgaagtaactattgaacattttcatctgggctagaactaaaaatgagaaaattatcaacatatrcgtaaggttcaaagccacattaacagagaaggtcataggagaatgaatacaaatagaaaggaaaagaagtccaaatatttagtggtaacgccaacattttaaaaatcaaagagataaagtagaaccaaaaaagaaaactgaagagaagcagtcagggatataaaatataaaccaagtgagcatggaattctgtaacactatataaagcatcaaaagagagatgtgatcacctgtgtcaaatgctactggtaggtcaagtaaaattgagatctgattagcaccatagaggtcattggaggtcatcaaaaaagcactttcaatcgagtagaggtaaaacctgatgggaatatattgaagagtgaaaaggagagctattaaaaacaattattttaggagttttgctaggaaagggaagagagaaatgtggtaatggttgaagagggacatggtctatgaaaagagtgttgcttctttgcttttacaataggaaaaattgctttttaaatatactggtgggaaaaatcaaatagagagggcaacattgatgagacggaagaaagaatttctggtgcaaaatccttgagtaatgatagggtgtgatatctgtagcacaggaagattggtacacaaagtccatacatagtaagaggagaaaatgaagagtggactggaacaggcgggtgggtgcatgtggtggtagttgcctgtagagtgaaggaagcaaagtcatcttctcatgactgtgtctgggcctctttgttttctgtatgcaacaaactcaraatcacttayagtaatagagaagtctaagatttcccaatgagacaacaaaggacaaaccagcaaagcagatgacaaaaacaagataaaagtaggggtacaatgtgctatagacagaagtgcatcctggagwctcaagtgtcaaatgcagcattgtgaatyattctatttaaacttctgatttaactgttcttgaagctttgttttcttttaatttcctacgtctatctgtgtatttttcttattcaaatgaagatataaaaatatgaaactttaaaaataaaagtttaattcagtagtgaggctgaattaaacttagaatagaaattagtatttctattaaggggatgaaaacattgaccaatattagcagcatttatgatctgcactatagtaatataggaatatgcaattagaatttaatatacaatatgtttttgcatcaatgatatttaaatgaaagatatattgatatgaataatcactatagcttttctctaactgacagtattaaccccaaaactatgagaaataactctattaacctcacccagacaatgaatgtactcactgagtgtggaatactgtaaaatatgcactggaccaatttcacaaacatgaatattattgtctgtcctcaaaaagtttacatcttccttagaagaataagaaaaatataaataagcaatcaaatctgaaaagaacatttataaagtaatattgcaataatggcatgataattacaatagccctcaaggaaagaaaaataaaaatatctttcgatttggaggagattagttgaggtgaattcttagaagaggggttttgaaacagtattttgaggagatgacagataagagtaaactgaaaagattccaagaacgaactcatacaaatatagagaggctaaaaggagagaggagtagccatattatgtttctaaaacaggactcattgtaaggatgaatgtgaaaaagagttccaagttataacattataattcttcagatattaacaacatttacaattgattaaaatatttaagagtataccttttaaaatgattagaaaattatgcatctttttatgcatacatttttatatagacttgagttagatctgaatcattcggtctacaagttcctctgtatggtcaatatcctacattttttttttttttgagacagattctcactcttgtggcccaggctggagtgcaatggtgcaatctcggctcactgcaaactccacctcccgggttcaagagattctcctgcctcagcctcccacgtagctgggattacaggcacccgccaccatgcccagctaattttttgtatttttagtagagacagtttccccattttggccagtttggtctcgaactcctgacctcaggtgatccacctgccttggcctcccaaagggctgggattacaggcatgagccaccatgcccagcctaatatccgactttttattccagaatgattacctggaacctaaactgatcttacaaattaagaaatagaattagcattcagaaagcataagagtacctactctgtacatggtgctgtctgtgtgtgtgtgtttgtgagtgtatgtatgtatgtgtgtatgtttatgtatatataatttttcacaagtaataaaaaatatcagtatatttatttaatttgagactttcattcaatgtgatgtgaatgtattgtacttttatttcataccctattatggctttaaagtttttttttcattttacagcacacaggaaatgaaaaaccacttcttttgttatatctttgtttacaggaatttctgaaaagtaaaatgtgtacccttttatttctgtaatcaccgaaaaactccttctatatgtatcagaagaaatgttattaaaaagttaaaattttggttaaaaaaacaaagagaacaactgaatgggacctaatgaacagaaaattctttcacggaaaagtgataccatgataataagaaaatggacaattgctaaatcaaaatgagtaaatactaaagtctatctctgatctgttaccattcactaactttaataattgttgtatatgccatctctaatcatttagacattagaaagattctctaaaaattggattgccaaaatatttatagaaagcatcttagagtgtaacgacccttctccttgacgcccaagaattattcacacagttgccacttcaacattcccaattcataaagcattatataactatgcaaatactccaggcctgactcatgctctcgtgtattgagtgtattttatctggcaagaaacaaatattggctttcttcttktcaatcagagagtgccaaggcactattctattacraaataaatatgtaaacaaatcaatgaatattaaagttcccattccagtaaaatctatacacccattctcctccaaacacactataagccatcttccctctataatgttatgtttggcattcagtgccctttcctggaacggccacccctgtctttacctcctgggcctttagtagtcttatcagtagtatgaagtctcacytgaacaactccaatcttgagaatttccaactctgctgaaatcctgtatcatatttkgtctttatcaattgtttggtatttatgtttttagtcttacatgtatgtctgcatcttacgaattctcacacttagcctaatatatttagtaaatacttatcagtatttttattgaattggagctgcaaaatcaggcagaccacaaacttaatggtggttttgacctttccttgctgaataatcttaaattccctgaagttcagtttccatactgtagaatgcggataatagtaattatatcctgaatataacaattagtcaataaatggtggtggtgctgttgctgctgmtgatgatgacaaataacaacaatatcaacaatgactatttytttctttcattcttttccttcagtgggattgaactgatttgacgttttatctaacataaactggatacttttaattattctttgtattaaaaatatttctgagtcccttcgtttcagccaaacccaaagaatccattcaggttatgtcctaagtttgatatgttcatacacattctctatcacagtggatgcttttgtataattttagtacaattatgttcagtttttgtccttacccataattaaaactatatgatacttgccaaaaaagaacactgccaaataagatcaatgaagcagaaaagaccagaaatatacttgattatcttcaagaatttatagtttttcaaaaaattttaaatcagtggaggaaagatcgattatttaatgaatggtgtttggatggccagctgaggggaaaaaaatggatccaaagctagtacaagccagatatttaaaaaattagaagagagaaacaatgaaaataccaaaagaaaaattcagagacttttttatattaggaaaatactttttaataaataggtgttgtatatcatcttttcagtggtgaagaattaatttctttaattaacacagaacccctacaaacccataaaagtggtttaagaatataagcaagtaattccattaaaaatatatactgtgtatggttcttaaacacaagaattggtattcaacttgaattataaaatataatcatatactgctttcacctatcagattggcaaaaattaaaaaaaaaaattggtggcagcctactagtgaaaatgtggggaaacagaatcgcaaattgaagatggaagtttaattgttaaaatgttgtggaggtttgtttatcagttatcttttacattttaaaatacatgtattttcacaaagcaattttgcttttaaatgctaattacagatctactaagatatgtgcaaaatgatgcatgtatgataatattcatggtagttttggtggtaaaaaaaatgaaaacaaatactcatcaatgtagaattggtaaaaagattttgttatactcatccaaataaaatcttatttactttagaaagcactctacatgctaactgtaaaccatcccaagatgtattattacatttcaaaagcaatatgcagtctgtgtgtataatattctactattcacgtaaaagaaatatttatttacttaccttgagtgcaattgcatagaacatctctgaatggatacaaaagaaactaggtgcaatctttttaacgaggggaaaatgggcacagagagaggaggactggagacttaattttcattgtagtctcatttgcatctttcggattttgtaacctagatacattgcctatttaaaagagtaagaaaagtagataatttttgaaaaccctataattagccatgttttgagagcaacagcaacagactgtataatctccccatatctttttatataaacacagaatttagaccctgccaatctgccacttaattattttaatcatatggaagggaatgaacttgaagatgatcttgccagatgtcttctgtttgcctcttaagacccactccaccatttccctgcccctgccctggaggttcacctccgtggacaacattcagagtctctcttgcccctggcttttggttggataagccaattggcagtctcagcaggagattacagggaaaaaaagagagttcatggtatgtattctctgcctccctaactgtgggactctccttcatttggctgtgtcttcactgttcccttcatggccgctgactcattcctgaagtcccacacctcaggcctcagtgctaacagtatcactgtcactggccccaatgtaccacccataccgtgtgatttttctccctgcaaccttttttaacagtcccattaaaccttcctcaagttgtttgaatggtgcattttctgtttagaccctgttacagtggaggaagcagctattgttgttgttgttttgctataattaayataggaatgattaaaagtgaatatttaatcattggcatgaaccatgcacaaaagcatagttagaagttttatattaacttcaagagaatatgtatgtcaaaatagagtctttattcaaaatgaagggcactctgttttgtctacttctgtatatatacagtctactggtttcaaaggcctttttccttcacttttttcttcttttaaatttgattgctaggcatctcgctatttaatgccacacacgctataaaatagagagtagaaagagtccgatgaaattcttttatttagaagagatgaaaatatattgatatttccttataggtggtgatcttatacttctgtttcttcccactgctccaagctacttcacctttgttcaaaggttgaatacagatattgaactaaatattgtaataacttcctcatgattaatataagaatagtcatgttacccctatttggttcgtgtgttagatgatcactttttactcagggccacgtgatattatgaaccacgagtggcagttccacaatatgcagcaattgacagtggccctttttgcttgtgcccagttaggtagatttgtgttattctgaatggcaggaacactacaagactttttaataaatagaaagtaaccatgacagatttttgtccagacagatgttcagtggttatcttgtgacagaacactcaaacaagttgtcaaacttaagaatgatttttgcattttctttttaaaataaaagtttcaaatttgcagcctttcttgtgatgtctagtgggttgccacctggcatatatcctattaacacacagatacacgcacttcatgtcaggtgccccttcaagataaaggtaatttttcacggtaatggaaaagcaaatattatttgttytgaatatgttacgagggagtattctgaaaatgttatgtttgtttggatatgttttcataactacctggatttgttaattaaaaatatgtaaaaatattacctgaaaaaaatcttttatcgtgtacttttaaaccttggagacaaaattttctattctgtcgtagaatctttcaaataatgaatttaaaagtataaaggtgcaacagcttccactagtatgaaagaacaactgatagctattgagtaatattgaaaatgttaagcaaaattgttaaaaatgtttgcttaactgttggatggtattatttaaaagtattatcattgagaatacatcaataacattaatgcagattatgggggatttcctccacttgggtctctgcatctttgtgatagattcttcctggcaatgaagctaaggaaatcaaatattggaatgagacctcagtagtgtaaaatgtaaactaaggtcctaaaatgtaacgaagaatattcaataacataactctcactaagtagtattaattaataataattgttagagcaaaaagtgcttttttgattaaaacatacaataaaattatttttgaatagtatttcctctctcttactctttttaatttgatttcagtttgtgtatgttttgtaatggaatatattagtatgaaagaatatacctataattcatttctgtttgtttttattttatatgtttaatatacacacaatgatgttttgatgtacatagtgaaatggttactatagccaagcaaattaacatattaatcatctcacatagttatggtccattttgggataagagcacttaaaatctacgtgtttaaaatgatcaatatacaatacagtgttattaactatagtcctcatgttgtacgttagatctctagacttatgcagcatatacaactgcatctctgttccctttacctacattgccccatttcctctccctgtccacatcccacaaccaccatgctatgtgttggactttcttttagatcccacataaaagtaaaattgtacagtatttttctttctgtgtctggcttatttcatgtaatgtcctttaagtttatccatgttgtagaaaatggcaagatttccttttttaaggctgaataatattttgtatcattatatatataatgaaatattgttacaaattgaaaacatcttatattgaaacaaattatatgtatatattatacacacacatatatatataattnnnnnnnnnnnnnnnnnnnnatatatatatatatatatatatatatatatatatatatatatatatatatatatatatatatatatatatatatatatatatatatatatatatatatatatatatatatatatatatatatatatatatatatatatatatatatatatatatatatatatatatatatatatatatatatatatatatatatatatatatatatatatatatatatatatatatatatatatatatatatatatatatatatatatatatatatatatatatatatatatatatatatatatatatatatatatatatatatatatatatatatatatatatatatatatatatatatatatatatatatatatatatatatatatatatatatatatatatatatatttaccacaattaatttatccatcctccccaaccactgatggacacttaagttgtttttatttcttggctattatgaataaggctgcaatgaatgtgagactgcagatatctctacgaggggttgactttatttatttctgggttcatacctagaagagggattgctggatcatatggtagttctatttttaattttttgagaaacttccatactgttttccataatagttgtaccaatttacatttgcaccaacagtgtattgagtcctcttggtgccattgtttaaagttagtttgaccatatatgcttgcatttatctctaggctcactattctgttccattggtctatgtctctgctttcatgccagtaccatactgctttgatcattatagctttgtttgcatataactcttttttatttttattatttattattttttttattttactttaagttctgggatacatgtgctgaacatgcaggtttgttacgtaggtatacatgtgccatggtagtttgctgcacctatcaacacgtcatctaggttttaagctccacatgcattaggtatctgtcctaatgctctccctccccttgccttgcaccccacaacaggccccaatgtgtgatgttcccctccctgtgtccatgtgttctcattgttcaactcccacttatgagtgaagacgtggtatttggtctcctgttcctgagttagtttgctgagaatgatggtttccagcttcgtccatgttcctgcaaaggacatgaattcattcttttttatggctgcatagtattctatggtgtgtatgtatgccacattgtctttatccagtctatcattgatgggcatttgggttggttccaagtttttgctattataaatagtgctgcaataaatatacgtgtgcatgtgtctttatagcagagtgatttgtattcctttgggtatatacccactaatggtatttctggtcctatatccttgaggaattgccacactgtcttccataatggttgaactaatttacactccaccaacagtgtaaaagcattcctatttctccacatcctcgacagcatctgctgttttctgactttttaatgatcgccattctgactggcatgagatggtttctcatatggttttgatttgcatttctctaataaccagtgatgagctttttttcacgttttttggccacataagtgtcttctgttgagaagtgtctgttcatatcctttgctcactttttaatagcgttgttttttatttttatttttgagatggagttttgctattattgcccggactgcagtgcaatggcacaatctcagctcaccgcaacctccacctcctgggttcaggtgattctcctgcctcagcatcccaagtagctgggattacaggcatgtgccaccacgcctggctaattttgtatttttagtagagatgaggtttcaccatgttggccaggctggtctcgaactcccaacctcaggtgatccacccgcctcagcctcccaaagggctgggatcacaggtgtgagccaccagtcctgcctgttgtttgcttttttcttgtaaatttgtttaagttccttgtagattctggatattagaccttcatcagatgggtagattgcaaaaatgttccctccttctgtacatttcctgttcactctgatgacagtttcttttgctgtgcagaatctttagtttaattggatccaatttgtcaatgttggcttttgttgcaattgcttttggtgttttagtcatgaagtctttgctcgtgcctatgttcctgagtggtattgcttaggttttcttctagggtttttatggttttagattttaagtctttaatccatcttgagttaatttttgtataaggtgtaaggaaggggtcccagtttcagttttctgcatatggttagccagttttcccaacaccatttattaaatagggaatcctttcaccattgcttgtttttgtcaggtttgtcaaagatcagatggtagtagacgtgtggtgttatttctgaggccactgttctgttccattggtctatatatctgttttgataccagtaccatgctcttttggttactgtagccttgtagtatagtttgaagtcaggtagcacgatgcctccagctttgttctttttgcttaggattgtcttggttatgcaggctcctttttggttccatatgaaatttaaaatagtttttctaattctgttaagaaagtcaatggtagcttgatgggaataacattgaatctacaaattactttgtgcagtatggccattttcacgatattgatttttcctatccatgagcatggaatttcattccatttgtttgtgtcctctcttatttccctgagcggtggtttgtagttctccttgaagaggtccttcacatcccttgtaagttatattcctaggtattttattttctttgtagcaattgcgagtgggagttcactcatgatttggctctatgcttgtctattattgctgtgtaggagtgcttgcgatttttgcaaattcattttgaatcctgagactttgctgaagttgcttatcagcttaagaagtttttgggctcacacaatggggttttctaaatataatcatgtcatctgcaaacagagacaatttgacttcctctcttcctatttgaatattgtttatttctttctcttgcctgattgccctagccagaacttccaatactatgttgaataggagtggtgagagagggcatccttatcttgtgctggttttcaaaggaaatacttccagcttttgcccattcagtatgatattggctatgggtttgtcataaatagctcttattagtttatgtttcatcaatacctagtttattgagagtttttagcatgaaggggtgttgaattttatcgaaggccttttctgcacctattgagataatcatgtggttttttgtcattggctctgtttatgtgatggattatgttgattgatttgcgtatgttgaaccagccttgcatcccagggatgaagccaacttgatcgtagtggataagctttttgatgtgctgctggatttggtttgccagtattctactgaggattttcacattgacgttcatcagggatattggcctgaaattttctttttttgttgtgtctctgccaggttttggtatcagcatgatgctggcctcataaaatgagttagggaggagtccctctttttctattgtttggaatagtttcagaaggaatggtaccagctcctctttgtacctctggtagaattcggctgtcaatctgtctggtcctgggctttttctggttggtaggctattaattactgcctcagttttaaatttgttattggtctattcagaaattctacttcttcctggtttagtcttgggagggtgtatatgtccaggaatttatccatttcttctagattttctagtttatttgcatagaggtgtttatagtattctctggtggtagtttatacttctgtgggatcagtggtgatatcccctttatcattttttattgtgcctatttgattcttctatcttctttattaatctggctagctgtcttttttattaatctttttttaaaaaaaaacagcttctagattcattgatttttttggagggtttcttgtgtctctatctccttcagttctgatctaatcttagttaattcttgtcttctgctagcttttgaatttgtttgctcttgcttctctagttcctttgatttgatattaaggtgtcgattttagatctttcccactttctgatgtgggcattcagtgctacaaatttccctctaaacactgctttagctgtgtctcagagattctggyacattgtgcctttttctcattggtttcaaagaactttgttatttctactttaatttcgttatttacccaggagtcattcaggagcaggttgttcagtttccatgtagttgtccagttttgattgaatttcttaatcctgaattctattttggttgcactgtggtccgagagactgtttgttatgatttccattattttgcatttgctgaggagtgttttacttccaattatgtggtctattttagaataagtcctatgtggtgctgagaagaatgtacattctgttcatttgagttggagagttctgtagatgtctattaggtttgcttggtccagagctgagctcaaatcctgaatattcttactaattttctgcctcatttatctaatattgacagtggggtgttaaagtctcccactattagagtctaagtctctttgtagatctctaagaacttgttttattattctgggtgctcctgtattgggtgcatatatatttaggatagttagctcttcttattgcattatttcctttaccattatgtaatgctcttctttgtcgtttttgacctttgttggtttaaagtctgtttatcagagactaggattgcaactcctgcttttttttgcttttcatttgcttggtaaatattcctccctccctttattttgtatgcatacaactctttaatgaatgtaaatatctgagaggtgttcaacaatttttcctcttaggagtatgtgatgaaaagttttggtgacctgtgcttttaataattgacttgtagatcttgaggggaggggttaggcttcaggttcaacatacaagttaaatggaacactcatatcttgaggttactgccaatactaaacacattgtaaagcaccttaggaattctttcacaggtgttctgaatagtaatttttaaacaacaaaaagagaccctctgtcagttttgttttattcttttcaattaaaagagagagagaaagtaatttgctatcaaaaaaaaagtatgcaagtgaacacagctcaattagcttttaaacgtgaattttaattagtgttctgactcactgtctaatttgaatgttgtcagttatctatggtttagactattccatgccaaaatttactcatttgttaggaagagccaaaagttggcttaattccacccctctgcttagcattttattaatgtaaagcttcttgtagttttaagtgccacataaatgcctttgtacacctatctgatacacgtcttcttttcaaaacagagtttttctactagttttttttaccaagtagaaattagtcatattcattcatctgcttctttagttaattcagcagttatttaatgaatgcctactatatgttaagctttgtcccatgcattggagatacaacagtaaacaaaataaaaatctcaacaccctgatggagtttacatcctagtggaggaaacaaataataagcaagataaataaataaggggcataaaatattctctcatgagaaatcaaaacaaggacctatgttgggaggaggcagtgcaattttagataaakcacctggggaggawctatttgaaaagcactggagtaaagatatttgagggaatcagccatgaagatattgggtgaggtgctttctctgctgagaaaacagtgagttcaaaggtattagagtgtgcttagcaatgtagggaagtgtgaaaagccagtgtagtcacgtgaggtatacacagggaaaggaaaaagatcaygcagggtcttgtggtttttgtaaggtggctgagtatctgaatgagaatggaatccattagcaggatcactttgcctgctgttttgagaatagaattaaggagacaaaggcaaaagcagaaaagtcacacattcctaagagttattgcaataatcagctgagaaattttattgcattagctgaaggtggtaccagatgtagtcagattctattctacttctgaattttagaattcagaaaaytttagaaatttctcttcttaatttgaagatagaactgacagaatttactgatgaattggatgtgagatatattcatcatctagtgctgcataactaagttttattcacttaagaaacacatatttgttatctcactatttctgtaggtcaggaattcaggtaccccttagctgggttctctcctccagggtttttctctcaagaggctgtaatcaaggtgtcaacctgggatctaccctcatctcaagattcaactggagaaagatttgcttccaagctcactcaagtgattgctggcagcatttaattccttgccaggaggcccacttcatcaaagcaaacatacaaggatagctaaagaatataccagcaagaccaaagtcagagccttttacaacctaatcacagaagatcactatatcagctttgtcataatctattggctaggaagaaatcgctaggtccagcctacacttaggcaagagttttacacaaagacatgaacaccagtaggtgggatcattgggagctacatcagaagatgcctcccacctaaggtatgccaggrggttgggaaggggaggggggtgscggttggtggagaagagtcaagaatgactctcatgtaaataacatacataggattattttacttgataaagcctcttttggtgtttaaaattttattttctcccttgaattgcagaattttaattgctataaattttaagttcaaaatctttgtcttagatcatttgagctgctataacaaaaataccataaaccaagtggcttataaatgataggaatttattcctatcagttctgaaggctacagagtccaagatcaaggtaccagcagattcagtgtctggtgaagacttgcttcctgcttcacsgacagctgtcttctcactgttttctcacatggccaaagggatacagaagctctctgggatctcttttataagggcacaaatcccagtcatgagatctccaccttcatgacctaatcacatcccaaaggcttcacctcttaatatcatcacattagtggttaggatttcagcatacgaattttggaggaacacaaacattcagttgatagcattcacgcattcattatatcctttaaagaaaaaaatagactgtctgcctccactcataatctgtcaakgacattygccttatgccagttctacttgttttctktaccattctggagttcccagaagttattcagtcccagcaatgtttgttaagcattcaaatgtgccccttgttgccttacagaacaaagacacaagtccttgttctcaagaagagctcagcaaaggcaattgtttatctgttagtttactgacctatttaaagtttaggaataaataaagtttttaaaatgttaaatattttggacaaatgtccaaggtcatgaagcaacatcgtttgtctggggtaaatacctgaggtttgctgtctcatgacaaggaaattaaggatgcggacacacaagggagtttaagaggggaggtttaataggtgagagaaaagagaaaagctctctttcctggagtttaagagtggaggcttattagtcaagagaaagagaaaagctctctctcctgcagaaagagaggggctcccaagtgggtcttccagtttcatggtgaaatacacagggggttttatagatgagcttgaggaggccatgtctaatttacatagggcacaagagattggttggaccaggtgtgtcgtttacatagtgcaaagaagctagccgccccaacctaatcttttattatgcagatgggtcccctacctggccagcactatgttacctgttcctttactgtacacttggttgacaaagaaaagggaagatggagcctccaggttgaacatacctggcccccaggtaaccttttcctattggcacagttgttggcattcacctgtgcaagcttccagcttgcttatctatgtctgcagcttgattttacaagctgctctttgttagaaaagaaataatttgggggctgctttttgttaaaagagaagccttaccaaggactcttttactctcaccaacggctgaaataatttctttttagctcctgtatcatttatactactagtaaatggcagagctggattgacagtccattctttttatataaaagttttccatttttgagaactttgtaatcttgagggacaaaaccaatgatcttgaaaccatcaaaaaaaatggtgactttcaaagcattgtaatgtgaaatacaagtacaatggaaacatagaaaaaggaacaataagggtagactgggatagagaaactggctgggaggagacaagaccaaactggagccatggataatggatagaaggaagatacacagattatactgtattgtgtagtttgtgcataggaaattactgaatacatataaatataaaattgatgttcgcagagaatagttaagtgctttcctttgattctgcaaagtcatatattacccctctctttctttctgaatttccttttggatggcaattgaggaagtaagaaataaatacacatccagtgtactaataatttaacaatcactctttagtgtcttttggccatcagaaaattatattgtcttgtagacaaccaaaaatatagcccattcttagtgccacctgcactggcctcagttccgtgtgagcccttttctgcctgtcctaaccacatcatgattttggaatatgtgtgtatgttcataccactccaaaaatttcccttgggctttgtgttgcaattttccagcaagtacacactccccactctctctgtctgtaatcatctgtgctgattctgaaactcttcaatctctataaaataagaatgaggtgcactgatttttttttaatgaaaggccacatcttttattctagactctctttcaatcagaatgaatccagtgatagccatagtagagtaaactgcctattcttagactttttaaagtcaatgtgaacaaagataatatggactgtgcatgaatctagagtgggggtaatcatttataataaccaaaacctaatcagacacttggtattatttaattagaatctaaatatgtaaataggtgacaatagttttttttaagtcaagatatagaaaattctacattatctacttcttttataaccttctttctttaacattaaagaaactaattaacattaatttattaatgataacaatttattttacatcaatgttcaaaaatgaaatttaaacttcttaagttttatggagtaatccttcctgttcttatttactaccttcatcttatccaccataagctaggttagttttatagacagaaaggaatgaagaaatgatagggataggccagttaggtcttccaattgcttttcatttccaaaagtggawtaaacattttaatatattatgcattctaagggaagaaagaaatgttagtgtgaagcaataattttctgggcatactgtgttatttagagcaaaagatattcccatatcccaaagaacttgcttctatgacaagtcatggattaaaacatgaagaaaaagtagattgcatggttagtcttgcttagcaccatgcctagtaacttgcagatgctcgttgtatatattatatgaatgttggatgaagttttcaaataattcagtgtcctaaatgctaagtagaggtagtgggaagaattctaagatggcctctagtgactctcctcctagccagatcccctgccctacaatgtgggaagaagctgaatatgatgagtatcactcttgtgattgtgttacattatatggcaaaggacagattatacagagtgggcccaactaatcactagagcccttgagcccttataagcaaagatttgcctccagctggcaaaaaacaaagtgagagattcaaagtgcaagcagaatttaatgcaaggggatgctctgtggctgactttgaagatggtaagggtcatgcagcaagcatgacgatggcttctagttgctgaaagtggcccctggctgacagccagtttaaaaaaaaaaaaaaaaggaagcggggaggggctggactctccttacaaccaccaggaactgaattctcccaaccatctcaacaagcatagaagtgagtattttcccagagccttcagataaatatgagtctggacaatacttggattttagccttatgataccctgagtagagcaccagccacaccattcctggacttctgacttacagaactgtgagccaataagtagccatggttttaagccactaatgaagactgtcagcactgactcttattaaaatctaaaagaagcccgaggaaagagagatttaagaagtttatcactggaaatcataagttaaaattttttaagtgtgtaactgttcctcaggcaacccccaaatattataatttacaaattcataaataattgcatatagaagagcaagcatttggcagaagtcagtccactccaagttgtttttagccatttaacctaagtctaaggcatttagaaaaagtaaaagagactaacctacatgaaaaaccagttaataaactagcctatgttaggaagcaattaattattttggttgtaaacttccctcactacaacagatttctcaaataaatgttcatgggaaagggtgaaagattctttctactgcttatacatcaatccctgtgaatgtgtagacaactttatgttatgtagttggcatctttcctgttaggaacaattaaattcaaattccactatttggattatatattggaaatacactagttacagtgaaatttatattgaatctgttgcatgcttaacctatgcctaaattgaatggacactttaatgaaacagactcaatattaaccaagtctgtgatgtacagagaatcactgttattatactacatcaaatgctatactaaagccctctgaaactaaractagagtctagctgtgtcatccaaactggagtgcagtggcccaatctcggctcactgcaacctctgcctcacggggttcaagtgattctcctgcctcagcctcccaagtagctgagactacaggcacctgccaccacgtctgtctaatttttgtatatttttagtagagacggggtttcactatgttgaccaggctggtctcaaactcctgacctcaagtaagatgcccgcctcggcctcccaaagtgctgggattacaggcgtgagccatcgcacccagcccttcttttttcttaattacttttttctacatgttatacttattaaggcagagtgatatcgtgtttaagaataatgaccctggactgaggtaaatacaaatttgaatctgacacttaataattgtatgattatgaaaatgtttctaaacctctctgagactcagttacttaatatgcaaaaaagtatgtttaaaagcattgttttgtaggttttaattaaaactaattgtccaggtgcggtggctcactcctgtaatctcagtactttggaaggccaaggaggacggatcacgaggtcaggagtttgagaacagcctggccaatatggtgaaacaccggctctactaaaaatacaaaaaaattagccaggtgtggtggcacgcgcctgtaatcccagctactcaggaggctgagacaggagagtcgcttgaacccgggaggcagaggttgcagtgagctgagatggcgccactgcactccagcctgggtgacagagcaagactccgtctcaaaaaataaataaataaataaatataaataaaaagattgacatcatattcatatatatatatatatatatatatagcacttagcacactgcctagaataattaaatcactcagtacatcttagctattttttattgttgctatatgaaaattagaaaacgcagattagcatacatatcaaataaaatatttgataggccctgttgagagaggcagtagtattgcctagggattaggcatgcagatcctggacaccgtattagggtaaaatcccrgatctctcactcattatttacatcaccttacactttctggggtctgctttcctcagctgtaaaatgaatgctaatattaatacttacttttctagtttactgtaaggatcaaatgagttaatacacgtaaaatgctcaaaacaaattccggaacctagttgtgatatagaagtgttagcctttagtgtacctcagtggtaaatattcttcaaaactgtatgtttatgtgtatgtatgtatataatctgcgtggtattttatatatatagtgaaaaaggtgcattatagatattgtgatatacctcactttatttaaaaaatacagcctaccttcagcatctttctaaaaagtaagtagcatattttcataacgtcatttttgcaacttaccagtactatatagttagttaacatcatttattgacttattacattataatttattatgttatagttaaccaaacccctgttgttggacattcaaacaaaagttggacaaaaatattgtttccagtattttcctgtgactgtatattcccattgagatgaacttctttgtagttaaacacttgcatatgtccttagttatttctttggactatttacatagggtggaattgatagaacagagaatacacatgagaatattctacttactttgatctacattgccaaattgccttttattaaggttgtaaggatttacacttccattagcaataaataagaccagctgtttcctgcatctccaccaacatctgtattctaacttggtttgttaatagtgtctaattgttgagataattgaaattagttgctttataaaagaagctccagaaagctaaatagccctttccactatgtgaggccacagctaaaagatgccatctgtgaaccagaagcaggccagacacagaatctgctggcaccttgaccttggactccacagactcagaactgtgaaaaacaaatttctgttgtttataagctacccagtgcatggtattttgttatagcagactgagtgaactaaggcacttgcctcttccagcttcaagagactgcccacattccttggctcatgtccttccagcaatagcatcactctgacctctgcttctgttgtcacatcttctcttccctctgacccatctgcctccctcttataaggatgcttgtgatgacattgggtccacccaggaaaatctccccatctcaaaatccttacttagtcacatctacaagtctcctttatcgtgtaagtaacatacggacaggtccaagaattagaatgcagacattatgagtggaggagtgggcgcattattcagtttaccatagcaagttactttcatttcttccttgggtagcctttactttaatccacagtctgttagctaatccttacaaacggctgaagaaatttaattccaatattaaagtataaagggtctacaaaatattggctattcacagatactacgcagaataaaaaacaacccttttataaaagatatagctaatgcacttcagagcaccatacaaaaaaaaatgtggttttcccttaagggtattacatgcacattatatctgacattatgataaaccagagtgaaatcaagtaagcagtccatttctctcttattcccttctgtttgcattatctcgactatcttagttcaggcccttttttgtagactattgacagaaggtaactcaaaaagcatggatgactctgaaatctgggccagtgcccatgggaaagctaaatgaaacaactgcatttttgttgttgttgttaggctgcaagagaatctaaaagttagggccaagtttaaaagagaggaagttttaaatgtggactcgctggttttattccaagtaatgtcagttttttggcaagttgggtttctgactcaggaatttctgctcgctgattaaattggcctcatttcaacacataatattggctgcttcctaaagattaacttgcttaccaacaatataatctactctctttattagtagtaaaattacattatccagcattgcattcttttcaatggtttgcaaacaaacattttaaaaaaaataagtgctataatttataaaatgctcttttcacatagcatcattctttgaaaagaatactatagcctttattggatacacttaaaaatagagtttttctataaatcatgggataattcagtaattaataaggatatatttgattttatctccattgttaatagtcmctatcatcagcattaattactgtgatctgattctgacttctgttattgtttcagagtcatcagatttgctttagttattcattgtcatggtatatcctacgtaccaaaattttataacatatagaatgggctatttcactatttgattttcatgcatacttatagtagagcttaccaattttagtaacatatctaatggaaattatataaggcagcaagaaactgaagcattacctccctttgacaatgagtagctcagcagctgagtaaaattctgaaaatataaattgttagactcctctctgccataaagaaatctttcacctttaatgcctcaatccaggttttccctcccatagataaacgcagcataagcaacatgaggatccctgttaaacatttacacaagaggaataatacttcctaattaatcaccagtggactgcatcagcgattatatgatggtcgtgtttctaatgcaggtgttcataatttgaatggaatttaatgagcacgggtagtttatctgcatttattctctggtgcaaaccaaggcaattaagacagctttgtgttcatgtaatcacacagcatagaatgtaagaaatgggagagacatcaaatgtcttcatgacctagactcacattttacaattgaggaaactggaggccagagaggcttgaagagcctccaaatccctcctccaaatccctttatattatccataaatgagtttgttgacggccttagagctggtaatagccagatctatgaagatcaaacaggcccttcactcctccgctctgctctttacttggtctcacttcctcccagatattcagtgtcctttcctcttcttcacatcccagcctatcaaagccctgatctcagatcattacacttcgctgtgtactgaattctattattaccttccccagaatgatctgtactaacaaatcataaattgtggatttgtggagtgaaaaattgtctgactttagtgaatgaaagaaatttgaaaaggggctgcctcaagtgtaaagctggcctcatatgccctaaagtactgttattttaaaagtccaagatcaacgctagcagatttagtgtctggtgagcaccttttcctcatagatggtaccttgtatgtgtcctcacgtggtggaaagagaaaacaggctccctcaaatctcttttataagggcatgaatcccattcatgagttaggaggcctcatgacctaatcacttcccaaagtccctactcttaacacaattgcattaaacattaggtttcagcatatgcatttgggggaaatacaatattcagactgtagcaataggtctaaattgtaaatgacaatacaacaaactgccatgaattcactaccaagtttaagaggcatcaaaataggaactttgacaactcctatatgacctatgccaatcatattcatttaatctttctcatcagaagaagaaatgactttaattattccaattcactttttttgtatgaccttatcactaatgtttacacccttacaaaaatatattatttagttttatgtgtttttaaccctgcataaatagaattgtatgtgtcttctgcaaattttgtgtgggcaaaattatcttgacattcacgcatgtttttgtttgtaaattctagtttgttagttttcactagtttattgtactctgtagtataaatgcatcacaatttatctcttctactttggatgccatgaatatttattgtgagtactgatatttttggatttatttctatcattgtattttgttttttctaattgccttcattttctgtttctttaccctttcctttgttatcttattttaaaggattttttattccatttcctccttgactagtttgacatttgtaaactctctaatctaccaaagctgtattagaaattgtaacatctacacttaatttatcagaatctaatactgaaaaataagaaactttcttcacctagtcattcattcaaagaattgttacagccctttgaatacctcagtcaaaaaacatacaaaaaccttttggaagttcttattggaactacactctgtgaaaacttccttcttaatgaatttagcgtactttatgtgtgtttccatcttagtgacatttagtacaacccaaacaacttgtttcctactttatatgttattggtgttaggtatyagagttctattttactgtatatttagctttacaatatgtcattagtagctgtttatttagtaaatatttataggttttgctttytttgtccatcatttcttcttgcattttagtcttttcatctagaatcactttctttctacctgaaaaggcttcttagtggaagggtgttgttgcaaactctggccctttttattttctaaaacaactttagttcatattcatttttgaaagatatgtttagtgaatatacaactctaggttggctgttgtttcctttcagtaatttggagatattctatgatcttttgacttcaactgttgctgttgagaaatcattcatcattctacttgtttctttttggatagtcttttcttctggccatttttaagacttctttgtgtctagatgtgtttgaatgtcaacttgtttttatttattctgcatggaagttgggcttttggactttgaagataagtgtttttcattaacattctaaagttctgaaaatttctcaacttttattgcttgggatactgtstctttcattatttccctgttctgcttctggaatcccatatattagatctactcgctctattttacctgtcttttttattgttattctacatacttctttttttatcttcctacactagattctagataattttttaaaaattttattcctgttctctcctcagctatttttaatattctactgtgtgtatatgtgtatttatgtgcgtgtgtgtgtatttgcatgtgtgtatatattatacatagaacaagagatagttctaaatttattttaattatgtatttttattactgaaagttatttttattatttattctgttagtatagtgtcttgctcttattcatcttttttattcccccttacttctttaaaaagttgtttaaatgtattaggtatcactattttctgtgtatgtctgataattacaactgctcaagtttttacggatctaattctttcttattttgttgctactgactctgatttatagagcaaactggaataatgttctcaacattatcacattctatattgaaatactctaatttctgctttcaactcagaacatcttcagactttgtattaaagtattgattttcaaacttccttatttgtagaaccctttttaaaaggaagttttacaccacacaataatatatacattttaaagttaattttattcatataattgctttacataagtttaaaacatttgttacacatttaatcagataagtctattctaaggaatatttttagtgagtgccttcaaaaagcttaaacatttgtcagatggcataatgactagttggatggatgatttatttagagaagctcgaaaggttcaataaatagcacatagggaaaaagtcaatagcaaaccactttactttagcacaaacaggagaaagtcctcttaagatgactctaaggtcagataatcaccattacccttctctaaccttcatctgttgctaataactaattcaatcacacacaaacaaagtaataacatttgacacaaacagaattaataacttcttttttcacttggaatgtttctaatttagtagaactaatatgaaaatgcaatagtgcatttcttaaaaacaaaacataatcaacaggactcttaattttcagctttaattgctatttttattgagttcacttttggaatttaccattttttagaagaataaattctaaataactttactattgtcattcayagtgtattaggcttgaaacgctcaatgataggaagccatgcacaaataatttgatactgttaatggaacagcctcattaattcaatcaaacaagttagaactatctcagtttgctcaaagctgacaaatcaatattaaatatacagacacagcttcagagaattgattctactcctcctactcttagaatcattccaggtataggtgtattattctggaaagaaacccaacacacaaaatgttaacctccaaaaccacaaagcaagcatgcaaagggtaatatttcttttttcaaatttttatctacaaytggtttccctcttggtacttggaatgctctcctcagccagaacatttaaaagagtttgttttacaaaattttatttacaggttttttttttttcagacacttttcaactatgtaaagcaaagtagacctgaatcaagaaccaatgtaagacaagatttacctgacaaggatcttgattaacatttcacttttgataaatttggtccttccctgggaatccacagaaatatgctcctcatgttaggtagtgagatagacattagcagctgggaaggggtaagagaagagagcagaaaagccatctctaaaactgcatctggcccacctaagttcagctctggaaccaccctaactccaccctaacagatggagtttttggtggagactgtatccagcacatcttatagaaagagaaactagagcacaagtggaaatcccccaaagtagcacatgcccaataacctaaagctctatcttggaattgaccctaggctcatgataccattattataataaaatttacatgtggtttttgctcccctgagtgggcattgttttaaaacaaattataggtaaaaatatgcacagtttaattttagctacataaacataaactgccaatcaaatgacatcatcctgtcactcaaacacagcccaaacctcaactgctccccagaaacccataaaaggacctcaagttttgtaaagaggtgctgatctcacttcacaaaaataagtctgctctccctctgagagtatatttctatgcttcaattaactttgctttaagcttgcattctggagttagtctgcaatttttttgtttactctcacaagaactgagattgctggtccagagctccaactctgttcatctccttggttaaagaatccattccaatgcagaattcccactgacacatcacaggatcaaatgttctggtggccaccctcttgcaaggacttttcttttaactactcctgacatactctattcaccacctcacaactgctaagtattcttccttcttgccttcagcattcttgcctacggaatcatcttcaaattcatggtcagatactttaaatgcttaagaggatattcttgaatatccttatattctattattcagttgatctgactgacacagtttcttaaactcagtttaagatcattatttataaagctacagggaataactagttactgtgacttctccctttattgactctaaataccacattgtgattcattgttgtagctcatgatttttaagcagtaatattctgtgattaaaaaataatttccagccatttatgattcaaaattggttgctcaaggaatgaatttcataaaaaataatgactgtaagtgcctctgtgaattacttttttaaaaaaatattttaatcctatccttattgctgtgaagaagagactacaggaagaagcatgtgcttaatgaccagaaaatgagtcaaaccattgatgtgaaactgagcagcttaattttgttggttaatggtgagtaatgcacaaaacaagccaatgactaaaatatatcttagggagaagaaaaagaccaacatgattttattcctctgaaattataacatcataatccatctttgcagcaaaagggtctctagaaattattacacacattccttgatcatatacccagattgcttcaatcagctaattagacaaagccattgtatagtattttcaatctttatttccaaatcagagttaaatttgcttcctacgtcagtgtgactggcagctcctctgtcaccctcaatctctaaactattgcttctaatttggagttgcctgagagacccatttctgaaaaggaggcttttacctacaaagcagtttatagcttctttgatttcagtgcaacaaagctttcgactctgcttaaaatggaaatgattatttcttacaggaaagaaacgagtgaacccctgctggggggaaaatgttttcttggaaatacttttataaacttggtaattaatggcagtaaaattgcttatttaaaactatgaccttttcaaagacakgctgaatatgctcaaattatcctatacttgtaatcatttttcaaattgtagttgaagtttatttaaactattaaatataytactctgacttttgtcctacggatgcttatcttagcccctctgaatattttcttacaactaatttccccaaatttcttccactcctcaaattattctttctctctcccctccacttctcttccctccacatttggtttcttatattatcttttgatattacattttatttttctccacaaaagatgaatgtatgcttaattcacctgtgaagtctctctttaaaaaaaaaaaaaagcttattacacacactggttactctaataccagatatcagcaccctcttattacctagctatcttcactaattgtttaaagcttgtcaagtgtggtaaaacaaaatgcagccacctgctactctttttttttttttcatttgggttttatggctttctgagactggtattaccaactttgtcataggctttagagtcatatctaaagtttacctgagagttaaacttcagtatactttatttctttatcacattttgctattatatctcctcttttactccacacatccttctgcttctgaccacagtgggtgrtagactgccaatttaaggcataatatagtaaacaatttgggagatattatttataataatagtatcatgagtgaaggtatgtggctggcaaagaagcagttaagattataactgatctagatctagaccagcatttgggttgagttagtcaaggccaaccagaatatktttcaaggctgcccgttagcagaaaaagtcttcaagccaggataccagttcaaggtaggaagacgcagggtccagggtctctaatacttggtcagagagctttcaagtagagacttgctaataacttagagatgcatatcccaaacatttcttccatgaaaccacagccccatgcggttagggcttagtggtcaaataaatctgcaaagggctgaatgctttgttccaaccatagaaagttgtgcactttaaaatgtgaagatgctgaaaactcctgtgctttagaacaattcaatttttgtagcttttctcaaacctatttgacctattgactgtctttgaaggaatactctttggaaactagagcctaggatgtatccttgccacctcgtctctcagcttcataactggtccccaagttctgtaagccacacggttcattcctcaaaaaatcccttgcaactcttccttccttccagccaccacccatgttcatgtcagtggttctcaatgtcaacagaagggaggaaagatggagatagttcacatcaacaggagaatgtgtagtttcaaaaatcaaaattaaatattataacgttttattataatgttttattataatgttttatttatcatcaaactaatttactttatttcaaagtttccaaaagaattaaagggaatgagattaattttatatatccaaagacagattcaattttaaaaagttaagaaacgttaacttagacctttatgatgccctaagcatcgaatcagacttactctaaactatttttcttccctccaatgtaccagagtcaccctcagcaatgcaattatctgaaaagaaacaaatgaaaaaacttgtactcattttgacagactttctggtatgccataaagatgccaggggaaggaaagcgatgctccagaaggaccagttgccttacctcagacaagacaattactgctagggaccttagtcttctcatgtacaaaatgggcattcgggattagaggaatctcaacctacatgaattcaacatctcctctctactcaaaaatcttgaatgtatatatactgctctccccggtgctacctatagaacaaatctaccttttggcttaggtatttaagaccttccaaatctattacaaatctatctttgtaaccttttcactaatcctcaccattaactttctgctcttgtccaatttttcaggtaactgttgcctgaataattcttgcttgttctcatcacaaagccttggcttatgacagtcttatctctggaaacttccttactacttatttcttttccaacacctacccatccatatcttatttttttaggattcaattcacagagcacattcccctgtgaactttctacaattattctgaacaatggtaatttcttcctaactgattttctgtaccaaaaaaatttatactattatttgatccttataatgtaagatcttgtgtatttaagtatgttttatttcttccaattaagttgtgtgagtgcctctggggctagaaatttttatgcttcaatggctttctcataatgcttagtaacatgttacccatagtcaataatcaatatttattaaactttggatattaattaataatgaaagatctgtagattcataatagattccatttatatcaaattagatactgcattacaaaaatcagaatggaatactcttagtaggctgtgagaaatttggttctattattttaaactactacactgaactttctcagtcacctaaattatccaaaatggaaactaaattcaatttctttgtatcttcaaatttgaaaggactttctacttttcttgattcaaaaatatgttcaaatgtataaaaacaggaaaagaagaaacagattaagcagaaattcaattaattcaagaagtgatcataatgatacatttataattctttcacttttgcttaacatatctttatgttaaaatcatcacatcttagaaagaaaacatctataaatattttattagtattttttggactctggatttgtgtccaaagacgttctttaactagctgtacttatcagctacctaaaagtcctgtcccaatcatgttatatcacatttttaacttgtctgcttattcatttttgtatgtttactgtctccctctccctactcccaactataatgtaagctctgtgaccacatgaactctggtcatcacgatcaccctcatgatcagtaaagtcttagtcacttcgctgtattgtcagggtttgtgtaggcatttagtattatatacattcattgaataaataaaatacttgcctgaactacagcaaataattttttctctcttggcttcaattgttgcccctctaaaaatagaaaagtttatctattccaatatttttattattattatttggagacaaagtctcactctgtcacccaggctggagtacagtggtgtgatcttggctcaccgcaacttccacctcctgggttcaagcaattctcccacctaagcttcccgagtagctgggatgacaggcacccgccaccacgcccagctaatttttgtatttttagtagagaggcggtttcaccatgttggccaggctggtcacaaactcctgacctctggtaatccacccacctcaccttccaaaagtactaggattacaggcgtgagccgtcgcgcatggcctattttgatgttttttaaaaatgtgtttctccaaatcacaaggttcattagagctctctcagagtgtgaaaggggaaaccaaaacaagcagtggtctaggctgcctactgccctctcagtagggcaaatcgttttttatcctgggggtgcatgttgaggaaggaagatggttctaagtaagattttgcttttacaatgttttaaagaaacttctaaactagattatttccatagatctttccagagtccaggtctgatttacagattatgtttgtaggtttgtttttgttattgttgttgtttaatttcacatgcttggaaaaacactgaaaaataattatcctctctgatactgtgcaaactttaatctagaagtgatagcacatgtgtcttatcaaaagacaaaatgccctgtgtatctggaccagtctgtagacctttttatatggtactgaagtccccagtattgatttccggctggtgctcatgtctgctacttctttgcctgcttgctcagttcagatcaaatattgaaacaaccatcccagtgataaggatcaagtagaaataatgtatctagagcagccattcagtacttgttgagaaactaagaaaaatgctcagctatctttgatgttagtaagagtaatgttgcagtagagtgcctgctgaattgattctrttactgttcttacagcggtgacttgacttcaattactgctattgttgttatgattattatatatttattctaatttttattacagtagttgtttcactgatgcttttgacaatgacatgaaactaactgaaggtacagaacttgaatatccttgaaaccagttttgtcttaaacagttgagaaagcactctgccatttttcttaattgtttttggcaaaaacagtataaaataagtaatacttttaatttagcaggtattttgatggaggaaagtttaagtttttcattgggtcatatttggcaaaacatttttggtaaaatgagccacacagcaaaaatatttatgaaatctggaacaatctgagctagtattcaaactgcctatttttgtgaataccaagaacaacaactactattattattgagcagatattaatatcacacattcactaggtactgttctaaattatatcatttaattatcacagcaaccttgtcaattgagtatcattagctactattgagattcagagaagttaagtcaggggccaaaagtcacacagcctttaaatcgtccaaccatgtttccaactcagatatagccaactccttagcctgttctttgcctatatttcaaggccttaaaactgatactagaattttttaattgacacaggcattgccagtccaagaaacagaaacggaactggtaatgagacgtcctgaagcagaatttaccatgtaaaaacaggagactttctcttgctgaattccctatttatacctttccagaattcttgggaaagaaaacaagtgaaattcatcaaaaatttaccatctcattactctattttcccaatttgtgaaaataaaaaatcattacaaagtaattagaaaagcactacaataagccagttaatttcttctgttgctaattgaaatcaagaaaacaagaaaaaaagttaaagtaaagcatacaaataagaagatgagttaagcattattgagtttgtccaacataaaatactaacatagaggaaaatactattttaggaacagtattatagaatccttctaaagatagagcatgtaaatatttgattcataattcaaataaatgatttttaaattctggttgagttaatgccattttctaagaaatgtgaacagtaactatttgtccttttttccgatcagaaaaaaagaaaattgctaaccaattaattccaaagcaatttcagttatctgccctttaagcactatcatccaacctctactgatgatttcagagacagagaagagtctcattaaggcaaggctcttaaaacttttcttaaaggataattatgatgggagaatctcataagaacacaagaaccgaatggtccggtgtgaaaagacttttctaaagaggagcaaaaatgaaaataacaataagaataaaagccaccgatagattattataggctaatttaactttggtagatattgccaccttttttggttattgctataattgcttatatcttaaataagactgggttttagagtctgactttttttttgcaccaacattgttagtagcagccaatctaaacttcttacaacaggcttttgaaaattctttagagataaatgcttagattacttaactaaatagaatctctctctcaatctcacccaccaccccaacacacacacacacacacacacacacacacacacaccatttttttcttacatttgtaattaatttttcccccgagatgaaaaatgtccaattctaaaatgacatggcttatctgatagaaaagtactctgtgggatgattcttagctaatgtaactttaccaacgatgggggttcaacaactaagttcatttagttatgcaattatttttaaacagtaacaattccaccaaatttttccccatgatctgaatcctcaaatcacaatatgatagagaaactctggtattctcttggagtctttcaaaattctcaaatataaattaagtttaatcagtttgtaattaatgtctacattaataaatatattttaagtatatgcatgtatatgtataatatgcaaactcttaggcgactaaaggaaataccatgtgaaaatgtaattacttaggattctataattcccaagctattactaggttagtttgggctcatattccaaaattttaatcaataaataaattttaggaagatgggatttatttatttagtagtatttaattcatttattcaagaaatattaactgcctactctgtcacaaggagaaactgttgaaccacaagggtgtaaagttacagttctgtcccgaaagaatttaaaatctagtaggagaaagacgttttaaaaaaactaaaacacgatttttaaaaagcaaaaaataactgtcaataagaacaacgaatagaggaaagtacttcatccttacacgggtggataatgcatacctgcccaagcctgaaatccaaggaagctttttttagaaaatgtgctaagttaaacattaaaagatacacagatgttgtatagaagcatcatttcagatacagaggacagggcaaggcaaaagcattacagcttgagaaagctgagaagattcaagttaccaagggtagtactttatgtttggggtggaagaacatgattggaaatatgagataagacttaaagacccgagagaaacaaatcatgaagtgctctgtttgttatactaaggattttctattttatcccggggaaggctaggtgattttaatccctagaattagatttcattagactaagtaaaaaaggaagagagggcgggaaaaaattcacaggtaatgggaaaactgagtaccagaaatgaaggccccagttaaactctgtcagcaatgacagaaagaagaaactagatttgagagctattttgaaggtaaacctaataggacatggtagaaaacttgatgttggggatgaaggtgagagaagggccaaggataacagcctcatttttagttagggtgatggaagtctagccatcctattcatggagataagtaattcaggtgaagaagcaggtattggggagaaygatgatgaaatcagacatgttaaggttaaaatgccttaggaaaatttaagtgtgctatcttataaatagatgaacatggtctggattgaaaaaaaaaaagagttctaagttggaaactgtatcagtctgctagggcttcctagaataccacagattgggtgatttaaacaacagaaatttattttctcacagttctggaagctggaatttcaagatcgaggtgccagcaagcttgctttctggtgaggcctctcttcctggcttgaagacagacaccttctccctgcgtcctcacatggcctttctctgtgtgcgtgtgctctcctgctctctcccactgctcataaggacgccagccctatgggattaagtccccagtcttatgacctcatttaaccttaattaccttcytaaaggccctgtctctacattcagtcaccttgggagttagggctttggcatatgagttttgggagaggacacaattcaaaacaaaaacrtagattaaacgacaggacagacatgattatcatcattttacaaatggaaaggctgaggttggaactgttaaactgcttgtacagttacagagagagcatttgaaacgaactgatagagtgaaaaggacaattatacctgcctataaggtacaacctgaacaacaatagcaacaacagcataacataagtcaacagaaaattagcacaaggataggtaaattacataacataagtcaacaggaaattagccaggtaggttgtggaggcctcatagaacaacaccagtttcttactgagtttccaaaatgaatgggattaaatggtcccagccaactttaggggacaagttcttttatgacaacgaacgagaatgctgcagaagttttctcaggacatcaaacacaactccagatcttatggataatgtcccagagaacctttaatacctttacagaatgaatctcactgtttgtgactctgaagaatgaagggagaagcacctgccccagctgtgatttgaagctgaggttccagggaaactaggtatttcaaagccagcttcgccttgcacctataaacctgcctctccagctgtgttcaaacacatgaattgttcactgcgcaatatgatgattatccagctttcaccagagggctgtgcaagaacaaaaggctgaggggtaaaggggaattttattattagtttgctattcttatgaaacattcatatagcaaaggaattgccttgctgttaaaagaaattttgttaaggaaactttatgaaaaagatgcttacattgcctttaaagtaactatatgggtatttagaagaaaaaagagaaattttttaaaaaaaggactgagctgggcactcagttcagaaccacattttcaaagagtaagggaaactgtagacacctattgaactaacttaaaattccatgagcatggattccagcattaattatatatcaagcaaaatttattttattacagcacatgtgctgatgttagagacttcccatttcttttctgctacattttgagttattttgaaccccaggcccagttaaaatgggtagttcaagcacatctgttgcatgtgcacagttcatcaagattcttaggttcgcaaatgcaatcagtgtattgctttcaatgtggcctcttctcccatctactcccccaatgccacccactgccatttgtctaaataaaccaaggaggccagaccctttgaaactgtgatgttggtcccactttctcaagtgaagaaggggtggaggagaagtgagtcaggtgtatgatttgcatcatcagaatagatcccacaattctattattttagtgggctgtgtaagggagagaaaaatatccctgtttatcaatatttcacacaaagttatatttaaggctgggcatggtggctcatgcctgtaatcccaacactttgggaggccaaggccagatcgcttgagcccaagagttccagaccagcctgggcaacacaaggagaccccacctctacaaaaaatttaaaaattacccagacgtggcggcgcaagcctgtggtcccagttactcaggagggtgaggtgggaggttcagtggagcctgtgaagtaaaggctacagttagccatgatcacaccactgcactccagtctgggtaacagagtgagatcctgtctcaaaaaaaaaaaaatatatatatatatgtatatatatatttttatatacacacacacatatatacattatacatatatacgtatacatatataaaatatatctatgtatgtataaaatatacatatgtatacacacataaatacatataaagtacatatacatacatacatatacacacacatacatacatagaaagttggaagcctttggaaagaaagaaggcaacctggagaacatgagacttcagagtgttaggaaccaggaagcaagagaaaaagattaaaggaaaacagggcaggaaggtggcagaagataattcctagattgcataagagtctcgggctaacccctcagctggtatccatgttaagacatcaggaggtggcacagcataaggctaaagagcaagggctggggagtcagacacacttggatctgaatccccagtccactgggtggatgactttgggcaatttactccacctgcatgaatcacaatatcctccctcatctgtgagaaggaagaaatcatatgacctggagctgaggtaaggattgcctaacacagctatgcaaaatgctcggaaacacctggcacagagtaaatgcttgataatttcataaaagaataaaattatagagccccggaactggaaggcagcttactaaacctcaccaatgccaacatttgacagagaaggaaagtgaagaaccaaagcatgcaggttcttgccagagttggtgaaagtagaaaacagtctttcaaatcacgtttcagtggattttagaacacagaatatggtgctttgcaaggagccctgagttgttgtccagaaagctgggctcttgtcataggtcgttggccaaatttctcgatcactcagtgtcctcacctaacaaatgtaagggtgggagaaatttcctcaaagtattgttcagctccatgctcttgtaatattatcccactgagaatatgagtataattatactcagggaatgtgttcagctggagtgggaaggacaaggactatttggaagcccaggacaccacagaagagagcagaacaaggtggagtttttgacaaaggagaagtggctggagccaaggctttcttggggatcaggaaaggagaaaaccaaaatgagcgaaaagggaggtgggatacaggagggcctcatagatacctgtgtcttccaaagtgtgcccagggctaaaattccacctgtttcttttgcttatataattaacaagcatatacggagtgtagtgggggagggagagaggggtcactataagctattcacagcagagtgcttaatttagaaaaatgataaataaaataacttacactaaagcagtaagtgtgttttgtaatgtaaacaggacagtcccttctcttaaaccccattatttgataaatttaacatgtgaacatgttacatgttaacgtgtgagtaggctggaacatgtgaacatatgttacgtgttaacatatgagtaggctggaaggagttttatgtatttacatgtagccttgaggtaggaggcaagacttaactccagatgtggggctcagacattggaccaaattgaggactagttaaaacaagaatggggcagaagaagctttctgtaagtgtgtgtgccaagtcaagtttgccattgccatgacaacacccaaatgctactgctcctttccatggcagcaaccgaatgacctgaaagtgaccataccatttctaaaaatttctgcataattcacccctgaatttgcgtataattaaaggtggatataaatatgactgcaaaactgcctctgagctgctagtctgggcacactgcctatgggtagccctgctctgcaaggagaaatacctctgctgctgctctacattgctgcttcaataaaagttgctaacacctctggttcacccttgagttttttatttttttatttttttrttttttatttttttgagacggagtctcactctgtctccrggctggagtgcagtggcgcaatctcggctcactgcaacctctgcttcccaggctcaagcaattctcctgcctcagcctcctgagtagcttggactacaggcacatgccaccacatccagctaatttttttgtatttttagtagagacagggtttcaccatgttggccaggatggtctcgatgtcttgacctcgtgatcagcccacctaggcctcccaaaatgctaggattataggcatgagccactgcacctggcttgaattcttccctgggtgaagatccctcccagattaatcaccaatttgggggctcacctatcctgcatcaggctcccgggttgaccacgtttttctgtgagatgaatgtaaggagctctgatttcttattacaggtgcaggaaacttcagggaaacttatctgctcaacatagttttttccctccatagctaccagctgaccctgagtgcaacactgttgtgtaatagaactcttcattgtaggttgtttacacaaacagataccatctatagctaattttaagcttatcattaaatatgtgactgaccataactgttaaggattttacttaattatcatgacaactaattgtgatagtaagtatatactcatatatatgcagtgttaataacctattgcaaaagaaacaagtttttttttaaatacaattcattgcttagccatgctcatccacaaatgaaatcaaacaaaataagcccagatctggaagagtaagtggtggagagggaataaagagaggcaaagagaatgatttcagcctaactctcaagagttttgggtcaaggttccccaaaattctactgccccagaataagatcccccttattcggcatcttagggcttttctcacctgcaatgcaatcaggacacttcctgaagctgcacatttctttctgactcttagatttttaactgtcttggctagtttttattaaactaattgagcatagtaggtctcaaaacttttaacgatttaaaaaatactaccttttccctttcacattccctaattaaaaccaggctagattctatagtttcatcgtatatacttttggacaacaaaaaacttcaacccatcttgtccaatttaaaacttcgttttcttctctaatttgacagatacctcacccaccccatccacccgccccccgccaccctcgcacccctagactccaatactagccaagatctagcttaggaatagaagatatgatctgttatttcactcttcttctctttcttttttggctgtaacttttcttagctaagagtgggaagaaaagagaaagagaaaagtgaccctcacacttgatagggcaggaattgcaatcccctctctgtgagcgcagattctccaccaaggcccactgtgggttcacggtcaaagctggctaccttggggttaccatgggtgagttctttgggaagccttggagaacctccccaccaggagatttggctctggctcaacctctacctataaaaagagtggagcacatataattaccttttatgagtttatttaaaccttgagtaacatccaccctacaaacccttgttttgtcaaactgcaggggtgcaagaatgcaggttgcttctttgcccccccttttctccatcctggccttgctttttcttcatgttcacagaagcctagggaaaatcaacaaactctctttcagagcagaagtctaaactggggtaacagtctcttattgcatacactcaaatcactataaatggctcagattgagcttccttccccactggactttgaaaggataagtggacatcgtggactcactctattcctcactgggctaatgactcatgactctcaaacacccccacctgcaaatatgtagaggagataatgcacatagccattttatccatttcctgataacccttgaagagttatctgacccccagttggtttttcgtttacttgttgttgtcttcttgttgtcaatgtttgcaacactcttgaaatataggataactattatctcttttcttcagtcttaggtcttggtagccaactccagagcaacaagggaaagtaacactcaatatgctaatacagatgcttcctcatccaaagccattggccccttttcagccacttcagtcctcaaatattaccattagggtagagcygaagtttttagttcctaagaacagccacatgtaccatctccttcactgccctcagccatcagaccctttgtttagccctgtgttatgtaaaccctaaaaaagtttgcctttgccctgttgcacttagtactgtaacatttttactcagagagcatctcctatcagatactcagacacttggctagacaaagcaacagatggtacataggcctattcacacttttaaatgagtcaagaagtatgttagtagtaataaaataacaatagaattttagcagtggcacagaatatacatgtccaagtaagctggatcaaatcatttttggaatatmttttgggactttttatgatccacgaaaaaagacatgttaattacttttatagttttttttatctgaaatattatactcaaattgactattcatctaattcaccagacttggctccagatgacttttgtttattttcagtaattagatttgccccaaaatatcctcagggataccccccgagaatgtttaaaaaaatgtgctttccattctaaaggcaactcaaacaaacaagtggaaaaagaaaagaaaaacaaagaaagttggcatattcattagtttttaccatagcaacaaatagccccacagtttcagtagcttatggcaacaaagatttatttctcattcatgtaggactcaggctgcagacttgctgtcgtcctgcttggctccacctgactgtgcatcaatgctcagcttggctccacattgtcttctcattccaggactaaaggaacagcctcctactgggacatgctgttctccaggaagaaaggagaggcaaaattaaaccaaaccggaggccaaaccaaatcacaatagcccatttaaagcgtctccatggacatgagtataggtttcatccagtcacattctgttgaccaaagcaaatcacatgaccaatctgacaagggataaagaagtaaattctacctacaggaaggtactggaagtcacatgacaaagagtctagaggtataatcttctacaaaggagaaaacayggagctgggaacaataatgaaatctaccacacagtgtgggaacagtgggaacatcatgaatatataacattccaaagagattactttggaaattatcagaatgattagcctcataaattatggtaggggtataaaccaagtcagtttcatgccttataggctcctctcatatatttaagtgttctaaaaatatatacaacatctagggtatggatttaatcattttccgaacttgtttcctttgtgaatagttttatacttgagttgttacgaagtaatttattgataaacacatattgcagaatactgattggaatttgcattatctgcagacttgccccatataatgctctttatatgcaaaattcaacagttagtgctgctatttctgaaagagcaaatcaatattctaaaaatgggctagtcagaaaaaacaattatctttgcaaggattgtataacgtatcaagttcctcagttgaggaaaatactaaataaatctcttagccacttagaggtaaaataaagttgctaacgctaaataggcatgcttttcatttcctagccacactactaaaatcttaaaattaacaattatattttagttattgaattgtattctttatttgtcccagagttctaaatacacttgaaaaagtcatattctggaatccacctgtgctcactaaaaattggtctcctgatccacgtacctcagcccaaacaaagtagcaaaatatacaagatgaagtgggaaggggaagccctggagtgatctgaaatcactcatctctattgtgtagctcaattcttttctgttactggatgttgtttcctctcttgacccacagaaaatacacacgtgagtaaaattctaggacagtccctgagatgtgcaatatcctgctgttgaaaactaaaattacggcctggattgaatgagtttatgaggcaaagagggctgggatgatgtgattactctgttctgtcctgctggtagactgatggaatatgaactatctgtacttttcctgtggctctagcaagtccctcatcatgtgaccagaagcagcgacatgcatgaagaaatgtagaaaagttctaattttcaagaaaaatctccattctatgctagctgaggttggtgactatctctgtatctctgagtccactataattcacttaacttaaatacctccatgacatcctataaaaaatttgctcagtcacctggattatgtttctttccctcttccttaccgcctaccaaacttaatactgtcaaaatcttctttaatcatctagattttatgcattcatcctcattttaatgttgtcataacttacactttataaagcattaaggcatgtgtacaaaataataccaaattgaatcacagctggatattgcagacattagggtaaacaggtctctggcattttaagatttacctcacagtttgtgcaaaatcacattgcctgcatcttaaaagcccagtcttttaatagcaagtcttacttgatacttctcagtcccttgaccttaaactttttatttttaaacatttttgccataagcaatattgcctctcccaggttacggcatcttttgaaaagaatttctgtaaaccttaaaagagagtggccagctattttctacaatcttatagacagaggcaatggataaaaactacaatatttaggatttactgcttccttatagagaaggtcactgacacagaactgagtaaccttccacccaaaactttgtagttcagccttttccgtagttgtttaaagttaaggggcatgttaatttctcttgtcatttaaagtgtctgtgcctgaaaatacaggaatagaataattgacctctcgtgttcatctccagcactctatgatttcaattctgcagtgtacaaaaacaaactctctacacattgagtaaaaagccatggatcttgaaccagatctcaccaggagaacatgtaatcttggcagggatgcagggtttgaatgaggtatattctccaaggaaaataatcccaacagaatacactgagttttcttagcttttatgttttttaggatatagtcacatgttatctctgtgactctcccctgctcggttttattttgagcaaggaatcaaactgagtttttcctccttgaaccagagagaagcaaatacattgctcatgagtgaacaagttcatttcaatagaataaggaataagagtattatacgtacaaattaactgaacaattctgacagtccctataaccccaaccctaaaatatattatttctttaattattttggtaaaaaattgttgattttgtctgtgtaaattaacttttctttctatcacgtatgtagcagttgggtagtcatagagttatatttatgtactagatcaggttaaaaatacttaaaaaaaaaacaagtagcccaatattcaaagtgtatgaaagtgctgacaaacattgatattcaacatagaaatactccatcgatccactccctattccgatgaatcccatgtagactataaaatggtacattaccactgtgctcaaagcactgtgagaatctgagcagtacacaattctgcaaaaaacatcttcaagctttacaagtgcatgcctgcatctgcagctttgcattcacatgcatgcaacatgcatttgcttagagcttccagttaattaattatgtggtccatttattacttgtttgacatttcaaaatctcatcatagggatgagtaggaaaatttttcactgctactcttcttaaaatgaaaagaaccaagtatcaatagagaatattttaccagtgatacatctttagtcccttgaggtattttgtgtgtgtgtgtgtgtgtgtgtgtgtgtgtgtgtgtgtktaaatgctttccagaagtaaataagagccattatttcacacaaaatttgtatttcctttgagaaaataaaagaggtactagaagacaagttggcttctaataatgacaaaggaacaggcccttaccttaaaaaactgcaaactcattcaactaatttttaactttaatgtgtagcaacagaaaacattgaataaaaataatttgtttgttagagtatctctaacataatacacattggacagagatgcaaaattaggcatgcagaataaaacacatctatatatttaaaaatcctttttttttaagtatttagttctcagaattatcttttagttccttgaatgctaatcatttttcagagaaggcaaaaactaaagaccagttaagattaaaagaatcaattagagagaagttaatgtgcaaataaattagtcttttttaattccatttcagtgttttaagggtataatagaaagtaaaattgtcaaacatttgttgttgctccattatcttgcaatgttttctcacttcgtcgtgatttatgcttcccatgttcatgataggagcagacttccaggcagagacagaagctgacttgggaaggctatgagacgtggatgaactaatgtttttgtgctaagcactttcaaatgcattgcctcattctgtgttctatacagctctatagctttatagaattaccttattttaagataaataaataaaaactcagcctaattaagtaatttgtaagtttgagagctgggatttgagtccagatatgcctgaaaacaaaaaaccatgctcttgcctttacaataccttcctccaggtagtccaggggaggtgctcggaaaaagacagcaccttttgtggtttgtgacagtgcggggatattatcatttgaaggaaacaagaaaaagttaggcttgatgtttgagtctccatatagtacagtcacttataaaaactatttctaaaggtatttgtgcatattttaagaagtcaaaagcatgttcttgagaaaagtgtgtgttacagaattaagaggactgaaaggagaaaagatgtgttatgaattgaaatgaagaaaggcagatctcttattgattcttcactcttggaatctcattaactatcagatggaacttgatgactgtcaatgaataaacaacattttccccattctaggttgttaaactgcccaaagccaccaaatacagattagtttgaaatgcacttactgttccggctggacgtggtttaaaaaattagctttacatacaagaatttttttctctctctttccttcaggctgctaaaaaatgcagaaaatgaagcttattttaaaagctggtatcagaagctactagctgctctccaattctgtgcaggtaaagccttgaatgatgagttttccaaggagcagaaacttatcaaaattctgggagatattggggaaagagtcaagtctgccagtgaccatcaaagacaggtttgttgaaatattaatattcaggtagtaatgtttttaactttggcttaaattaagttttaatttcattgtttgcaaagcaaattccttgattacacttaaatagaagatacttaaatcaattactttagtcaagtttttttccccacctactgttcttaagttaatgataatgtctatcaccaggacatggttttttgacctaaatagccatgtgacacacagagagaacctgaaaagaaaagaccaacgtataggcagttggactaaacaagcctgataaactaatcgcgtcaatatggaggcacaattcagactcatggagaaatacatgagaagttttagggcacgtttttgtcgttgctcagcaaaggacatttttcacgtaacaaataagatgaattaaatgaaataaatcaatggccttaagaacagtaatactttttatactaagatctatggatactagtcaaaatatgtgcctctttctcagtgtttataataatggacctggctattatttttcttggaagaatatttgctctttttaattatctccatcactagttccctatactgatatacaccattaagtagtttctctcaagttcaacactctagatgcagggagaaaggggacattctttcattgtattaagaatattattcaataataattaactacctactatagactaggggttaaggatagaaagatgaccaaaacatgagttttgtcctcaagggaactcagtttctctccacttataatctaaaatcaacaagaattttcaacaaaatgatataaaaatagtagtaggcaaagtgtcccagaattctttctcagcccaggatttttcttgctggaactcacttcatttagtagaagtgccagaaactatgctacttcaccttcctgggagaaaatggaaaataaaaaagcaaaagtttggaattaatttttaaatgggagmtatatagactccagtacacagaggatccttaaggcatataataggataagcaatgcaaaaaaaagttctatgattttttaaaygttactacaagttcattaattattttgtaatggtagacaaaaagttgatggcaagttaaataaattgatttaaaatttacagaagtttgtgtgacggtttggtctttatctcctatgttttaaaatccctcacatgtttaagatgtacattatacttaaataattctggtgctttttttgatcattcgcttcaagtaccagagtgatattgacattattcactcaggtaaatatatttatcttgccttgagtggctgcttttgtgataacatctcttcacataggaaaataggaagaggaaaaggaagaggtggaagaggcatttataatttctcacaatttaagaaataataatttctcacaaaaatttaagttcctaatggctacttttgtacttaaaaaagcactaattaagcataactatatgaactgggaagatactttacttaaatgaagggagcagagattcctctccatgatatctgccaggcaaayccaagtatagatgaggcaaaggagaacaacacacacagagggctgtaatgcaacttttctctctacactttgctcttctggattctgggagctgtggattctattatttgccaataagccaggagtaaaaggtaagaaactcttgagagctgagtgaacattattaatatgatatccttgtcttctgaattgggctcaaaaagtttcttttttaattttcaattttaaaatgcacaaaaaaatttttctaccatagttacctcgtgctagcaaatagtaagtctttctaatttactctaacactttttttgtatccattaactattccccctgccccctgctgcactgacgacccttctcagcctctagtaaccatcctcctactctcggtctccattagttcaattgttttaaattttaactgtcacagataagtgagaacatgtgatatttgtcttcctgtgtctggcttatttcacataacataatgacctccagttccatccatgttgttgcaaatgacaggatctcattcctttttatggttggatagtactccatcatgcatatgtgaaagtggactaaaagaagctttgtttgttttgtgatgaattgtaattatttcctatctcttttgtcataggatgcacaatttaaaggtgttgtttgtgatatctgagctgccatgagtatagtggagtgtaggaatgagtaaataacagaaatatactcattgatgtccagtaaactatttgttcctacatattatcatttctgacagcattatgcaattggatttttgtcattgttgttactactgtacgtaatttttttttgtaaaatgcactatactattgagtgtaattttgagagtcacaaactcagatttcagaaaattatcagaaaaggatcatgttaataattacataaagcagggtttccaaattggcggccacgcaggtcaagtccaacccttttatgttttgtttgaacagtacagtgctttgtttggtttttatttttagttgaatttgaggtcctttagaaagggcatgcatgccttagtttcccatttctccaacatgccctattgtctttagcccactstcttctcatgcctgaatacatcacctgcctgaccccaaagtcatccaagtgtgtaaccctgaattcaagaattcatttaatcaatagaagaaaattataacctgaaggaaaagtcaagttctttacattttcttaaatcctttttctaatgatttttcacaggaggtactgaagaaagaaattggcagactagaagagttctttcaagatgtaaatacttgtcatcttcctctgaaccctgccctatgtataaaagggattgatcacgatgtaagtcaacttattcctcagattaatggaatatttctgttttgtatagtttagttcattgtatatgtttgaaatggcaaaaagaattcgtaagttgacactgcaattattttaacgaaaaagtaactgaatccatttacattgtgttttccctttgatacactaagaccagttgggatcacattggccttatcatatgatttgtttatttggaaacaaactatccatcagttcagtgaaaaaaaaaaaaatagaggaacatagaggaacatatcgctgggttaatttcttgactcattaaaaatgattgatttggtgaccccatgcaggctgggtataatttcatggtttatttagactatgtgcataaccatacctagtacacgaacattagtcattagctacaacatttctattttgattcgatttaaaatttattgattctaatatgtcagtgtgtcatatagtttgtgattttactcacgcctagaaagcccatcttggcattgtcagactcacaacttcctaagccttctcttcctaatcctctgtcatatggtacctcttcagtcacacttctctgacttagaatcattctttctcccttgttcctgataagctttattatcttccttctcaaaagcccaagagtacaaagacactaacagagaaaattatgaatatgttagatttaaaagtgaagaggttaagctatcatgcayggacaataaatgttacctaactgaagtcataagacagtcaagaaaamaaacccaataattaggtgaaaaattagaccattattactgtgaatgtaaaatgttttgctaaaaacttgataccatcatctttatcactttgccacaagtaagactccytgaaaattttttgatatgcttcataaatatattttgaaacataacaaaataaggcttcaaattccttaaactgagatatgtctgtctgggctgaaatccaaatcattactaattttcaaaaaattgcccaactttttcatcatcagcagtattcttgtctaatgctgcacatatgtaggaactcagcatttcaaagacactgtaccttaatgtagaaagaacaacagggatcactgagtccatgtattttttgtttgtttgtttttgcttttgctttattggctgcttgttttaaaggagaagagtgtttttgtttttgttttttttcacttaaaattacatataagtttggcatgtgcaggtgcaccggctgggccaggggtcagctgcccaggagtcaccacccctagtgctgcaggtgggaccacactccttccctatatagcaccctacggttagcagtacttttcctgcagaagctgtcccaagtagaaccactgtctggttccatttgctctgactagctatgcctggcacagggttgggcacctatgggtacaacaatgaacaggacagacatggccaggtgacaccatcttgggaaacatttgaatctatcctccagtcccattgaacaaagaagtgagaaaccttacagttgaaatgagtatggaaaagctctctgtttcaacagaaaccttatcaactactggagaatccacactggggagaatccttataagcatgatgaatgtggcaaggccttcattcaaactaaatgtcttatttgacatcagagcctacacactgaggttcatataaaaaccttatttaaatggaagcagtttggagaaaccatctatgagagctcttaacttgttgactatgagaaaattcataccttttgaatgcagtgtgacaaggcatttggtctgagtaaatgtcttattctgtgtcagagagttcacacctgccaaaagccctataaatatgataagcatggaaatgtgtagtcagaactcatgcgtcattatacaccagagaattcacactgttaagaaaccctacaaatataatgggtatgggaagatattcagttatagtgccagtcttgtggtacatcagacaacccattgtggggagaaatcttataaatgcaatgatagtgtgaaagctgttatatgattgtgtgagccattatagttcacaagtgattgtgcaccagagagttcacactggaaaggagccctgtgaatgcagtgagcatgggaaagcctttaatcagcattctatcactatcagtcaactatactggggagaagcactcaggtatggctcaattcgtttcttaaagcgtggctctcaaaggcaaagagcaaggggctcaggtctgagctaaactgtctttataagacaaattctcaacctttgcctcccacccctacccacaaaccattaatcacaatgaaccattccctatttccttttaaatcactaaaggatggaccaagtgggagagtgggaggaactgaatgcaattcttccccactacttagggaaaacaagcaccaggtatttcatttacttactggtttctttttcaactaatttttagatatctgtcattaatgtgtgcttctcaaggacagagatcctatcttcctttcttccagcttttctatcttattataccatctccataaaatcctcctctaagactctgattaattcttccatccatgggcattccaatctactttataactatcactctaatctaatatcttatcatttgcctctttctatctagaaaacccttgcttctgtctatttgctaatctatggccctcaaaatcttcaagatctagtaaaactctgaaaatttttttcttaaaatgtggcttcattcaatgatgataaactatcctgtgaattattttcaacttaatatgtgtgtgtgtgggtgggtgtgggtgtgtgtctgtgtgtgtaccaccaaatttaataggctttgtgagggkagatgtagtgtttcttttttyagcatataatgtgcatactagttgttgaatacatatttttgacaatcactcaaatatataccgcacatgaaaaccaagatgtgaaacaataaaagcagaatgtctctgggtggtagttaaaaagataggctaagccttgccttcagcctccctgaacttgggataactcaaagagattccccacatattcaatgagcagaatttaaaaaccactgatctacactcatttcttgcctcatacagaatttgctaattcaataccatgatatatggtcatgtgatccctaattagctgacttttgcaacagaatttcattgcttaacaagcatcctcacccataaaactataaaacatctatttttgtttctagataaaacatctacatctataaaatatctatttcttaactgacctatcaacacaaatctaacccaatttctaactaaacaatcccttgcttactgaatcaatttgatttttcaaattgaaagtagaaaatatctattttccatctcttaaactcttgcttatgattcagtaagcaagggtttgtgtttagttaagatattgggttagatttgtgttgataggtcagttaagaaatagatattttctctcaacttctaatttcagacttcttgtagataacgttgttcaagctgatctttcaacatgcattgatgtcatattttactaagttgataaattgaaagcatagagtctttttcctttctttatattgaatgaagtcttcaatgccatcatgaactctctaatagcctaaagacatacagcttttcaatgcttaattgtaagaaaataagaggaaaacaggcaacwaggaaagtagagtgaaaagtagtcaacatcacaaagctgaaaatgcaaatggaaggtgtaattactggaaatgagaagacaaaatatatgttgtactgctatttataaaaaacaagaaaatgttcattaactaaaagataaagaaaaatgtaaggatttttcaaagtacctgattagtgtcaggcattgtaaaaggtatcttatatccgttagttcctgaatctatcacaaagatgtatgagggagaggttactttctccactttacagcaaattagttataaagcttagatttgaactcaagcctttcttaactttctatctatttttccttaaagtattctgcaaggtagaaataatggaagggaaataaagtttttaaaataaaattttaacttttatctactaaccagctagcataagccaatattcatacactgcttagttcatttaaacctcaaacatatcactactgttcactgaggaaaaaacgtggttgaagatctgtaatctgtcaaaaagctggcttcttggtttcaaagtaaaggctccagttgatrgactaaattttttaaaatttgtatgtttctgtgttccaaagtataaaaattattcatatgtgttacatttgttcatacaacaaagtctgcaaggggctatgattttggggaaaaggtttgctttttggggattggggtctgatttattttgctcactagttttccctttttcttttcctataggcatgttcatattttacatctaatgctttgccattgaagattactttcatcaatgctaatctgatgggcaaaaacatcagcattatttttaaggtatggtagcgctcttaaaacatgaattgattccatacacagaactatcgatttattactcacaaaaagaaattgttgtggctattttcctccagcaacaacacataggtttttcagttattttagagtctgcctttttacaggattatatatagtatgtgccaaactccaattggcaataaatcaaacattactggctcaaagccagggagccttcagtrcaaaacctaagagaatataattcagtaaatgaagtgatatgattgcttttaagtggcagataaagttgaatgtgaggaaagttttattttggtctagatactaaattgggatcaaaattaactggaactgaaatgacataagttaatttaacattaaattcttgcctgctagcacttgttcattttagtaatttgagttttttktaataaraaagtaaatatgggtcatttcagtcttcatcattaatcccactggaaaaacagagaaaaggtagtaacaggtttataagcacgtaggaaagagggaacagagagggagattagggtaaaaagtaagaatatgcccgtcttccagtttatttggccaattattcagccaagcccgtgcaacaaggtctcagagtgaatctttggtgaattctcactgtctattttggaggataatgagtagtgtgcccagacttttgctttgtcatgtcacctcaagagttagtggtcccacaatgctgtacttttcatgaaggggaaaaaagaaaacacaaaatcttatcttggcaggattttcygtgtataatttagaaagtgttttcaaaacgaaatttcttatttgtttaaaaggatagaactatccttcccctttggacatatgcaatctccttaaccaatacatgactatcaccactttatcatttcttattatcaaaaatcattttctctgaaaaccttttaactatcttcaaaataatttgagaaatcactgatttaaagtctaatcaatcatatggatgctatttatactcccagtcaagaagctcttggtattctaactgcatatcggtgcataaatttatgacataccaaataatgtttcacttagaaagagatctctcttggctaagtttgaaatttgaataaacattcatccagcctgtctttgccagactttgaatctgagaaatcacacgtggataataaattgaaaattattatcaaggaacaacattccaagcagcacmtctaatttgatggttgaagcttctgtaattatttaaaaggaagttctcatttaaaaattttttttatcagaaacacaaggtaattttagtgctaacaaaaccattaaaaccactctaagtcaggctagaaatgtatccaaggagaaaagtgacatgtactgtatttgactgcttttaattaacaaattcaaggaaaaacccagggtctataattttgtttttaacaggctggagatgatcttcgtcaggatatgcttgttctgcagcttattcaagtgatggacaatatttggctgcaggaaggcttggatatgcaaatgatcatttatagatgtctatccacaggaaaagaccaaggtcagtatagattagaaagtgcgctggctcacattatttatttcacacattcactagtaataggctacgaaactttctccagctttcgttttaaactacaagtttgaaaatccaaagaactatacacattcttctttttttaaagaattattttcaaaaatgataagccaacagaatttatataaagcataatatgcttttaggtattaattaggaccttcacattacaaatgttaactgtgattttattttatgtgtctttaagagtgagtttcattaataacttactgttatttttctcattttcttatataaagcctactcatttttaaaagaatacaattgttacttattaacacaaaatctacacattttcaagtgctgaaaggagttctggaaatcctaaacacattataaaccttaatttaatttctaaaatacttttgagtagataaaatatcaacagtcaatgttggccacacatgtaaatattgaacatatgtcagcatttcttttcctttataaaagccaagaaatcaatatgaaaacataattatacttatgcacattttcagtgaaagtaatgtcaatagaccacccaaattattactaaaacatcagaggtagaattgcacttaattacaataatgccaaattaaagagacaacaatatctaagatatcttataaatttttttacatataaccattgccacttagaattttattaaattaattggtatgaattatagcacatacatgtgcataaacaaagggatgaaatcatagaactggagaggggatctagaccatgtagtcatttttttttttttaattcaagcagagctacaatttaaacctgtcatcacaagagaactgtcatgccatggatcctcactgcctgaggtcccaccagcaggctcaataccccagtcaacagttgagattttagatgctaagtatgaaaacacctccaaattcactcgccacttaataccttacaatgactgcattacagtcrtactagccaattgatttgattctgataacagggctcctacttccatgccaagtgtcccactctaaatactttctaaatctctagttcctacaacagtcatttatccttgctaccatgagattgttattccttgcatcttaccctactttttctcacgtaagtgacctaatgctttcctatcctaaaatgctgaaatagaataatgctacataatccaagctgagatctttgatgttacatgaatcaccttttctccagatattgaataaattactgatcccagtggaatttttaaatttcatctcatttctatttataatcatggaatgtaaccaaggctgaatcttttagttaataaaataattcagcagaaataactatagacttatccaaagttgtagatgtcgcaagacaaaagttatttttcttctctgtctaccaacaacaaccttcaatagctgtaagatttcagagggcattatactgacaaaataattcttcaagaaaaatagagatcattaaaacaaatatcatttttagaagattaggttgcatttttaatcaggttccaaggcttactgaatacctacttttctcaagaaatgtcacaacgtgagatgggaaatgcatgctaaaatgagctaaatagagttgtgcccttgaggagagtaaactccagtttccacgaagtttccatgactttatcaacattattgctgagtatcattctcatggtcactttgtatgtaatgtcctaggagttctgagagaaattttcagggcaaataaaaattcttcaggatttattttatcattggtcccccaactttgatgaacataaaaattacatagggggatggaaagagtagatacaacctacccccaacccaagcgcactaaatcagacttccccggaggtggaggagaggctcaaaggttgattgcaaaacgctgctcaggtgtttcttatgcacccttgtctgaaagacaccgcctcatacaacaccaccttgggtaattttatccctaagagccttgctacttaaagtgtgaaccacagacccacagcactgacatcacctaggaacttgttagaaatgcagaatctcaggccgcacgcctgccatactcaattagaacattttaacaaaatctccaaacatattagtgcgttttcacactgctataaatacctgtgagaggtgacagcgtgctggcagtcctcacagccctcgctcgctctcggcgcctcctctgcctgggctcccactttggcggcacttgaggagcccttcagccggccgctgctgtgtgggagcccctttctgggctggccaaggccggagctggctccctcagcttgcggggagttatggagggagaggcgcggccgggaaccgggctgcgcccagtgcttgccggccggctggagttccaggtgggcgtgggcttggcgggccccgcactcggagcggccggccggccctgccggcccgggcaatgaggagcttagcaccttggccagcggcggcggagggtgtgctgggtcccccagcagtgccggcccaccagcgctgcgctggatttctcgccgggccttagctgccttcccgcggggcaaggctcgggacctgcagccagccatgcctgagcctccccaagcctccatgtgctcctgtgcagccgagcctcccctacgagcgcggccccctgctccacggcgcccagtcccatcgaccacctaagggctgaggagtgtgggcgcacggcgcaggactggcaggcagctccacctgcagccccaatgcgagatccactgggtgacgccagctgggctcctgagtctggtagggacgtgaacctttacctctacctcagggattgtaaatgcaccaatcagcgccgtgtcaaaacagaccactcggctctaccaatcagcaggatgtgggtggagccagataaaagaataaaagcaggctgcccaagccagcagtggcaacccactcaggtccccttccacactgtggaagctttgttctctcgctctttgcaataaatcctgctgctgctcactctttgggtccacactgcctttatgagctgcaaccctcaccgcgaaggtctgtagcttcactcctgaaaccagcgggaccacgaacccaccgggaggaacgaacaactccagacacaccgccttaagagctgtaacactcaccgcgtaggtccgcagcttcactcctgagccagcgagaccacgaacccaccagaaggaagaaactccgaacacatccgaacatcagaaagaacaaactccagacgcgccaccttaagagctgtaacactcaccgcgaaggtccgcggcttcattcttgaagtcagtgagaccaggaacccagcaattccggacgcacctggactgggtaattaataaaggaaagaggttaaatggctcacagttccacatggctggggaggcctcaggaaacttatattcatggcggaaggtgaagcggaagsaagggcctttttcacaaggtggcaggaaaaaaagggggagaatggggtacctgctaaacattaataaaaccatcaaatcttgtgagaactcactcactatcatgagaacagcatgggggaaaactgtccacatgatctgatcacctcccaccaggtccctccttccacacgtggggattatggggattataaattgagatgagatttgactggggacacagctaaaccatacaacagagttatttgttgcattaaaatttgagaaatattgcattaaaggactataagagtgaaaccacacatattactctatgtacacagaattatgttcgaagaatttaaatagtgtatgatatatactagcttaaaatgtataaaatgtaatttatgatttcaattaatgagcagaatttagccaccatgattactataaattagatacaaggttttctggatagtcagcaattcaaggcttgtgatcagtgtcttgggatttagcaaacattaactccctagatcaacgtagttggaaaagcaattgacattgctgcagcaaagtatccaaaaaggtggaatcatctaagtcctaattttgggcatggtcaaaggtaagatggcattgaaacactcagcaaccatgtagaaagtgactttcttcaggaagtattaaatagaggaacagaaaaaatgaggagggaaattttcaggattaaaaagcatcacctactgacataaaatgttttaaatctgctatctcccttaacacacatgagaaaacctgggcaacagccaaatactattaggagagaagggagaagtgtcwtgatactatggatattcccaggacctgtctctgggatgtgaaatttccttctgatccacaaatgtagatgcccaatgatcataacaggactatcagatattaagagaaattaaggctgcaaactagctgtaactgaccaaattcagcacagataagccttttgtttatcaccaccataatctactttaatgttgtttaatttgaatgctttttaggtagatcattaaatggtcaatttaaaaaactcaaccatctctctgttcatatagttatatttgtgtccctggtctctctgggaatttgagtttgcaactcctgcaattgtcgagactatggaaatcagaaactctagactttaatttattttaacgactttatttataatactgtactttgcgggttgttttgtagacattatccctgagagagctttaagtactggatctaaattgctgttctgtacagtatgaaaatcagaaggtttgcaaatatttacattccaataaccttacgagcacaataaaagaaagccttgatggatatatggccagcggagcaaagttcctattgaagttcaatcaatatatgctccctttaaaaaaaattactattgtagtttctctttaatgttgactgagaaggaaggagcaggtggctctctagatgttcactgctgagttattctgttcactcccgcaaatgtaacatttaactgtgaagctttttttaacccgaacattgatttttataatatatgtgcaatgtttgttatggagagtgtatttggctcccttaaattgtaaatatatttgttatccaagcttaaatgtcctcccttaaactgtaaatgagtgcaccagccatgtgataattaattcactactcagtggggtctctgttcatcatcaagattggcttgctaccatagctctagaaaaaatattaaagctgcttctgattaatccgatccaaacacaagtagcctcattgttctccaggattttgggaagaattagaaagagatgcatctagataagcctcctccagaaaagaagatttgaaaaggaaaggggtaatccagtagtgctggaagctattgttgttatatttcctaaggctccctcatcttgtgatgaaggaattgtctctgtaatcttttttttctctaccaggattggtgcagatggtacctgatgctgtgaccctagcaaagattcatcgccattctggactgataggaccattgaaagaaaatacaattaaaaagtggttcagtcagcacaaccacttaaaggcagattatgaaaaggtttgtcctgttgcagatcattttaaataatgtacttaaataagaatatgctctggttcattagatattctgatttgtagaaaagtaaattaagtgcactttgagttctaattcaatcagcccagtaattaattaatcagcccagtttaaatgatatattaactacataaaagtttctgcattttatttagtttctgggtgaaattcctggttatcaataaagatttttttttgctcagctgccatcctgacatcaatcttacaccagaaacaataacccttgaaattacctcatttaagtaatctacaacttctataaatatcccttcttttctttgcaatacatttcttctgccattccccactttttcgtctcccattttcttaatggtttgcaaaatgcaaaacagagtttatgtatgtcataattttaccaaatgtactgttttatttgactgcaaacactttttctcaatgtttacttcattctggtatctggcttgcagtgtacagttgtgcaggttctgccctgtattagggatcttggctaaggagatgagtgtggctagaaccagtccttggtccacttgccaagctatgatctagtacagctgggtccacccagaggaaggagcacctaaatgctaattcatgcaaaaaatgcaccattagatttgcttggtactatcctgtgcactgaaatccccttattttgagaaattcctcaaacctgggtaaactgggatgattggtcaccctacctatgataaaaaggccatgataaaatagaccccagagttcatctattccacacttccataacattgtgttggagcaaaatacaagctttacaggccaaataataaataattagataaaattaccttgaagtctactttttagctgttcccaaaattataacttcagttttgcattaatccttgtggttacgttatttccaaatacatcgctcttcacaaccaccatttgaaggatatgttttattattttcactttctaagtgaagaacatttggattgacaaattaagtgacttgcttaggcatgtaggaaacctagaactaaggcaccctagcatgtagcctggtgacctagccttcactacatcaaggcagcccctccatgctaggagacccataaccttatcccaaccagtcattcctggttacaccaccaagttgatgaaatgatgtatacccaggagatcattttggacgcaaagtgtatttttggaaagaaacatctgctcattagagaaacataaacacaaattgacttaatgataatctgcttccacccacacaggcattcactgatatatatgtactataccaaacagcttcagacatcaactacattgatgacctatttgtaaaaatacacataaaatgttacagatttctcagtatagctttctctgtattccaaaatttcaaatattcaaccattgatattttaaaattcctctgggaataggcaatrttggggcrtattgttcctccttttactttgaaaaaaaatcattcaatattgtatatttgaggtatcaaaaaatgacactaggaaacctctctagtgaaccaatgaaaattagctccatctgaatgaaagaaatattttccgcagtttcagtgaaaacattcatctattaggctaaagaacagttgtttcatattcttctgtagcagatcaagaatcagctgcttaactgtaccctcctgtccactgagatgtagaaatttttcctgattatgtaattttgcttatcatttactttttatgattacctctgatgctaatgcatttgctcattttttgttgttatttttgcatgattgtttttcaatgaattaggccttgaggaactttttctactcctgtgctggctggtgtgtggtaacattcatcctgggagtatgtgaccgtcacaatgataatatcatgctgacaaagtcgggccacatgtttcatattgactttggaaaattcttaggtcatgcacaaacatttggagggataaaaaggtcagtgcacaaatgtttattacagtaattaagcagtgtcctaagcaatatgtataacatgtaattgcatagaaaccctgctgatgacttgctcccatctctcaaatccccccaggtaatataaacatgataatatatctaataagattgaagaaaagttttaaagtagatttttaatgcaacaaatttgatttcctcaaattggtagtagactaaactggtcttcccccatgagaagcagctaatcctgttttagtctgtcatttgaagtaatattgtttgtttccttatgaaccttgaatggacaatgaggtatgaattgatgatctcaaaacatctgctatattgctcatagcaaatcatcactggtctacacatattaatactagcttacttcccacactgaactagccatacatcattccacagatatttagggaatacctactattcaaggatataacagtaaacaagacagacacaaaccctgatctctttctagtaggggtgacagacattaaacaagtttacaagctaagaaatgacttgagaaaatgagaagttattttagaaaactaaggcagagaaatggaatagaaagtaactggagtggggatactattttaaagaggcatctcggaagacatgacaaagagctgtgtccttatgaccacctcatggagatccatgagaagagaattccaggaagaaacaacagcacatacaatagcagtgagcacagaaatgagcatggcatgttccagtgacaagaagacctggagtctggagatgggatggagaggggcgggcagtaggaggtaagggtgaagagtttggtggaggcccaatcaggtagggcacagagggcatatagagtgtggcttttattttttaagttcaggagaaacttttcaattttagtggttttcaaaagctttctttgataccttgtgtaatggagaccagtgaagagactactgcaataaagtgagaccagtaaaggtagaagtagtaaaaaccgacagattcagaatatattttgaagacagagccacaggatctgctaattgattggacgttggctgtgattaatgaactggaggaggggcacagaaggtcagagaagaaaacattcaaggatgatgcctagattgttttatcttagcaaatgactgaataattatattatttactgaaataaggaatactgatagatgaataggttttgtttcattttctttaagccgaaagtaaggaaatcagaagttgaacactaaaagtctttaaaaatatattttatatgaaggtagaaataggatcaagccattccaaagactaattagtcactttcgcctgagaacagcccctcaatataagaaataataatatttcttacaagataatgtgatcgaatttataccagatggccataacctggcattaaaatgccaacataaactacatgatatatacaaatggattattttactttctgttactctcaatacattgctttctttaataaacagcctcgaaaaatttaccacatattcattcacttctttttcttttacttttttttttttgagatggagtctcattctgtcgcccaggctagagtgcagtggcatgatcttggatgactgcaacctctacctcctgggttcaagcgattctcctgcctcagcctccggagtagttgggactacaggagtgtgccaccatgcctggctaatatttgtatttttagtagaggtggggtttcgccatgttggccaggctggtctcgaactcctggcctcaagtgatctcctgcctcggcctcccaaagtgcggggattagaggtgtgagccaccgtgcctggccttcattcgcttcttaaatgtccactgggaatggtctgtgtgccaaggactgtgataaacattggagatacaaagataattaatatgcatttaccatgaaagttagggatactctttcaagtactgtgaatacagacacataaatgattattataaaatgttataagggcagagrtagagaaatgtacagaccatgagaatgtcatagaggagggatacctagcttatgagggacaaatgtcaattaacatacttgagtgtatataaaatttattcatgtaacagttttttcctgaactctatctacctttttctaaaaattcaaagattcagtttggacatctttttttttaattttgatgttttgtacactggcaatttggagtacccttattcatttattgcactggcttctgtattgttcatgtgagtggtttaaaatgaaaaaagatatttcagctctacagaaaaagttccagttggcagacataaaaaagtaaagaaaagattattaaaacagtatggtaagttcatataccacggtctgtagagaatatcaagctccagtttagctgcttgttgatgctacagcagctactgctacttctagagtttggcaattttaaacctttcttaagcagtatcataggtcaattaaaaatgtgcccagcatacagccacactcataatcggttcttaatattttctgctgaattaagcagccaataaaccaatcatcaaccattcaataattattgataggatraatgaaaatgaagttgccactgtcttcctttgagaatattagttattaaccaccagctaaggaggccaactgcagctccatgagccatatggattattgtttctaagattttatgtccgctggtggctcccataaggctcatyggcagtgtctccttggattactttctcaatgctgatacatttgctctaagtttgtttaatggtaaaactgaaccatacctattacactatcttttgaattgtaggaagcatctaatatttctcctcctaagctctttcagtttctggaattcacagaacgttgttttctaggacagctaacttcttccatactaggttcattgtttgttcttattgttttttaggtacacaaaagtccttttacaagtcttataggtcctataagtaggacctttgtattcccctaggataaatgaamgtgcttatttgtcccacatttattatgttatggaccccctttgtagagagaaacctagcccacacctagtttctgtacacatactcagatgtattaacccacttatgctggaggttgcaaattttttttgtgaaaaatcagaccttagcaatgaccttgagcagtaggatataaataactcctacaagcttagcgttccagtaatggaacactagacataaatgagtttaataacaccccccataatatacaaaaccagatttataaatcatgccctaggactgtcataatgtctcatagtctgacaagatcataaaatgctccaataccaaacaacaataaccctaggtcatagtctttaattaaaatgctgcacccactggaagcatagagtttatatgtacagatacacgtgtttcttctattgtctatttcttaaaaacatggaagggaaaagcatttgtataactttttatggtttacacaatattattattattattattgcttttttatttttatttatttattttttgagatggagtctcgctctgtcaccgaggctggagtgcagtggcacaatctcagctcactgaaatctccacctccctggttcaagcaattcccctgcctcagcctcctgagtagctgtaattacatgccaccacgcctggctaattttttttgtattttagtagagacagggtttcactctgttggccagactggtctcgaactcccgacctcaggcaattcgcctgcctcggcctctcaaagtgctgagattacaggcgtgagccactgcacccagttacaaaatattgttaacatatattaactaattcattgtgtattaactaacacagcaaagaggtgatataagaaggatcttgagaaaaaaacatttctcactgggctgctgccctttatactcatgcttacatcaccattccggaacatctcacactaagcatctgtgttactctctttaggatatgttacagacattgagctctcctggctcttaaattaaattgagtcagcaaagccactctctcatttggaatctatgctcaggtgtccctgaacaattcctctgaattcagttctccaggaatctggaaattctatttcgacactcagaccaactctgaggctcccataaactttcaaacttctaagagagaaaaattaaatcttagttatgattatgaaggatttcacatcctgcatataaacaaatgatcccttcttattggctttagctgtgagactagataaagagaatttataccatcagattaaatcaaagaacaactgaggtattacttaatgattctggggaaaatttggctaatctttataatggaaacaataaggaatttctccagctctctgaaaccagttggtttttcttttgaactattgcctaattattatcttcttttttgggggacatggtctcactctgtcaccaaggctggagtgcagtggcacaatcatggctcactgcagcctttacctccctggactcaggcgatcctcccacctcagcctcccaagtagctgggaccagaggcatgcaccaccaaacccagctaacttttttattgttttgtagagatagggtctcaccatgttgcccaggctggtcttcaactcctaggctcaaacaatttggacctcggcccaaaatgctggaattataggcatgtgccacagtgcccgacctatcttcattttttaattttctttcaccgatacaaattaaagtggccaacaaaytgtgcatccacaattttgcactcaattccactgtaacaatgatttctacagagtgatttttcattacataaaagatttcactgtagtaataaactcaaaatttcaactcaataatttcttgataattacatgctctcataaagcaggagaaattgagaaaaacatttattactgatgtttgttgctctcctagctctttatttcatacttttattttttagactagacagtgttttcatattctatatggcctttcgctttgctgatgctagccttgcattaagtgttttttgtagctttctttctagataattttaaagggcaatatgaccagtgtttaaggtcaggtacactggagacagactatgtgtttttgttttgtttttatttttatttttgaaaaagttattatttatgttatttatgattgacagatcatagttgtttgcatttatgggatacaatgtgacgaaatcaaactcgttaacacagccaccaccttgcttacctatcacttttttatggtgagacatttgaaatttactctattatttttacatttataatacattactattgactgtagtcaactgatggacaatagatctaaaagtctattcctactgtctatctgaaactttatactctttgatcaatagctcccattccccccaactcctcactccctaagactctgataatcaccattctactcctacaaattaaactttattagatttcacatgtatgtgagatcatgtgattttttctgtggttggcttatttcacttagcataatgctccctggattcattcatgttgtcataaatgacagaatttcccctcttttaaaactaaatagtatttcattgtgtgtacgtactacattttcttaatctcttcatccattgatggacatttatttgtttccatatcttggctattgtgaacaatactgcaaagaatatgacagtgaagacattcttgcaacatattgatttccattcttttgaagaaatacccaggagcgagattattcggtcatacggtagttctatttttagtttctagaggaaastggatgctgttttccataattgctgtactaatttatgttcccacaaacattgcataatttccctttttttaaaccctccccaacacttaatctttcatgtttttgataaatccattctaacagatgtgaggtggtttctcrgtgtggctctaatcgcatttccttgataattagtgatgcctaacagtttatgtacttattggccatttatatgtcttcttttgagaaatgtctatttaggttctttgcttatttttttaatgtttatttgttttcttgctattaagttatttgagtttcttatatattttggatactaacccattatcagacaaatggtttgcaaacattttctcagattctatgggccatctcttcagtttgctaattgtttcctttactgagtagaagtgttttagtttgatgccttccatttgtctatttttgcttttgttgcatgtgcttttggggtcttatccaaaaaaaattgctgagaccaatgtcatggagatttccccttatgtcttcttctagcagttttatagtttcaagtcttatatttaagtaatttctccattttgagctattttttgtggktgatgtaagctaagttcctaattttattcttcatgtgaatatccagtttatcaaacacaatttattgaaagactgtcttctttccatcatgtgttcttggcacctttgtcaaaaacaagttgaccataaatgcatgggtttatttctgggttttctatcttgttcccgtttgttcaatgtatctatttttatgccaggaccatgctgttttgattacaatcactttataatatgtcttgaagttgggtagtgtgattcctctagctttgttctttttgstcaagattgttttggctgcttgggatcttttgtggttccatgataaggattgtttgtccatttgtgtgaaaaaaaaatgacatctggtttttataggaattgcactgaatctgtagattgctttgggtaatacggacattttaaaaatattaattcttccaatccaagaacacagaaaatcttttaagtttttttcagtttctttcatccgtgttttacagtgttcactatacaagtcctttacttccttggttaaatttgcacctaagtatttgattttttgttgcccccataaatgggattttcttaatttttttccagatagttcattattagtatatagaaatgctactgatttttgtatgtttgttttgtgtcttgcaactttagtgaattcctttatcagttctaacagttctttagtggagtcttcaggattttctatatatatcatgtcaccagcaaatagaaacaatttcacttcttcctttcctattaggatgccttcaattttctttttgtcttgcctaactgctctggcaacttccagtactatgctgaaaagaagtggtaagaatgggcatccttgtcctgtctctgatcttagaggaaaagctttcaacttttcaccattgagaataaaattagctatgagtttgtcatatatggcctttattgtcctgaggtacatatcctttatacttaatctgtggagagtttttatcatgaaggtatgttacattttgtcacgtgatttttctgcatccagtgagatgatgatgttatttttatccttcattttgtaaatttagtgtwtcacatttattaatckgggtatgttgaaccatccttggatcccagggtaaatccctctggaccatggtgaatgattcttttaatgtgttctggaattcagctttctaataatattttcttgagtatttttgcatctacgttaattagaaatattggcctgtaattttcttttcttgtagtgtgcttttctgggtttgatatcaagataatgctagtcttataaaatgagtttgaaagaatttcttctatttcatttttgtggaagagtttgaaaagaattggtattctttttttttttatgtttgatagaattcaggagtaaagctgtccagttgtgggcttttctttgatgagagactttttattactgatccaatctccttactcattattgggctattcagattttctgctgctttctgattcagtcttggtagattgtatgtgtctaggaatttatccaattcttcaaggttatccaattttttggcatataattgctcatcccattttttaatgatcctttctattacagtggcatcagttataatgtctcctctttcacttttgattcgtttatttgaatagtctttctttttttcctagttagtctagtaagcagtttgtatcaccatcttgtaaacagtttattacaaaatgcaaaccatctagtaaacggtttgtattttgtattttgtttatcttttcaaaaaacaactgtgtgattttttttctgttgttttttagtgcttatttcgttaatttctgctctggtctttgttatttcctttcatttgccagctttgaactaaggtagttcttctgtctctagacttttgaggcgttatgttacattgcttatttgtgatttttcttctgctttgacatagacatttattgctatgaacttcccacttggaactgcttttgctgcatgcaatatgctttagtctgttttgtttttatttttgtctccatgtactttttatattttctgtgacccattggttgtttatgagcatgttgtttaatttccacatagttgagtattttccacatttctcctgtagttgatttctagttttacagcattgtgatccaaaaatatacttaatataatttcaatcaccttgaatttgttgttttcttttgtgaccttacacgatctatcctggagaatgtttcatgtgcacctgagaagaatgggtatcctactgctattggatggaatgttttgtatttggtctaaagtataatctacgtccaatatttctttattgattttatttcaatccctgaacacagggtctttctattgttttctttgaattctttctttaatgcataatagtttttatcgcagagatcttttacctccttggttaaacttatttctattttacttttttgtgaccattgtaaaaggaagtgcctttttgatgtctttttcaggtagttctctactggcatatagaattgctactaatcttgtgtattgattttgtatcctgcaactttattgaatttgtttatttgttatggcaaattttttgtgaagtctttagtatttctatgtaaatgatcatgtcatctgcaaacacagacaaatttgacttcctgctttcctatttgaatgttctttttttctttctcttgccaaattgctctgagtaggacttccaacactatgttgaagaaaagtggttaaagtgggcatccttgtcttcttgttccggatcttagaggaacaattttaacttttcctcattttgtatgatgttagctgtgggtttgtcatatattgactttataatgagtattttccttttaaacctaatttgttgagagtttttatcatgaaggatgttaaattttataaaatactttttctataactcttgaagcaattatatgatttgtgtccttgattctattattgtgatgtatcacacctatttatttgcagctgaatcatccttgcatctctgatataaatcccacttgatcatggtgactgatctttttaatgtgttgttgaattggtttgctagtaatttgttggggatttttgcatctatgctcatcagacctgtggttttctttttttgttgtgtgcttctctggtattggaactagtgtaatgctggcctcataagatgagtttggaatgattctccgcttttttctatttttggaagagtttggtaagaatttgtattagttctttttcaaatagaattcagcagtaaaaccatcaggctctgggcttttctttgatgaaagagtctttattactacttctgtcttgttacacatgattagtttgttcaggttttctatttcttcatgatttaatcttggtatattatatgtatccagtaatttacctatttctgctggattttccagtttgttggcatataattgcccataatagtctcttctgagcctttgtatttctatcatatcagtcgtaatgtccctttcaaaaatctttgattttacttgtctttgctctttttttcttagtctagctaaatgtttgtgaattttatttatttatttttaaagaaccaactatcttcgtcattgatcttgtgtatttgttttaatctctcatttatttctgttctgatctttgttgtttctttccttccactaatttggggcttagtttgttcctgtttttctagttccatgaggtataactttaggttgttttttaaayatctttctattttgttgatgtatgcatttattaatataaatttccctcatagaactgcttttgctatatcccacagattctagtaggttgtgtttccatttgaacttgcctcaaggaatttttttaaattttctatttaactttttccttaaaaattagtctttatactaaatatataaatggcttgcacatcataattatagtattacgttattctgactttgtctgtgtactcacttttaccagtgattttaatacattcagrtgttttcttattacatgttagcattcttttcattgagaataaacaactccttttagcatttcatgtaagacagatccggtgtaaatgaattccttcagtttttatttttctagaaaagtctttgtctctccatgatgttttaagaatagctttgctgagtactgtattattgactgatggtttttttttttttttcattcagcattttgaatatgttatcctgctttctcctgccctgcagggtttctgccgtgaaacccactgaaagctggattgagtctcggctaaaaatacgtttctcttctcttgctgctttcagcattctttcttkgtctttaatttttgataatttgattataatgtgtcttggggaatttctccttagtttaaaatttgattggtgacctctgggcttcctctacctgaacaatgtcatagatttggaaaattttcagacattatatccttaaatatgcttcctagacctttttctctctcctcctttttgggaattattattatgtggcgcttagtttgcttgatggtggcccataattcccataggtctttttcactctattttcttttttccttctctgattgggtaatttcacatatctggtcttgaagctcactgacttttgtgtgaacaagtctaaatggggttttctgatgagtttttcagtacagttattgtggttttttctttctaggattcctatttggtttttcattaaattgttcctctgtctttgtcaaattttttatttctggatggttttccaaattttatttatattttttaaacattttctttgttattcactgaattcctttaagaagattattctgaattctttatcagacattttatagaacttcaatttttctgtgtccattattggaactttgttgatgttgtttttcttttttctttgctttgcttttccttttttttttttttgacagtgtcaactatccctaagttttcacaatccttgcatattttcactgatgctcacacatttgagaagttggccatgtcttccagcttttgcaggtgatctttggtggtttggtacttaacattagaacataatcatttgtctgctgttactttccattctggggaagacttatcgtgagtaccagaactaaaatactgcacaagacctaacttgctgccctgccattgtttctcagtctggggaacgcttacaaagagcaccaaaacttaagccacagcagaaattaatacgatattgattctttctatccatgaggatgggatgtttttccatttgtttgcgtcttcttttatttccttgagcagtagtttgtagttttccttgaagaggkccttcacatcccttgttaactgtattcctaggtattttattctctttgtagcagttgtgaatgggagttcattcatgatttgagtctctgtttgtctattgttgaagtataggagtgcctgtgatttttgcacattgattttgtatcctgagactttgctgaagttgcttatcagcttaaggagttttggggctgagatgatggggttttctaaatatagaatcatgttgcctgcaaacagagacaatttgacttcctctcttcctatttgaatactctttatttcttttcttgcctgattgccctggccagaacttccaatactatgttgaataggagtggtgaaagagggcttccttatcttgtgctggttttcaaagggaatgcttccagcttttgcccattcagtatgatattgggtgtgggtctgtcataaatagctcttattattttgagatatgttccatcaataccaagtttactgagagtttttaacatgaagggatgttgaattttatcaaaggccttttctgcatctattgagataaccatgtggtttttgtcattgattctgtttatatgacgatggattacatttattgatttgcgtatgttgaaccagccttgcaccccagggatgaagctgacttgattgtggtggataagctttttgatacgctgctggattcggtttgccaatattttattgaggattttcgcattgatgttcatcagggatgttggcctgaagttttctttttttgttgtgcctctgccaggttttggcatcaggatgatgctgacctcagaaaatgagttagggagaagtcccaccytctaaattgtttggaatagtttcagaaggaatggtatcagctcctctttgtaccactgtagaattcggctatgaatctgtctggtcctggactatttttggttagtaggctattaattactgcctcaatttctgagcttgttcttggtatattcagggatttgacttcctcttggttcaatattgggagggtgtatgtgtccaggaatttatgtgtttcttctagattttctagtttatttgcrtagaggtgtttatagtattctctgatggtagtttgtatttctgtggggtcagtgttgataccccctttatcactttttattgtgtctatttgatccttctctcttttcttctttattattctagatagctatctattttgttaattttttcaaaaaacaagctcctggattcattgatttttttggaggttttttgtatctctatcaccttcaattctgctttaatcttagttaattcttgtcttctagctttttgattagtttgctcttgcttctctagcacttttaatttaattgtgatgttagagtgctgatgtgagatatttccagctttctgatgtggatatttagtgctataaatttccctgttaacactgctttagctgtgtcccagagatgctgacatgttgtctctttgttctcattggtttcaaagaacttcttgatttctgccttaatttcactatttacccaggagtcattcaggagctggttgttcaatttctatgtaattgtgtggttttgagtgagtttcttaatactgagttctaatttgattgcactgtggtctgagagatygtgttatgatttcaattcttttgcatttgctgaggagtgttttacttccaattatatggtcaattttataagtaagtgccatgtggcactgagaatgtgtatcctgttgatctggggtggagagttctgtagatgtctgttaggtccacttgatccagagctgagttcaagtccttaatatccttgttaattttctgtctcgttgtattgacagtgggatgttaaagtatcccactattattgtgtgggagtctcagtctctttgttggtctctaagaacttgttttatgaatctgggtgctcctgtactgggtgcatatataagaatagttagctcttcttgttgaattgatccatttaccattatgtaatgcccttctttgtcttttttgawctttgttggtttaaagtccgttttgtcagagactaggattacaacccctgctttcttttgctttccatttacttgggaagtttacctccagccctttattttgagcccatatgtgtctttgtatgtgagatgagtctcctgaattcagcacaccgattggtcttgactctttatccaatttgtcagtgtgtgtcttttagttgggacatttagcccatttacatttaagattaatattgttatgtgtgaatttaatcctgtcatcatgatgctatctggttattttgcacactagttgctgcagtttcttcacagtgtcattagtctttatattttggtgtgtttttgcagtgtctggtaccggtttttcctttccatatttaatgcttccttcaggagctcctccaagcctggtggtgatgaaatccctcaccttctctccactattatcctatgaccctgccacatccccctctccaagaaacacccaagaatgatcaataaatmctaaaaaaaaaaaaaaaaaaaaaaaagaatgttgaatatcggccacccctctcttctgtcttgtagggtttctgctgagaggcctgctgttagtctgatgggcttacctttgtaggtggcctggcatttctttctggttgcccttaacattttttccttcatttcaaccgtggagaatctgatgattatgtgtcttgggattgatcttctcagagattgtcttagtggtgtcctctgaatttcctgaatttgaatattggcctgtcttgctaggttgggaaagttcttcaggataatatcctgaagtgtgttttccaacttagttccattctctgattctctttcaggtactccaatcagtcatagctttggtctttttacatagtcccatatttcttggaggttttgttcattccttttcattctttttctctaatctcgtctgccttcctttcagcaagatagtcttcaaactctgatattctttcttccatttggtcaactaagctattgatacttgtttatgcttcacgaagttcttgtgctgtatttttcagctccattaggtcatttatgttcctctctaaactggttattctagttagcacctcctgtaaccttttatcaaggttcttagcttctttgcattgggttagaatatgctcctctagtgcagcgtagcttgctattaccccccttctgaagcctacttctgtcaatttttccatctcatcctctgtccagttctgcacccttgctggacaggtgttgcagtcagttgtaggagatgaggcactctggccttttggattttcagcgtttgtttgctgattctttctcatcttcatgagacaaactcacaaattcttcgtgagtttgtctagtttcgatctttgagtctgctgacccttggatggggtttttgtggggaccttttttgttgatgctgttgttgttgcattctgtttgtttgttttttttcttttaatggtcaggtccctcttctgtagggctgctgcagtttgctgggggttcacttcaggctctattcatctggtaactcccatgtgtggagatgtcactcgagaaggctggagaacagcaaaggtgggtgcctgtgccttctcctgggatttctgaccttgaggggcactgacctgatgccattaggaatgctcctgtattgggtgtctgacaacctctgttggagggtctcacccagttgggtggcatggggagcaggactcgtttaacgaagcactttgactgtcctgtggtagaagggttgtgcttcactgtggggaaaacccactcatatgggctgcccaattcttcagaactagcaggaggaaagactaggtctgctggcctgccgaatctgtggctacccgtcctcttaggggctcaggcccagggagatcagagttctgtccccaagcccctggctggagttgttggagttcctacagggaggccctgcccagtgagtaggagtgggtcagggtcaggcatgaagaggcactctggccacagtctgccatagcttgtgtgttgggctgtggggtatacctcttgagaccaagctttccagcctccttggctccagccaggaggggtggggggttaggaagggggagtgcagcctggagctatagagatggctgccgcccatcccccgccctgggatcttagtttgttaggtagctctatcccagtgtcgactgccgcctttcccacaaggacctcacagggcttagacagcaggcaactgcagctgtggtgctggccacctctcctcccaggagctcagcaggcttaagcagattttagccgagtggctgttgagaatctgtgcggctccatggttaggaccctaggccccagtggtgtgggatcttccaaatcatgggttgcacagttccatggaaaaagcatggtttcctatgcagggtagcacgctcacttactgcctcccttggctggggggtgggggctgccctgccctatgtggctctcaggtggcccactgcaccatactgctcttccttcctctctgtgggtcacaccagctgcctactcagttctaatgacagaacctggataccttaattgccagtgcaggatttgcacactgttatggttcttttcaatggaagcctctgatagctgctgcttctagttggccatcttggccctgcccctaatttgtatctcttaacaatttacttcagcagttgtttttaatagctttttcttctaactctctaaaactgctttacacaccacccttagagtgttagagaattctgagtatggatatgcatcacttataccattgagcctttttttctcgttttcatttgttttttgttattaattagcagacttttattttagcttaaataactcccattagcaattcctgtaaaacagggctagtggtgatgaactccattagcttttattttttccctcatttctgaaggacaactttgccaggtaaagtattcttgttggcaggtttttttttttttcttcagcaatttgaatatatcatcctattctctcctggcttgcagggtctctgctgcaaaatctgtttaaagtcatatttgtagtccattgaatgtgatatcttctttatatgttgttgcttttattattctttccttacctttgatttttgataattggagtgtgatgtcttggggatttcctctttgagttgaatttaattgatgacttctgaattttctatatctgaacattgtcatctttcctcagatttgagacatttttcatcattattttattaaatatgctttctaggcccttttctctctcctctcctttaggaactcctactatttgaaggttagttcacttgacagtggctcttaattctcataaactttcttcattctttttcattatgtttttctttttgtttctctgattggataatttcagatgtcctgtctttgtgctcactgtttttttcttttgctcgatcatgtctactattgaagctttctaataactttttcagttcagttattgtattctttatctctagaatttttacttgggtttttggtattttttatatttctttgtaagatgtattcttttgttttccatatttcatttaattttctatctgaattttcttttagtgccttgaactgctttaagagtattctgaatattttatcagacatttcatagtactccatttcttcatggtctgttactggcattttattagtttcctttggcagtgtcatatttccatgattttttataatccttgtgtccttatattagtgcctgcatatgtgaggacatcatcacctcttccagtcattgtttgtgttttttgatggtgatagagctgtactatttagtataacctagaattctggttgggccagctggtagcaacattggtaggatcactgctctgcagctaaagttgtgcaggaccaaatacttcatttataggtaattactgatctgtaggtgcctcctagcatggggaagacaacaagagcattgggctcagttggattacctgttcatttctaggattgggtagggccaaatgctccctccatgggtaactgctaatctgcagttgccttcaagtctgggaaagacttaatgcaagcattgaaattagttggatcacctcttcatggccagagttgggcagggccagatactctgtggataatcactgatctgcagttcctccccagtatggggaaaacttaaatttgagtaccgaaacttaggggattacctctccactggtaggactgagcaagttcggatactctctccatgggcaatcactgatctacagttgcctgtcaaccctgggaagacttgtgagagcatctgggctgtgtggggaagctgtctaaggattggaccatgaaatatccatgaactatgttttctccattataatgttgttgctagtctctctggtatggcacctccactggccagatgaagagcaacccccacaatctgtgtgctggtggctgagagccccactccttttctttttttctaaatgagcccaggtggtttaaccttgttggtactcctagcatttcctttgagacaagacaggagtgagcctcctgcaaagggtcccagaaaagtgggaagactgaatgtgtgcctccaactcacatttgtctctgtagaaactgcaagtccagggaaattatctgtggatgatgctgtgctagcttgaaggagcggtgacacaatcaaagagaaccatttcttttactgtgtaatcatagcccttctagattctgcagtccaaagggtgtctcagcttcactctcaagttttaggatattcagggtggtattctcgcctgtggatagttgctaattgaatttctgggtatgggggtagtgaggccacagaaatctttgtcactttgttgatgtcactcttccaatgtgttattttaatcctgtattagtatatgttaatggtgtgaccttaaactagtggcttctttgtgcctcagttttcttttttttttttttcttttgagccggagttccaaccttgttgcccaggctgaagtgcaacatcgcaatcttggctcactgcaacctccgcctcccaggttcaagtgattctcctgcctcagcctcctgagtagctgggattacaggtgcccaccaccacgcctggctaatttttttgtatttttagtagagataggattttgccatgttggccaggctggtctcaaactcctgacctcaggtgatccacctgccttggcctcccaaagtgctaggattacaggcatgagccacccacccggcctgtgcctcagttttcttgtttaaaaaacagatttttttttgaagattaaatgaattgatatcagtaaaattcttagaagaatgtccagcactaagtgagggctttataaaagtttgttgcaattaatgtaagtgttccaaatgaagtgatgagaaattagttacatctctgggtaattgttttttcttttatttaaaattatctaagtttatttttgctatttttaaaaaatctgtatattgggccagacctgatggctcatgcctataatcccagcactttgggaggccaaggcaggtggatcacctgaggtcagaagtttgagaccagctgggccaacatgataaaaccccgtccctactaaaaatacaaaaaattagctgggcatagtggctggcaactgtaatcacagctactcgagaggctgaggcaggagaatcgcgtgaacccgggaggcagagtttgcagtgaaccaagattgcaccactgttactccaacctgggcaacaaaagcaaaaccccatctcaaaaaaaaaaatctgtatatcgaagttcataaattgaactattagtcatttaagttctctgagtttgaggcttgttgactgacagactggatcacactttttgtcaggtttagattgggaggtatttcatcaagtcatccctaacttctaatacaatttcagatacaagcagaggtatgctgaacctggcccatactgttttgcgagagccaattgtgtgtccttcttctcaattctgtatttaatgacatcacattgataccctaaaatcacccataatgggagtatttacaccacataaaattggcaaatgccacaaatcagagcttttttcctaaggaaacaaagtaagccagctattaaatattcatcactgcataacaggacataaatccactttaaagacatagaaaatgattccagaactcagcaaaataaaaatcaacctctgttcttttcctattgaaatatttacacccagatgatcaaaatatcatatatcagtcttatcacaacgttgtttaaacactctataagttttatcccaatagacaacaaattacctactataattaatctcagcattttcatcccaatactattcacaaaaattccctgtgtttataatcattttgatattattttcaatagttaattaccactgatttttttaaaagttaatttaatttctaatttgartattacagtacttatattctaaatcttcccaatttaaaactatcttttaacaaaaaaactcccttaacagattaaaggagtaattgtgtcttactccaatcattctccttcagtacaatattcacagtgatccaaatgataggtaataataatctccttcatgctttaattactaccttagttttctttgaaattaggtgattctcattggtctgttattcacaattgctttctcagaaacatggtggtttctttttactcacagcaggcctttgtatcatctgagttttctagaaaggaaacatactttccagtatctctccaactgtgagtgttttaaggatatctttgtagcctaagcaccaagcatagagcagaggttcaatttcagttgattgtaggatcattccaaaatgtcatcacgtttactttccttgacccaagaacctgagagggtacgatttttctaaatataaatttattaagaacgtgctatattctgtaaccctagctggaaatttaccaagggttttttgtttgttgtttgtttgttttggttttgttttgttttttaacctgatggttactcttcatgtgaggatgaagtcttctgccagtcacagagccattcctaggcaaactacacctcacatttaaatagtgctttggatgttacaaagcgctctcacttactcacacggaccatttcaagaaacaaagtttgttttatcgatctcatcttctcactattacttctccctttttgactttacctcatcgttctactgttttattgcatgatttcttttgaatagctcccttatatcaacccctgattataagtaaaaacagtttctctgataagacaaataaattttctccaaagagagactttgtgggttttcagatgaaaagagtaaaggatgactgagaagggaaaaatgtttgtgagagagatgaaataaaagaacaaaggaaggatccacttacatggtgtaaggattctgccctctcacactcagtaagccaatgccccattgtgaacaaagcaagcataagatggaaggcatgaatgctgattcctcagctggtctaaggtacaatgtgcttgccaatataaggatctcatagcgttgactctaaattcagttttagactaaatttgtagaataatacaaatgtctcctaaacataagcttagtataagaactttatgtagtatccaactaaagaaatagtgccccacttctgttgctgggggaaacaactatggggttcaatttattaagagataatatgcacattcaatgcctcatacatacattttgattatgcacatggtaactttatgggttatttaaatgtttttacagctaacttaggctgttcttgattttcaccttcaacctgattttagaaactaatgtgtatttaaaatgcaatttcacccaagagttatagcattgttaatgttttcctcatatccagactagactacttctgtttcaagtatagactggaattccatgcgaaacatagctgtgctctttcctcaaagagctctttcctctaaactcaacttcaaagaaaaaaaaaagtgggcagttgaaggatctaatcagcctctttttgtcttatgaaattctgatctactatgaattcagacacaatatattatacttaggaaaggagacttgataattttgaagaaatagtttttttaatcacccttatcaaataagagagatgctgtatttgagcctgagaggaaccagagttagtaactaaagttattaatctattgatgatcagggacttccaggggtctaatttaggacacacattacatttacaagagactgaaccaggaaaaaaaattgttttacacttaaaagactaactaaggctgtccttagttaataattgcagagagcttggagatctcacagggtgttaaatgttctttctataatagtacatgcactctcatgttctcatcatattgtacatgtgaggttttctgtgttgcttaattatctaatgttctatcctatccaatggagattccaaatttgccttctcaattaactcatggatattagacaagagacttgtgttctttctgctgaacagcaaaatgtgctctctgaaatgtaggtcatttgtgatatcaagaacagtataagcttaaacattccccaatgtgctttgtagtcattatttctattcccattcactattatgggagtctacaacttttagaaatctttaaacaatatacattaatgttattattatatttcctaggaataaaaatagttgaaattcaaagaattaatacaaataatgttaataataaaaacaaaatgtgccttattactaagtcccactaagttttagtttggggtacaaatgtattattcaaacactcaagtctttcagtttgggatttaagcttgcatacttttatttactgactttatcagttgctcaaataaaatactggataaactaaactataagaggaagaaatatctatgttcacagagtccagcagactaattctactatcacgaattattgatagagttctatcttttcattccactttccatatctccatatcccctgcctctatcatgaatatcaaacatgtagctcttctcaaattgctctggatttggtgcagcttgtcactggcctggcacaatcaagtgccctgtagcatggtgctgcatcrtcaagtgaagaagatcagattataaaggaaatggtcaaaaataccctttaaagtctcatatgtacttgctatgcactagctgcattaattcttacagaaactctttgaggtagatactgttattttctctatttcacaaatgaagaactgagacagagagaagtcttagttgttaaaatttgttcaaagttgtaggtaataagtagatggtagaatctttggaagatgccatgatattcccatttctcgataatcccaacacagcctacgctttttccagcattgggatagatgactgtttctttagttagcatcttgcatttatgaccctgatgtatattaaattcatacctttaaaaactacaattaaatgtcatgaaaggtggttgcactgcaagaggcatgcaaaaactaagtccaagtgttaaagtatcaggatcactttctcatcattgggcattttcyctttgagtgaaaaggcaggcagaattgcttactctgttttaagatttttcttacttttttaaaaaaaatctaataggtacagttaagctcatgtaagttaaacatttatgatattttactctaatttcagagcctaccagagtctatcctattgagattagtatgtctgaagaccaccctgaactgttgggaagcaacccagtggtattatctagacgcataattcacatttgaggaaactgcctctgtgaattattttgtttttaaatagcttatgtaggtaacacttgaaaatcaaacatcattcattttttgagtacgtatgtatttgtttaaagaataattcaataaataaaaggctgataactttaaggatacagctcctcagctatttcagagttcatttattacaattagcatccttgtccatttctttaatattgtgttttaaaatatggccatttccactgtgagggctggtgctattggaaagatttcaagaggaagtgcaatatgaacaggattttaaagaaaggattggacttgaatttgtgggaaaggtgggggaaagacagcctagagcagaacatattatgaacagaaatgtggaagcagaagataaccaagtgccacaacccacccatctgttgtctctgttctatgcacagcagccaagggctctaagaccacatgccagagcaaacatgtcactagtttaaaatgaggcaccctcatggcccagcaatggcacatgtctgtggccatcccactatttcactctctacaacaattggcaccctaacctctcaagsataaacctcagatcactcctaccaactccctgctttaagcagatgaccatacttactttcttgagaaaaataaaatcatcagaacagagtctacttttctacccaataaaaatctcacacactcttcttcctttctcttataatagaagacctgtttttcccttctgaagtcagtccttccatctgtgctttgaagccattctcctcctaccttctgatgaacattgtactatcaataattcatttttcttgaatatttatcctttccctctcaaataatatttttaaataagcttgtctctccaaagtttaaataaccttgcctcaaaatctccaggcttcatgccattttgctcgccttcacaaatttcctggaggagttgtctataaactcttgatctccattccttacctcttgttcaatccataaccacttgatctggttttattcttcattacttgataagatcaacaatgacctgatatggcttggctctgcgtgcccacccaaatctcacgttgaattgtaatccccaatgttacaggagggacctggagagaggtgattagatcatgggggtggatttaacccttgctgttcttgtgataggcagtgaattctcatgagaactggttgtttaaaaatgtgtagcacttccccctcacctgctccaccacgtgaagatggtgcctgcttcccctcaccttatgccatgattgtagtttcttgaggcctccccatccatgcctcctgtacagctggtagaactgtgagtcaattaaacctcttttctccataaatttcccagtctcgggtatttctttatagcagtgtgagaatggaataatacacctttgggatactagacctaaaaatacttattcatcattttatttgatttacctgcaaatttcaacaatgttaactattccttcctcaaagtatcttcttcacatgccttatgtaatgtatcatcaccctctagtttttctccctttcttgatatctaattcaaaattatttccttctaccaagttaccaaaagattgatttcccaagatttgtcttagtgcttttctcatctcactctacagtttccatcaaactgttatcatctatatatattatctatgtcaaggtttctatcaatatctatatccagataactcacaataaaaaaatatattttaaataatactttttattttgagataattgaagattcatatgcagttgtaataaataatacaaagagattccataaatcctttactagtttcctccaatggtaacatcttacagaattacagtacagttcctgcaaccaggatactgatatcaatacattcaaaatacagaacaatttcatcctccagattcttcaggttgcccttttgtagccacattcacttccctctcaccttcttccccacttcattcttatcccctgacaaccactaatctgttctcaattcctatgtttttgtcatttcaagtatgttatataaatagaaccatgcagtatgcaatttttattgattggctcttttcacacaaaataattctctgaagattaattcaagctgttgtgttttcaaaattatgttattttattgacaaataacatttcttaatatgtatgtaccatgtattgtttaaccattcacccattgaaggacatcttagttgtttgcattttctggctattaagaataaagctattgcaaacaattcatttgtaagtctctgtgaacatgtatttctctgaggtaaatgtccaaaagtataatttctgggttgtatggtagttgtatcttgttgttgtttttaagaaactgccaagtgattttccagagtgactataccacttcacattttcaccagcaatgtgtgagtaatccagtttctacacatctttgccagtgtttggtattgttttattattttttatctagccattttgataggtgggtagtgatatctcattgtgggtttaagttgcattttcctagtggttaataatgttgaacatctttttatatgtttatttacaatctgcaagtcatcttctgtgaaacatctctttatctcttttgctcattttctaattatattgtttgatttttatggttaaattttgagaatttttaaaatagacactccagatactggcagtttgctggctatgtgttggcaaatattatcttctagtctatagtttgtcttttcatctccttattatttttcacaagacagacatgttgaaattttaaaattctttgcatagccctaaatgtaaaagactttctccttttttttcctaaaagttgtataactttacattttatatttaagtctgtgaaccattgtaagttaatwtttgtattaggtatgargtttgggtcgtttatatttttacatatgggtgtctaattgttccagtatcatcggttcaagaggctaacctgtcttcacygaattacttttacaactttgtacaaaatcagttgggcatgtatttgtgtgggtctgtttctatattatttattctgttccattagcctatgtgtattctgccaccaataccaattttcttactgaactgtctctgacagtaccctgtgggggattgaagtgccacatcacagtctggtaggagtgggagtgttggctgcctaccttgcccttggctggtgtaggggagaagtggtgtcacagtgtcttccctgatatttaactggagtagagtggttacaatctaaaagtttgctgttttttttttttttttttcagctgcccctttaaagcaggcttttctttggggctttttgaattgcctgctttagcagcatgtatttcatgcctagaatatatgaggcaaaaaagaaaacccagaaaactcacctccatgttgttacttgagtcctgacatccctaggtagtctgtcttctttatgcctgtcagagtcaccttatgtttgctttgtatataatttccagagttcttaatatactcagtgggaggaacaaggaaaaatatgcctacttcatcttcccagaatcagaagtttcactcacaaaattttacctccaacctaaatcttttctccatggtccagaaatgagtaccctcattttaatctgcatttgtatgtctcaaagccacctcaaatataacttaagctcaaagctcagctacctccaaatgttgcactgcagtcttcctgctacacaagggaaaaagttaaagttcttcttggcacctcttctccctctcattctaattatcgtgaaatcctattgatttttttttctctgaaatatgcttttaagtcttcccacttctctgttatctgtatgccacaactctaatctaagctactatcatatctggtcaaaatgttttgcaaaagtctcttgtctgatctgctcatatatacccttcctgctccaaacccttctctgtattgttagtggagtaatcttttcaaaacactattgttcttatttaataaatttataatgcttttagaacattgattttttaaaatctttcacctcacaagccttgcacaaatctattatagaagcccagtatttgttgataaataactacagtgtatatctccctgattagattcaattcacctaacagacagaaatataccctaaaactctacatatcttcagttcagtggtgatctgcaaatgcttaatgataatgatcttggtattctaatgactatacaaggagattatatatacagtatggctagaaggaaaacatgtgaaagtaataaacagcaaactattaattgtcctgctatttcttttttttttttttttttttttttctgagacagagccttgctctgtctcccaggctggagtgcagtggcacaatcttggctcactgcaacctccccctccagggttcaaacaattcttgtgcctcagcctcccgagtagctgggattacaggtgtgtgccactgtgcctggataacttttgtattttttgtagagatagggtttcaccatgttgctcagactggcctcaagctcctggcctccgataatccaccctgctcagcctcccaaagtgctgggattacaggtgtgagccaccatgcccagcctcttgctatttcttacatcaagtgaatttatttgtctgcttaataattattatccgtaatataagtgttcttacatttctaagtatatatacatttttaaaccaccaactcacttctcacccctattggaaatctgtaaaataatcactctctgcatttaaaaataataataacttcagggaaaaatggtcataagttaatgaaaatattaattttgacaacaaaaatgacagaatcgttacaaatatgtttgtacttatggccttcccaaataaatgtcaaattgttacaagctcttcactatatgagctatgtttatttattgttgcattcatcgcatgtaagagaataacatcaaaatattgtttctgatgttaagactatataaaaggaaggtggactacttcctctgctcttgaaaatcatacgggtcatttggattaaaaaaaaagaaaggcttctgatcctgacaaggtttgggttaattggagaagactaataagacaagatttttggtcctgatatctaaatcagttttagaacatcaggtgagaaagagagagatgaaaaaaaaaaaaaagtagttacaatatgaataaaaggtacagaagcaagaacaggtgggactttggtaagcaaaggtaaaaccactaatctagaaaaaaaaagttaggattgtcacagcaagaaatatctatagtttatttttatagctataaataagattttcaatatataattcaaaatataatcacagtatagaccatgagagatcaaatttagaatattcccttttgtcacaaccaatttatacctcagatttataagtaatgcttaaatttcagagataaactccaacacattaattctataacataggaataggtttacatttcagtggactgataaattttatcctaactgaaatttctacatcttacaggaatagatgggattttgtttcacatatgaagtttcttttcatttatagacaagtttagggtaattctgaggtttaaaaaaattgctcagaagtgagccatgaaaatcatatagaaaagatacagaattttattttgttggatctactgaaaatttagactatgataatgtttaagcacaactaaaatttgtttctttaatattactttatattttatttaatttgtatatgtttcttttgtgtatttaactttctgttatggtgtttctgcatctgatttctaataatggtgactatggacaaaagaaatgtgttatctcatgaacttgagcataactacagaaacctcccaagagaaattaatttgatccatcataattctccttattgaaaagagaaaagtatattcatcatattaggagaaaaagtttcaggaagttgtaaaaaattaatactcttctaaaattatttccgaagttctacttgatatagtaaacacagcatagagagtagggtggaaaaactattagaaaactgttacatataaaattaagatatttttctgattatgaaaatctatgatattgctaaaactctactaaaatrttggcaatagtgatgagtgagtgagcaatatataaaaaatgctatcagctatcgcaaggacaaaaaaccaaacaccgcatgttctcactcacaggtgggaattgaacaatgagatcacatggacacaggaaggggaacatcacacaccagggcctgctgtggggtgggggaagagggtagggatagcattaggagatatacctaatgttaaatgaagagttaatgggtgcagcacaccaacatggcacatgtatacatatgtaacaaatctgcatgttgtgcacatgtaccctaaaacttaaagtataattaaaaaaatgctatcaaattcaaagatccacttacgggtttatgcagcaagagaggttacatggagtaacagagtaaattaaatcttggaataaggatgagatttttctgatagatttttgaagagacaaggaaatttagtgataacaaggttcagctatgagaacacttggctgtttgcagacaatactatttaaaatttggtgagtgcttactacatgctaggctatgttgtaagcacttgcacatgctatgacccatttgattctctcaaccataccaagagtcaagtgctcttatctccattttacaaagaaggagattagagaacggagagattaagtcacccagagtcatagaactactatagttaagtggtgaagccatgatttgaaacctggttcacaggcccacagtttgtgcctctgcaaaagcctctctctaatgtgagcagttcacaaatgtgccaccctccctatgtgtcaggcatttatgtacatgtacatttcctaagttaatcctcacagcaattctaagagttaggtggtttagagatgaaggattgagacatagcaggtccagaattagaacctatgctatatctcatgttttcaacatctcttctcccagcttggctaaagtcaagaacttgtaaaataattcatagaatataggttggataagtcaatgaaggccaaataaaaaaggattttgaaccaaaattttaaaatttagacctgatactttagacatagtccgcagtgtatgtatgtgctcaataaattttgttgaagaaatgaatgaatataaacagaagtgaaggtactggtattccagcctttcctccaggcattgtggtagcatggattacaaaataaagtttctaaataaaataatcatagccaaaaaactcgagtgtttgttttattttaaagattttgcctgcaattagacccccctgtcccaaacctgccacaaattgacgaagttgtagctttctgatataaatatccacactactgaaaggtctcattaactgtcagatcagtgaaatttttcactccattgtatttttactgaaatagctaagcataagcaacaaaaagaaaacaattatgttttattatttaaaacaaaaataagaatttccctcaataatccatgactttttaaattgctacttggtctaacctttcaccaaattagtgtcaaattggcctaaggtatcaaaactctgtgttcttattcaatgagtggtaattcctccaacagggatgtttccaatcctctctctgctattctctgttagaattgctaatatttcatctcagccctatccgtatcttaaatgacatgataaaaaaactgacaaaggtgggggacgtgggaccatcttctctctggtcttttgttttcttatttttccrtccttagactacagtggtcagtattacttacataatgatatggtctactcatatcttcctttctgaccagcgtttttactgggtccagtgtgaaataaaatatagctaccttttttctccttcactaagcatatgccagtgaattggtaacatctgcttgcttcttagcttttaccagaaacttttttcctaaagggtcatcatacaaggaaattttttttaatactataaggtcaaacacatctgttcgatcatatcaaaatttagcagaaaatgtactttttataaagactctataaatatcagcttcactatgaattggcctttatgttacttttaatgaataatattcccctccaaatgtaatttagaattaaacatttcagacaatatagttgacattgtaaaatatcttatccttttctctctattgcagcatggttattcaaagcctacaattatgcagtttctcaagctgcctcacaatgaaggaaatttatctattacagtagagaaaaaaaaaagaaaattcaaatgaaaataagtcgttataactgctgatttaacctgacaaaccatttctcttccttcgaatgattgctactgtttttggtttacagggaccgagctcctttcatttttacttcagagatggaatactttattacagagggtgggaaaaacccacagcattttcaagattttgtggaactttgctgtcgtgcttataatattatcagaaagcacagccaactgctcttgaacctgctggaaatggtaagtcccttgggaaaaaaaaacaaaaataataagcttcatttatgcctctgcttcagtagtctatttttactaatggcttggagttccccaaggagctattcggaagagaaaggaatgagaaaactaagagtaccattgtacagcttataaacgtatttcttaataatttaatatgttcgttcatagttattgtctcaaacattcctattcgtatcaatattgatgcaggtaggggttatcccactatattttgactaatgttcaaggacagtaattttaaaaataatgccttcagtcatactaggcattaggatctttcaaaaatgccttatatatactatctcatttatatatcatgacaacctaatagtgyagaccaggcragaattttccctggctgtccattccaaactccacctttgatcacttgccaatttcccacattaagaaactgagagtcaaaagtggaaagtgagttgctagcaactcagcttttcgtggtatgcattaggtgtactgagtcatggtcctacacactctcttgtgaccaacaggggaaaatttaaggttttattccactgttcactttaaagagatggagaccagatatgtaccatgagggaagaaaaatctgatagaaatatcttctaggagagggatatagtgattcctctaggcacatacgtacacactagtgattgcagcaaactatacatgggaaacatacatttggtctatcagcatgggatttggagtctatgaaaaataactgatttagagcttccagatgacaataattctaccagatgttgttaagggtacaaacatggcaggcagacctttctgggtttcaatcctagtttggcattttactggctacattcttcaggacatgttaacccccaaaagactatttccttatctgttaaatgaagataacaacatctaccttgtagagttaatgaataaatgacctagtagtgaattctttgcatggcccaggcattgtgctaagtgctttgtgtgtattaattgatttaaaattcataacaaccctaacagatcattaacataaagcacttagcacagtacttgccatttagtagacttcaattcatttatgttattatactagatccttgttaatttataaggccactgtccaatgtaatatcctctagtcacgtttgtttatatttaaattaatttttattaaacaaaatttaaaattccagtcttcaatttcactgatcacatttcaagtactcagtagccacgtttggctagtggcatcatattggtcagcacagataggaaacttccatcaccacagaaaagttccattggttagtacagaacaaatgttgactttgttgcaaggaagatttgatttggattcttgttttaactttcaaacaacatattmaccttacttctctccactttgccttgaaagataagtatctctaaaaatattataaacatgtccttcatatgcaaagatattggtttcttcttgtgtaaagtggatatataaagttctacccatctccgaaatcttcaagattacttttcagtaatagccaaggattcttattggtaaatttgcattctatctcccaattctattaggccgttttgcaagtatgagatgactacggtttataatgtgtctgtaccacaaacaaacaaacaaaaaaaccctataaggattaagtctgtgattctgaccccatttaaataataaatatccaggtagtatcaagtctatgtctccttggactctagcaagctctagctcatgaattcatgagctcttgagtgtttaccacaggctagaaattgcaaggatacattaacataagagacccagagtcttaaaattttcaacttaatgaggaagataaaatttatttacataaaagaccgaggtatccagcatttctaaatgcctataatgatataaataactacatgtgaggaatagtacccaattttaacaattgctttaacctgctccagatatttcaaaaataaacccaaaacagaaaagcacaaatataagttatgctgtttctcaggtgacactaaaattatgctgatgaaaactgagcatgttaaaataatgtgaaagaacagctctttcagaaagctatcagtgggctttttttctcttgtttaataaacttttctacataccttaacaaagcattcagcataagagtcatgatatgttaaacaatcaccaaagagaatgtatagtggtattttatttaaaagaagtaactgtggtattttattcataagtattaaaataatttatcattaatcacttgttgaaaatttctggaatatagtatatccaaaaaaacttctatgctctaattattcagctcttttaggctaaggaagaaaatttggcagtggaaggcactaatccagagtaaacatataatcttagatttaggctctcacagaaattgaaatagagatcagaagcaatgtggaccaattaaactaatgaataaatacatgtaaaacagcactgtgttattacctcagtttctgttcatttacctctcaactctcttcttctcaactgtgttatcttatgggactgtagatcatcaaagcatttagtgaaagtttcaggaccaccctttctttggtatagcttcttataaaataaaaccaagtttaaatttgtgaaagactattttctacttatgtatgtaatctattcattaattctgtctcaacccgactcttttatgttaaattctttaaaaagaattcagtctacttaccatgacccagttacaacttgagaaatacttgacatgggtcataaattctatcttgtgcaaatgatcagtccccaggattatgggccacagacatttggtgggtccactacagagttaatggctcatccttagtaaagagcagcatgtctccagatatccatattgctttttatttactcctgagaaaagcggggtaaaaagtaatccatgaaattcccatcttgcttaaaagtaacatctgtaggagacccaagagtattgccggctgagttsccgaaaataaaagcctgtgtttcatcagcttttctctcattaaaaaatcaatatcagctattatggaaggctcccagagaacacagagaccatttgcccagtttaaaatgtttatcacacccattattatattagatatttcccatcagagatcttcctaacttctctatgtgatggggaagagtgtctgcttttctgagcataactgttaaaatagatttggacttaagagaacagaagtaaagacttcaaaaatgttcctgacttttaaaaagggacgtatctattcattacctgtatctgttcacttcctgttctagcttccctttcccttggtattgccccaattaaagttattacccatgcagtctagagttgggggcaccagaaccatgtggctaggggtcagagaagagacatagctaagtgtacccggctaagaggccatccttactctgtgatttgcagagtcaacactcaaagtctcctctccaaggaacagaacacattaataagggcaaacttggcacatgttacctttagtcagatacatggtggggagagaactattataggttcatctggtatgaagcagtctgtacttggcagctagtgtgtgacatgtgtgggttatgtgtgtgggtgttggcaagggaacgagtaagtatagggtccactttccagagaaatgtttgatagagttctaaccaagcaggtgtgaattcagggtatccagagaaactggaatgcaattcagaccttacagaagaagcctatccttagaaaatggatagttatggtgtgataaagaagaaatctgcctcaatgagcacacggaagtctccaaacctcttagtacagaactagtaagataaaacctaatctagattctagtggctwtcgggaatgtgtcttcctatggttgattttgttaagtttactagtcagcattaaatttgctaattgtaggttttcattgcctaatagcatcaagtatttttttctctcttattttaaacttttattttagattcaggggtacatgtgaaggttggttacataggtaaacttctgtcacagggatttgatgtacagattatttcatcgcccaggtattaagcccagtaccmaatagttatcttttctgcttctcaccctcctcctaccctcgcccctcaagtagatcccagtgcctgttgtttctgtctttgtgttcatgagttctcaccatttagctccctcttataagtgagaatatgcagtatgtggttttctgttcctgcattagtttgctaaggataatagcctccagctccacccatgttccagtaaaagacatgatctcatttttttgtaaggcttcatagtattctatggtgtatatgtgccacattttcttaatccaatctgtcattgatgggcatttaggttgattccatgtctttgctattgtaaatagtgctgcagtgaacatttgtgttcatgtgtctttacggtagaatgatatacccacaatgagattgctgtgtctaatggtagttctgcttttagctctttgaggaatcaccatactgcttttcacaatggttgaactaatttatactccaaccaacagtgtgtaagtgttcccgtttctctgcaaccttgccagcatctgttattttctgactttttagtaatagccattctgactggtgtgagatggtatctcattgtggttttgatttgcatttctctagtaatcagtgacattgagctttttttcatatgcttgttggacacatgtatgccttcttttgagaagtgtctgttcatgtcctttgcccactttttaatgggtttttttgtttttccttgtaaatttgtttaagtttcttatagacgctgggtattagacctttgtcagatacatagtttgcaaatattttatctcgttctgtaggttgcccgtttactccgttgatagtttcttttgctgtgcagaagctcttaagtttaattagatcccacctgccaatttttgctctcattgcgattgcttttggtgtcttcatcatgaaatctttgcccattcctatgtccaggatggtgttgcccaggttgtcttccagatttttatagctttgggttttatatttaagtctttaatccatcttgagttgatttttatatatggtgtaaggaaggagtccagcttcaatcttctgcatatrgctagccagttatcccaacagcatttgttgaatagggagtcctttccacactgcttgtttttgtcagcttagtaaaagatcagatgatcataattgtgcggccttatttctggcctctctattttgttccattggcctgtgtgcctatttttgtaccagtaccatgctgttttggttaccttagcctgaatcatgtgtttttttattcatgcattcattatcccagacatttattaaaatctagctatttacaaagtgccgtgctgtgcaatgtacacaattcaacattaaatacaaatccagttcctgttctcaaagaacttaagatctaatatgacaaacatacatatgaacaaaacacagtaaaagctaggaagcaatacgtactatgaaagaagtagaaccaaaatatgattgtacaaagaaagcagtcattaaatctcatgaagaggatcagtgatgcttcaaggaggaagctgagccttgaaaaagaatttcagtgacaaggaaagagagaaaaggcaattccagctgagagaaaaatgtatgtgtggaggtttaatgagcatgggcatgatgtgtagtaaatgaaggtaaccaagtgtgcccagtctgtgctatagatggaaatctctgtagaagatgaggctggagtgataggttacagtgtgattataaaagacatttgtgaccagaatgaggattttagactttagtacctagacacttgacaaactagaagtttgtatgcttatgataaagaagtaccattatctagctgggatcttaggcagataacagagtttatgtaattaaagagataaggattggagaacaagataaaagttattcaagatatctgggcaaatgaagatgaggggctgaattaggacaatgataattacaatgaaaagggggatgaatacaagagactgctgaggagtgtttttaatagaatgaagtaattgattataggaaccaggaaaaagagagaatcaaagaagatatgaatttcttgttagttgggcagtggtggcagtgtaaatgaaacagaaaaaaaagaaggaaaagtttatgtgagaagagaatttgctgtaatttagatgtcatgagtttaagatgctaatagatcatccaggaggatagagagttgacaactctccaggactccctcatccatctccttggtttcaattatcatttatatgctaatgacagtcaaatctgtattatagcatgtgctttggaccctctcaatatgtccaatctatctcccagttttctcaattctacttcctacatttatttaaaatccaatgactgatcttcattcctaaccagtctcctaatctagcctctaaacgggcctcattttagtccattttccatacataaccacaatgatctttcaagacacaattaaatctcttactctcatgttaaaacacttaaagagctttcttgtttttttgtactttaggatagagtacaaaatccttaatgttgccagaatgtcttatcctacttgcctttcatccccatctcttsctgctcacccatgtaatactcggttccagaaagccagcctgggtttctttctgcagacatattaaagacatcttgctttcctttgtatgtcttgctttcctatacatgctgcttcctgagcctgggtggggatggtgggaaaaaagaatagtttttataccattctttttctcatttgaacttcagcaagttaatcacaatttcacccatcttccaaaaccatattctcactttaccctttgttttaaggatcgatagtatcattcttaacatcttattgtaagagggcctttattccagagcagtaaataatttatcatcttagtcatagaagtgctgataacagtcttcatttttttttttgcaaagttcaaatttagtttagaaagttctattattttctttaaaaaaaagtagtctaaagagattataattccctcagtctacactgtaatataaacaaaatatcttcctgataattggcaggaaaatatcttatacaattcatccttaattatttattgccttagtaaatgcagtcaccatttaagtagggaaaattgtattcttctagtgagaatcatggagtcataaaagaacataggattaagaaccagagcggtgagttttatactctatgtttgcacatcatttgacctggacatatcacttacagttttgtggagattaaacttttcttctctaaaatgcatattattatataatttttgtgtaatattttgtaatgtataaacctctttcttattttatatctattttaaaaacgagaaaatgaagactcagaggttaaggaactttctcaaaatcacatagattttaaatgatgggtccacaaattctcacatggggataatatcatgcttatttcactggtttatgatgagaataaaactgaattattaatctacaagaatgttccaattatagtggttcttttgttatagttgttattgctgttgtctctactacttaatagaagagattaaaaacgcacgaacttatatgcattcgtgtatataaactgaaagacattgccatgcaaacttgggtctagatgtctctgggtagaattaatcaagtaagcttgattgtatctgcatttattctgtcttctttttgctttgcttgttcttgttgtggttaagatgctgtatgcaggactgcctgagctaagtggaattcaagacctgaaatatgtgtataataatcttcgtccacaagacacagacctggaagcaacaagtcattttaccaagtaagatcacctatgaatgtgtgagcatgcatgcatgaatgtacgcagacacatgttccacagtggagatgatttcaggttgaccagtcattggtatgaagctgttgtttctagaacaagcttgtgttccctttcccaaagagcagaaaggaagcaatgtgaatgtctagcagaaggccttagtcagtgtttctgcagcatgtcattgtttgctaaccagcctcttcatctaacagattgctcaataagaggtcattgaaaagagcaagagctgacataaataaattggttgttctacttgaactatgtccagaaaaacaatttggaaaaagagatttatgatgagatatgtactcactactttcctatgtaagacaatacaaatattgggatatttggtcaaagacctgtgactctcttctacttttaatctattttttattaaacaagtccagcaaaacactgatgtatatcaaggtaagaatctgggcagaatatgatgaatatcagaccccaaatctggtcaaaaggacagtacattttataagatctttttgaatttttctttttaaatggatatataattcctggcaaattttaggtgctcaataaatgttagcagtaattattttcctacaaacaggagagaaaaactgcattctttctttcctgtaacctcttaattgtggtcttgagtctaatttttaattgttctaatattttccactgaaaatttataaacagagattatattcttttaagtggaatgtatgctttaaagaaaatcatgattataataaaacctcttccaggttttactttttctttcacccttccagaatatacagcaagaaattgcttcccactccaatggtggcagtgcggcttcatggggatgtcgtacacacttggggaatttcacttggctcagggatttctgtttcatgaacttgaatgggtgtgctgcccttgttgttgaaaagagacaatgtgacagaatcacaaaatattacagctggaagagcctttatagtttatttattctgacaatagacattcaagtgagaaaactgagatacagagaattgtcttgcccacaattagtagaagtagcaagaaacagtgtctggtccctctagtcctgggtttttccagtactcaatattggaaattatatgatatgattatggaactccaggaagagttgttgcaaaaacaaaacmaaacaaaacaaaacaaaacaaaaaaaaccctgccttcttgctatctagttcattagagatcccttaagggagtccagcaggttgtcttagtcttgaaaaatgccctttaatagtacaatgacctctgaaagaagcatttgtttacatctactagcaaaatcccaagtaattgatgttcgactgtggccaaagacattagcttgaagacttggggaggtattttagaccctttatttcaaggatcaggaactctacagttatctcaactaatggggatgggtgccttgcatgagaaaacccagggaaagcctcaggaagaacagaagggcagcgtcacagagtctggaaggtccttcagaattgaaggcagctccagggaccacatcagcaggaacttackccttcccctctgactgtttaacccgagtacaaaactccatcccatgcaggtgggtttacgtggtagcaaaaatagccccctgagggtatcccttcaggagaggatctgagtaggattcttttctttaaaatggctgcagcatggcagacacaatgattgacatgtcagtggggctgggtgggaagacaaaggaggagcatggagaaagctagggaaggtagaaaaaaggaatgcaaagttggactgcaaggcctgtgttcgagatgtrtcattgtgtgggcagaacaattatagtgctgtagcttactattagtccctcctgaaaaaggaaatgccatatatgtatttggatgaaaaaagttctttcaggccctggccaaaagagaaatgtaaataggctttattcatctgccagaattccatctctccctatccctctacttcatgsaacacactgagatctgtaaagagcataatcttggatatcagtgatcttgcctacggtgacctatctccccttcccattcaagaggacatgaactaacgtggaagtagatctgaagctagaacctcatggcagtgaggcggaccttgtgatcctgcctgcatacctctgccaggccaatcttcccacttaccaatgttatgtggtatgttctgttaattaaacttctttctatgactttggaataaagaacttgttctccattgaagccttaaaaggcatcaaattatggaaactaggacacatcatttctcagttcaataattttccttggtgtgccatctcctgtctctcacttcctaggaccttataatctgattgtctttgtcaagatttatccaactacccgccccctgtctccattattccacatgaatccttttctggataggccattctctccatgtatattcattcctgcattgtctgtttaactcgcwttgctagctcactagaaacactccaatggaatcataaaatttctggaatacaggaagattctgatctaacttttaatcccacccatcccttgatattctggacagctagtacctcatccatgaaaccttatctgatcattccagtacttcccaatcttttcttctataattctctcgaacatgccgtcttttgtgctgtccttaatttattactgaattacatactgtcttgtatatcagtttaattaatatattgatgagttacatcaatttctcccaagtaaagcagggaatgtattcccaattctaagaatatctgaatatgaaacaagccctatttaacagaaaatgcaatttaaacatcaaatatcaagtatataaaaagcatataataataactacaacttaatgcagtgcttcttgtgtgtcaagccctgttctaagtgcttttcttacagtaatgtatttaactgtcataacaatcctatgaggtattaatatctttwtctacatttttatactagtgaattgagaccccaaggaagttaaataatttaccagagaacgttctctatgctcaaaatcacctcttccatatgtgggctctcaggaatgtgctgctttgtaattcagaccacagtcttctcaaggtttttcagagcctgcgttggctgaagttgaacaaagatatattctccagcctttctcaggcactcatccttttatccggaatacctcaagcatcagcagagaacagaagttcctttctggaactgctatctctatgctaccaccaggagtcccctggatatttggttccagatctgctttgctgccctgagagacccctaaagggtaacttggcagctgacttcctggaagtcaccttccttccttttccttttgtggcccattccacaatgccatgagcctctctctactttttttttcttctcagagaaatatcccatgaggctcactatcccctaacttccaagagcccatctcagtcatattttttaatcttaaagtctcaattacatacctttatttttagacatgatttaatgtgcaagtagcatatctgttcaatttctctgtgtttcttgctcagcatatatacatcaagcactgaggatcttttctatcacacatcccatctagcactatgaacaatctcttacagaggggccagcagcctccattaattgtaactgtaactaccatttagaaatatttcctgagatctatcatttgtatattataaatttctgaaacaaattatgtattatgttgtttggaaatccttaaacaatgaatagagtgaatttatgaaagcagcctgggataattaaaaacaactttaatggaactctaaataacaggatacccatgactcaaataactgttaaaaataatgtagacttgtttactttgtgtaaataatattgctattttgtgctgtgttccctgatatcacatggattttaaaacttagggaractaaatgcagacctcgttgcacataattcaccaaaaaaaaaatggtttgtcatagatccatcattggtgtcttcgtgcttcaatgagtggcattaattcatagatagataattgataaaagtatattatatacatataatatgagcccctctatatttaaactccttgttctttttatttctttgttctgataggctaaaagtattttatgccactgtttattgtgatacaactactaagttacagacaaaagtaagacaagaaaaccccttctcccttctccactaggctcacagattgggatcccgagccaagaccaggccatctgagacataacatatgtggctactttaagtgccctggtcctaactacaatattagcactaaagggctgcccctcttgaccctatttgagacttgaaagaaataaacagctttttcctgcctcttggagaatgtactctatttatgaacaacccaagatttttcctcactcttggacatatccattctaggtcaagagctgatcctaagagtttcaggcgatgctgcatactgtgtggaatttaaaatcctgtacrattaatggtatttagagggaaaatggaaagtaaaattggtttgctggccacaaatgcttttcacatcatcatcaactacyctctgtttcccttactctctttcactccccttacagctgagtgctgttgaatagaatcaagaaagtatcatgacacagtccactgcaaattgatactctcatgtaatatctctgcagagaccactgctaggcaacaaaggcagccatccattaaaatgttgtccaaaagggttatttcagaaatttcaatcactctcaaacctcgggttagctgtcctcatcaagagctaacctatttcacagaccagactgggatcattaagcataaacttccctgcctacctcccctcccacatagagatagtgcttttcattctatccattttctcctccaagagagtgagaggacatttttcatgtatgctcagatattccacttggcctgccatgtaagttctcatttagtaagtatatgatctgctcgtcagctaaaactgaagccagcttcaagcaaaacaaaaccccacacttcaaaaaacaaaacccaaaacaaaacaacaagacaaattgtttgcaatcatgagctattttgacagcaaaagaaccccgtctggtagccttagattaaaggctctacatggagtcaaactgtaagctaagaaatcccagaaaccaatagggcttggctagtttctagtggaaacacacaggccttctactctgtttacctctgcttagcatattctattgttccctgctcattgcccaatattcctcagtgtaaattccagagagaggcaaactctttgacttaactagttgcctttgtccttattggacaagttccttcatgtgaagccacagtggatttcgttgcccagccgtattcttatcataggccaccctttcacagaaaaatagcctagagcttcttctgtgaactttgagctgtgagggaagtcttaggaggggccattaggcagaataggcacagtgaccatccaacaggtacaactttgaagccgttggaaatgtggatggcatcccgagagtgcacctggcctccacatcatggacacaggagccagaatccctgcaccactgagggtttgcagactcaatttcagaaattctttgttcccctcattcctcatttatttctcacggctagggtgtgagacaagactctttatgctcaaatgtcttaaaacatagttcaatgattttatatcttttttctcttcaaaactgagaaatagcatgagatggaaatgcaaatccttgtatacttttatcattaaattttcttattttttttactgtgatgcgaactgtggttacaattccacaaataagagccaatgttttcctttgtcttagcttaacaattgatacytacagaaataaacactaccaaggggagatagggacacagaaccaagagaaaataacaatcaagaagtccagcttttcctaaataagaaagcagattcaaaggaaaatgtaaattaaaacaagtagaaatttctcctctcattgtgaaagtctcccattatttttagttataataacaaacctgaactaaattagctttataaactatttttaactgcagatataaccacttataatatctgtacttcctaagttgcacggcccagtcacattcattatgatgtttgatagtgtgcttgctgttcttaatttctgcagtaggggaaatgctgtttttgaattatatgaattaaactgagaatttgcctaaattgcctaaattccaagtcaggatacaccttagctattaagctttgaaaaaagatatcgtaaactcttcaggagactatcagtctaaaggttaaaagcatttgaaaagtttaatgtacccaccaagagtaccagaaatcattactgaaaaaagatgaatagtccagatggcgctgtttcccaacagctgttttatgcacaacagcgctgtgtacctgttaatccccattgatatttctgaccctacgcattgcatacaattactatataccagtgatttaacaagcaattaggctacaatcgtttactattttaaaacatatttttcacattttaaagatttttattagcaccatttatcactattgatttttctttactgttgcatgttaagatttattttttttgctttgcatacaacttccttttaatatcattaataaaataaaatggctttgggagtgggaactgaaaactggaatatcatttcactggcatatcactttattcatagtaagactagcccatcaacccttccctggttccttgattcagtttgttctgatttggtcactttcataaggcatctatctaaaaaggtaaaagaatgatccactcccagccaagtccacagagcctaaaactcttgtttgaatgcagtttggtgcctgtgatgacatttacgtaagactagctgaacttgtagcatgaattctgaagacttgaaacctcaacttggaaaacaacaaagacctttaagtttgttagtctttaagccatatctaaactgtaaagcaggaaaaggggatggggagaagaaataaaataagaaaataaacactaaagatgctgcttgttcttatccttacctaatatctctcttgtaggagttcaagagagcaccacaagtcagtttcctttgaacaataaatttatacattcattttctcttgtatccctctttgtatagtttgctaccttttagactcatatgcatttatttctttactcattggtagtagattttctgaaataatatttgcttaatactatttaatttccaaagacttttcctactttatctaatttcatcctatcaatgatcctgggaaatggcatggcttagcaatcagttatgttttataaatacagcaattgagtctcctgaagtcattcaacaatgactttcttgagatcactggcatgagtcaccaactgcattttatagatgcaacagttgaatatcctaaaattgttcaacaattactttcttgagatcatgggtagacctagtgagtacagattagaacaaggtttatttcttgcataatgagygctcttcccaggacacaactatgccaaatcatrtggaaaaaagttctgcatatggaactcttaatgtcctgactgtcagataaatataaatgttctttamctttagtgtcttcagattagttgaaagaccatcataagaaaaacatctacatgcttatagctgtgtttctcaaattggcataccacgctatcaaagccccaaggattcatgtgacatatcctttttagtatcttattttgtttaaaggattagaatataaactgtaaagtttggagtcaaatgtgtacctacacattacatacatgtgcaaccaaaatcatcatgtgctttttccatgtgtgcaattttgaatttttaagaataaaagtgcatagaaatgaattgttttatcatgtacccagaatacattagcaatgattgtcactgagctcatttaggaatagtaaatttttttgcttaaaaaatatgtgtttgaatacttagtgcagtatgaatttgtagtaaaataggaattatccgaaagcatactcataagcttaagtaaaagaaagcactggtcatatatttcagagattacaaattcaatgccgaactactgattttctttatgcgataaaagaaactatgacaaagttttattaattcattgttccccttgaatgattaagagtgacttgtaaagctggacactcagtcagtaacttcaatacaaaaaacaaagtaatgtgtttcttgcacatgccagaatactgcaatgaaatgaagtttgagatttagatgaagaaatttgttcatggggagtcagtcaattgcaactcttcctgtatttatatattatgaacttacagtatcagtggtaaaataaagaatgttctcatgcaaattccttcacagaagccttatgagaaatattttcctgtgactattaaagagactgaccattgaaacagttattctatccaactgccaaatatatgaacaatttaaactgtaaattgaaatacgctgtcatagaaatctccatcaggtgttgcctaagaaccttggttcaactgccaatggcatcgtagtcatctctcctcaatgcttagtctgatgtagctcataaagcagcgaaaaatgtttgccatttgtagtcacatatcaacataaatgtgaatttatatttaatttgagaaaaaataatctgcctagatgctgaacctgacacagaagatcagagctctggattcaactcagttttctgagactgatagactcaattgcccattcacacacacagtgctaagaaacctgttagaagcaattgtttctgatgataagcaattaaaatatttagtttgtataaaaagtgcatgtattatgaagtagaatacaatgtatacacattttttaagataggacctaaggcttaagaaattttatgcttattataggtccctttagactatgttccttggcagctagaaatatgttacattttttttacctaagggttatttctatgtaaaaatcaaaggttcattgtcttagtacctttgatccacctgagaattccacaagttattggcttatttttctctgaaagacaaaattgaattattgtttgctttttaaaatccacagtgagagcaaagactaaggaatcagataaacatgagtagaattcttcagttactacttcttagttgatgtcacctttggtatgcatttaacttctcctggtcattttcttatctattgctgaaataattggactgctcttctctaaggatgaaaagattaacatgaagcatttagtgtactacctgccaagggatatatacttcctcagggcagaaatttggtttctcttctttacctcccagcacatagaatagtgcctagcaagggagagttaaaagtgtttatcaagactgcttggagacttcccttaggaaacttaagagctaaaatcctcccagctgctgctttattcctgtaatataaggataatccaaagcataatcctgctaatgctgccattaaacaaaataaatcagggagctattacttggataaattagatcctcacagaggcctgaaaccgactacactcagagccccagtcccaagtccaattacagttaacagcactgttttgtctgacccgttaagtctgacacctgagagataggagatggatttgagtgaaagtctgcccccaaaccatgggctgaccataaagtctcacccttcatcttcagacttcttacatcctaactgttgggcaatgtaagaataaggtatgggcatagttgagatttttgtgagggtgagttcatcaaaacttaacatttatgattcacaaaacttaaaactgatatcttcatgagaagtgagtgcatgctgtcaccctaaagcttttcactccagcaaataaaatgtgttcagtaaatgtttgttggatcgatgttcaatgaatgaatggtagagtctccataaatcatgattaatattatactcctgctattatcctcatgtctttaaagtgctgatgaagaaataatgttttgtactgcactgtgcacctgtaaattcataagtgcaaacaacatctttagaaatggtgaacactgggatgaataatgggatcagagtcatattttaactttcttagcaagttttggcctaacttgatgtataatagtggaaaaatttggaatttattcaaaaaagtttaagaccagaacaagataaatggccttgaatctttatgaaattgaagggaaaattattaaacataattgaagtacatttttaacattgaggacatggcagattagttgtaaagaaggcattgcatgatcactttgatagatgccaacccagaaaagtcatactggattacattcaacatccattcctcctggaaagttttagtacactcagaatagatccaagcttagataagcatcatactttcaaaagttaaaaatgataagcattcttattaatggtggggaaaagatagtatcttctatattgataataaagctctctaattaaactttgttatgaagttattttttcaagtgaataatacaataattaatacgatcccagagaattgacacacacacacacaaacaaatcaaaataacaagaatttagtaaaataagwggttacaaagtaaacatttaagactcagtactttaaaaattaaaaagaaaatatatgatcacctaaatagatacagaaagtgtagttaataaaatgtagaaccattcatttaggaaaaaaatagaaatagaaaagaatgtcattaacgtatagctaaaaacctacagaaaacattacgcttaacagtaaacattgaaagtttttcctttgtaatcaggaacacaccaaaaatggttgctatcaccacttccatttaatattgaagtggaagtttcttagcagtgcagagtgacaaaaacagccactaccattatttgcaggttacatgactgtgtacatacaaatttcaaaagaatatgcatatgttgttagaattaataagagttaaagatctactcatatattatcaaatatgaattaaaagttagtacaagatagcatttatgccatacaaaatatgccaaaccaaagaataactccaacaaaaaatatgcaagaccaaactaaatagaacgatataccacattcgtgaactgaatgtcttaatactacagagatgttaatattctccaaattgatttctaatttacatacagtacattcaaaatccttacctattggttttgtgtgtgggtgaacttgataagctaattctaaaatatatttaggaggccaaagggcctagaatagtgaaragccccctaaagaaaatgaggtaaaataatcattcttctggatttcaagatgtactataaagttccagctatttaggatagtataatactgacacagagatagacaaagagataaatgcaacaaaacgaggaggccagaaacagtcttgtgtatatacagacccttggttttggacaaagttaaacagtaaagaaaaaaatgtctttgcaagttaaaaaattgttacattaaacattgttcatccctatttggagaaaccatatagccatttaaaaatatgatttaatgctatgttctgaattagaaagattgttcagtcattcaacaaatatttttggatcacttactatgtaccagttactattaatttttccctgtaaaatatattattaagttaacaaaaacaaattgcaacattacatacaattgtgattcttctctaactctcatctcacacaaagtcaaagttcttatgcaattgtgccctttaggtctttgattcccttctttctytactgactttgtgtcagccacactgctgctcattaaacactctagtcattcatctgcctctgagcttgtggactagctgttgcttctgcctaaaatgcatttcatcagaattcccatggcctactttcatggcaagttaaggtctttgtcaaatcattcagctcatctttcagtgagatgagcacttttcagtgggcatcctatttaaaactgtaaagctattatctacccccatacttcctctccttatttcctattttcttttataatacatattactttatcaaattctatatttttacttgattaattaccatcagaattttagattatacaaactctaaaagggcgaaaaacttccatctcttctgttcattgctaaatcccatcaccagaatagtacctggcatacaataggaataaggacaatgtgtgtgtctatgtgtttgcatgtctgtatgtttgcatgtctctgtgtttgcacaaatatatagagaaagttcaaaaaagaatgatgtcaaactgcttacagtggttatttctggggaggagcactggcctcctgtggagaaaagaaaaagggaaccttccacattttactttatattttcctgtgttgcttgaattatatatgctaaaatgccaagtttttaaatgtccctaaatctcttacatacaacaggcaaatcaaccaggatagcaaaatccaaaagcttggacaacatttatgacaaaactaggcaacaaggtataccctaagaaccatacaataaaagcaggtggaggcaaaccattaaattacaagatttgtgtcgtatgagcatttggacagaaggaagctaagggaaaccacaggtactctggctgacctgagagcagtactccaaaagagtcaacagttatttgttggaagctgagcaggctaatttgagaaaagcagttgaaattggaagtactttttgcatactctatttcacaggcaagggtgagggttctgtggcaaatataaaaatattaggcaatctatgaattctcaactggggctttcttccaaaaaaaaaggtctctctcacactgaagagaaactgttggacatataatccaaattgcatggacaagagataatattagcaaagggaaaatcaaagtccagaaaaagttggagggaggagatcaaaggagaaatatctcagaatgtattgtatgaaattatatatatatatatatatatatatatatatatatatatatatatatagagagagagagagagagagagagagagagagagagagagagacagttttgctcttgttgcctaggctggaatgcagtggcccagtctcggctcactgcaacctccacctcccagatccaagcaattctcctgcctcagcctcacaagtarctgggattacaggcatctgccaccatgcctggctaattttttgtatttttagtagagatggggtttcactggtctcaaactcctgacctcaggtgatccaccggcctctgcctcccaaagtgctgggattacaggcatgagccaccgcacctggccaaaataatttttttttaatcactatgtgacagcaacagataggaaagccccagaccgtaaaaaatcctctactccttcctgaaagttcaggaatactcattttatataaaaatgaacaagaaaagtgaccatggttgaragtcatatagaattataacaagaaaaagataaataagaagcaaaataatatccttaaaaaaagtgggccagaaagacatgcccaccaaaaagataaactgtatccttatatttaattgagataaaagaaatgaagaaaatgataaatatgtgaaggaacaacatagaccacaattaggaaacctcagaaaggaagtgactgaacccaagaaagaattagaaataaaagaaaacatgattttacaaacaataagctagaagagacatgggaataaacaaacacaacaaaacacacaatgcctcaagagagaaggtaaaaacagagaggacttttaaaataaaaaagaaataaaggcactgaagatccaatgtacatataatagtagtccctgagaaaaagaaaatgaaataatatataaaactatatcaaaactaaatagcatatttagtattttaacaaatactaagactataagaaaaaaatttcaaaagtgaaaggatttgaaattacatattgaaagggcactatttaaaaaaatgacccagaaaaaccaatacagaagcatgttttagaaaaactactgaactttgcagaaagagaaacttcctttaagcatgtaggcaggaagactaactcacttatatggtaaacaatttactatgtcatcagagttttgaacagtaatcctttattccagaagaaaatagaatagctttatggcactcaaaaagaaaatgtgagctaatgatgttatatcaaggcaaactaactttcaagtataaaggccacagaccaactgttgtcagcttacaagaattcagaaacttatttccttgagcacttcttaaagaatttactggaacatgagtttcagataatcaaagtgactgtagagatgtgggcacaaagactggtagagagtttaaaattaagtgaaggttataagagaaactgcaaagtgtgtttagtatacatactatatgatagagttcaattgtactatacggtacagttcaattgtactatacaatcgtaggtcaataaaaaaatggaggtgggtttagacaggcatactggcacatgcctctaaccctagctactcaggaagctgaggagggaagatcctttgagcctaggattcagaggctgtagtgagctactatctcaccactgtattccagcctgggtgacagagtaagaccctatctctgaaaataaaaaaaggaagtaggggctaggaagcacaaattaaaagtagaataagcatactgtttgctttatggtattaactgagtttaaaagggtaatatcacaagtcagatactggagaaaagggaacgaacagtatgaaaaaagaagctattagctgatttcaatattgctctcaacagagaatgaattaaaaataaaaaaagaagaggtaaaggaaaatatagaaataaattattacaccattagaatgcaaactttcttaaatacaaaaaaaaacctttaaaaagcagagacaacaaaaataaaaacaccaaaaacaaaggaaaacaaatcaaagaatgaaaaatatttaatataaaatacgtgtctgttaaatatagtatttaagtatgctaccttttttaaagatagaaaaacataaaaatatacaaaaataaaatttaaattaaaaattaaacaatgaaagttgagccataagtgttaaaactgtttacatataaggaaagggaaagaatagggtagaaagtatgggaatagctactaggcttcttggaatttgcgttacttctggaatgttgtaaatacttttaataattataagctggaattaaattttttaaaaattcccccaaataaacaacaaaatctttttttgttgttgttgtttttgagacggagtctcgctctgtcaccaggctggagtgcagccgcaggatctcggctcattgcaagctccgcctcccgggttcacgccattctcctgcctcaggctcccgagtagctgggactacaggcacccgccaccacgcccggctaatttttttgtatttttagtagaaacagggtttcaccgtgttagccaggctggtctcgatctcctgacctcgtgatccgcccgcctcggccttccaaagtgctgggattacaggcgtgagccaccgcgccgggccacaacaaaatctttttaaaacgtagtcacacaatatagcaactacagttttatatttcatcacaagagtttcttgtatgtttatttgctaacaactccagatgcaaacttgaagtttatacaaataacgtttaattgttgggctccaaataaacatacatggttcttggctttttcccctcatactgacaaacacaaggaaacagatcataaatgaaatgagtagatgcagaggagtgtcactcactatcttttcttttacatttctctaggaaaataaaggaaagtctggagtgtttccctgttaaattgaataacttgatccacacacttgcacaaatgtcagccataagccctgccaaatctacttcacagacttttcctcaggaatcctgtttgctgagtacaactaggtcgattgaaagagcaacaattttagggttcagcaagaaatccagtaatgtaagtttaaagtccgtcatcttgacttacgtatcacttgactttatctcagacttctcttcactatgctacacagcctttcttatagcataattttttactaagcaaatgaaaaataatttacaatttaagcagaagtgtcattaagaggatgttccaaggaaaaatcataacaacaagactatgagtagagaaccatcaaagagaacaattcctgccctgtggtagagtataaatcaagaactaattaaaatgtccacaagaacagcaaaaattaggcaatctgttcctagcacatacaattgtgatactcttagatattatttatatttaattttgcctttacaaaatgcatctcctagcttttatgataatgttttgcagaaaggtacttcctttgtttggtttacataaaatcgggttttagagtgtatcacaggctgatattgccatcttttgatttctatctatttactttctgcagctgtatctgatccaggtgacacacagcaacaacgaaacaagcctgacagaaaaatcatttgagcagttttcaaaacttcacagccaacttcagaagcagtttgcatcactgactctcccagagtaaggcactgtccttttacattgttttgccttcagtacttgtccttgagcaaaaagaaaaattatggttatgggattttctatttgtgagaaacacagtattctgactccaatgccattgaatctatcccagcagagagtctgaattgctctcagagtgaagaatcttttgtctcataaaacagaacaagatttgcaattttctttttacttccagtcattgattttgtagacagacaatttcaaaagctacttcgtttttcttcgattattgggaaaatagtctcatttgcctgtttttaatttaatcctcttagttattttttataaaaatacaattgaaattgaaattgcagaagaaaattggatatgtttactttttcaacaaataactgtaatataaagcctatatatacacataggcttattaatatacatatttaattatatataattatatatgcttattatatatttaatttcaataccagaaaaaatgtaaatgtatttatatcaattcatatgttactaactcattttgtgccattgatttttaacttttaaattattaacttgcattatctaaattgaatttgttattttgttcattttgaagccatcttgaaaatcattattttcatttatgttgtaatggaaaaatgttaaacataagcaaactaaaaatatcattaaaataactgctgttcaaataacccttcaaaaattcatcacttagaagcagtcaaattttgatcatagacttcagtctataaaaaaggtgtatcttgattttaaaaatgtgagctttccagaaatcatgatattgcatttaggttaatcagatgttttatctacagtgagatttttgttaagtaaagtaaatggtccttttatgatgtaattgtttatactttacctggcatacttgatacatgtggatttttactcggctttcaggatttagtcaccttccaaaatataaatataagcaaagttagtgcatagggagatattgcacaatattaaaaattgagtagttcacattcatgaaaaaaaaaactgtactggcatatgtaacagggatttttgaaattcagatgctttgagcatcaggaagtccagaaattaagagcatactcaagagactgagagggaggcaaagtcattctggcaacttttagaaggaacatcaagttttagaattatcacaaaatctgatagaataactgaaaaaaagagacacaggcaaaaaaaagctcaacgtttggctgcaaataccacattcaacatcaatgtttgccatgataccctactaattaataattgagaagaatatgttaatctttgtttaacggctatccttttttggtttcaaaaatgtctctgttctacactgtacctcaccaatacatatcagtataacttgtaaaactttaaaaattctaataatctatctcaattggcctcttttcagttttcagcttttgttaggattctgctttgctcattactgctgcctggaggttcttacattgattttcaaactgtgtaagcaacctgtggaggcaaggaacattttgtcctatgttccctgaacactgtttgcatgctgacactcacaaaggggcccaggcttacagtgatgcacataaatgaaagatgaagattccctatgacttctaaaattactgagagaagccctacgagagttatgtaaatgtcatctggaaggcatgatcagaaagtcagagtcatgaagaatgaaattctaatcagttcataccatctaacagtggacttcaaatcagctatttgtgtttctgggtaacttccaggggtacacgacatgaaaatattccttaaaattaataatcttttttagaaaagtaatatgcttggcgagagttgactttcttctcccaaccatccaaaattttattttggtacactgatcaggctatagaaacttctgaggacaagacaaaagggcaaatcaaaatattggtgttggtattgagaaaatgaattactctaataatgaaatatcaaatcaaatctttgtcagatgttttctaatctttgttgtgaatgaaattgagggaggatatgatgatactgtcagacaaaaggtcattaaaaagtaattttcaataactgctgtatttgacatataactcgaagaagtttcaattaaatgacagtattatagaaccattcctcaactttcatgtactcatttatacataagatgttttagtacatatatctataaaaatattaacaaaatagcagaattgacgtagacttctgttttgttctatcaacaaggaaaactcacacggacatgtgaattaatacttaaaaccagcctaatctctcatttatcaaattcatttctcccaaaaaaactatgcatatatggatatgtagaatatagatctatctctctacctacctatctatctatcttctatgctatatgctcaattgattgtatactggtactaattttcatgattaaatttggataaaaattttaaagacttttaagtcttagggtctgcaagagacttaaaaaaataaaatgttcattgttaaaatatacaagcatagagttttggactttcctgacatttccaacagtaatcagtggggtggcatgaaattatcacatacatctttatctttgctgactgtcctttactatcctccatgttcatttcccctccaagcatggtagccaagccgtggttcctaccaaagaagcagaagtgtggatgaggcagcagtatgattggagtcagaggaggctgctaggtagttcctaaaagggtatacgtagacagcaagatatgttaccaaatgctacccattaccagtcatcccacctaataattggtcttaatgaagtccaacccatcaagatgaatcatcagattgtgcaaaggaaattctgcaaatagtcagactcttggggaaagtgttactattttctagaaggctaagagcagatggacgcatatgtcacttgctaaaatgcttaatttagttagtgtaatggtgtctctagtgaacccagaagaaacaatagaatctgaacctttttaaaaattttgaaccattaacttcagacagtctttttttaagaccccacatatatttaaaagacaaaatgtgtggtctgccataaatatagtaagaagggacatataaatgaatttaatgtgtcaaattaaattaagttagtattaatattaatgaccattaatatggcatgaatgaccacagccatattaataaaattctgaggattaatcacgtagactatgactttttcaaatgttttcattggcccttccatctgatacagctgtaactacatgaacaatcttaagatgaaaaggccagttttcaaactaatgaagataacttttttttctcttaaaacaggtttcctcattggtggcacctaccttttacaaattcagatcacagaagattcagagatctaaatcattacatggaacagatattaaatgtatcacatgaagttacaaacgtatgttataattaatttttctatttttacataaaacatcaactattttatattttattcgtgagtgtggtggtttatgtctgtaatgccagtactttgggaggtcaaggtgggatgattgcttaaagccaggagtttaagtcaatcctgggccacaaaacgagacctcatctctacaaaaaatttttcaaattatccaggcatagtgacacatgcctgtagtcccagctattcaggaggctgaggcagaagaatcatttgagcccaggagttggaagctgcagtgagctatgatagtgccactgcactctagcctgggtgacagacccagattctgtctctaataataataatattttatgataacattctttgggttcattcattcaatgaatatgtatgcctaatttgtataaaatacatgaactgagaattgtggagcagcaaaacaagtatagaaccttgacttcaaataacttcaatgaaataatatgtgataaatggactatcagtgccgtgaagtgctctagagttttagaggagtaagaatcattcccgatgcaataataaagtttcaaggagaagagggcatctgagccgagcctttaacactgagtaggattaaacagaggtggtctggggaagtgtctcaacaatataagaaaatttatgagtgagaaaaaccaaaaagaaatagtattcttaaaatttgaatatgttgctgctgtgacaagttaccacacacctggtggctttaaacagtacatatcaattttctttcagttctggaatttagaagtctgaaaaacaggttttatggaattaaaatgaaaatgttagtgggctggttctggaatcttttcaatttctagaggctgcttgtgttccttggcttgtggctctcttccagcgacacagtggcacactttgacctctgagtgtgtcatcacatcttctttggctcaaattctgaccctcctgcctccctctcagaagggctcttgtgattacactgtgtccatctgggcaatttaggataatctcaccgtctcaggattcctaatgtaattttatctgcaaagtctcttttgccatgtaaggtaacatattcagtttccagggattaggacatgaacatcttttggtagggggtattattctgcctatcacggggatctaagaaaatgtgcaaggacacagctctgatggatctcagcattcttgtgaggtaagagtttggacgccaagcccaagttgttagaaactaaaactaagccttagagagcttgttagtcagggttctctagagaaactgaaccaacaaaattgtgtgtgtgtgtgtgtgtgtgtgtgtgtctgtgtgtgtgtgagacagagagagaaagaaaagaagaaatttgtttaattggctcacatgattgtggaggtgcaaatccaaaatctgtagggtgggctggcaggccggagaccagaggagattatttaccatctgagtcccaagacattctgctcagaggtcagtctttgttctgttcaggtattcaattgattggatgaggcctacccatattatgaagagtaatatgttttactcaaactctgccaatttcaatatgaatctcatccaaaaaaacactttcacagaaacatccacaataatgtttgaccaaatacaggggcactgtgacccagccaagttgacagacaaaattaaccatcacaagagtcgtgaggaactaaaaacattgtgaagtacaatgcccctcaccactttggtagatcttggccctccttactagactagcacattgttcttcttactattttttttcactttgaaattgtaaaatgtaaacacactcagaaacatccacaaaagaaaattgaacagttcaagggtaaattataagaacacccatgtaaccacgcagtagtttcaaaacatgtctgaaaatgctttgccaccctcccatcaagaggaggcagcttgtgtcccaacctcttgatcccaagagggcttctgtcatttgctcatcaaatagaatatggtggaagtgaccctttatgacttccaagataggttagaaaatgccacgcaccttctaacaatttcttttggaatggtcactgcgggagccttcagttgccatctttcaagctgacctaccctgagtctgcccggcagagaaaccaaaaagatcaaatccgaagagagatatctaaggaacagcaactgttscagtccccagctgggactccatccccaaccaccaaatgatcacagtttcatcagagatcccaagcagaacacccagctgagccctctcgaacacctgaactaagagataataatagaatgactggttttaggccaacaatgcagtgatagcccatttccaaggttcatggatttttattgttgtataatattttattatacaaatatattagaatttatctgtagatacttctctacatagacttttggaatgtttccagtttggggctattacaaaccatactgttatgaacattctttcacatgcatgactcagtatccccatgttgttcctatacccaggaatagaatttccagattgtaggatatacttatttcaaccttataatgaccagtttgttctctcatttgcaataaatacattttccaattttctatacttggtctttttaatcttttaaatttgggccattctggttggtgtgcgtctcattgaactcttagcttgcattttcctgttgctattgagcttgaacactttttgatatgttttttggtcattcggatatcttctttcatgaagtgccagttcatgtctctttaccatttttctattgaataatttaatattcatttattgattcatttcttggttgaaattgttggaaggtgtatttcttcatatattctactctgtaccttgtccctttgctctatcatgtcttctgatgaatagaaatgcttaattttaatgaagtgaaatgtatcaatattttcttagtaagaacataccctacctcaatgtcataaatgtgtgaatcttttgtggtgatccatgatcaacggctcttctcctttattcaggtttacaatgtgcctttcatgtaatacttctttatccataaataaaatgcacactttttttttttttgagatggagttttgctcgtcacccacgctggagtgcaatggcctgatctcggctcaccgcaacctctgcctccaaggttcaagcaattctcccgcctcagcctccccagtagctgggattacaggcgcccaccaccacacccagcctatttttgtatttttaatagagacggggttttgccatgttagccaggctggtcttgaactcctgacctcaggtgatccacctgcctcagcctcccaaagtgctgggattacaggcgtgatcccactgtgcccagcctgagatgcacactttattaatacacacactcaagcagcaagtagagaacaagagagagagggcaagggacctgtggaccaaagcctttattgcagtatagggcattatccaagcaggtttcccacagggagttctaattagaggatttagggcaagcaggtgcaggttctatagagttgaatggtgactgaagttagtcattgtagcatatctatgcaatgcaagcagtgtgtgggtatgagtagagtgagtcaagaagtttatatctatctgacccatagagagatggtcaccaggaggtagttgtataagaaagatctggatcgaccacatcaaggagctcgaaggcagagaaccgaaaactgtcaaagatgactaagagtttcttctagtatttgaaagtgcaacttatattcaaaataaatgccacggcaaaggaaaattatagagattcactacagatggctgcttaactttactttcaacctatctaacttacacatttaaaattcgactcccttctagtaaaggtttgattgcaccccacaaatctctctatacaatattgtatatacaaatttgatatacaataccatattttctttcttattctttcaaaatatttataaacttttcattgtgatttctcttgtggccatggatttttaggaaatactttttaattttttcaaatatatttagcctcttttttgttatttctagattaagtatgtcagagaatacacctatagtttcaattttttctaaattttgcaatgttttatgatcctaaatatgggcaatttcggtaaaaattccatgcatgctttagaagaatgcaccctgtagttgtgagatgcagtgttctacacgtgtatattagtgcaaattgtcatcttgactggtttttgtttgtttgtaccagtagaggtttatagaaatattccactatatttatacatctaactacttctcattatcttcctgttaatttttgctttatatattttgtgactgttattaggatcacttacatggagaattgttatatttttcccattatattgaaattttcactaacgttcacgtgtctctcctayctctaacgatgccttttgtctgaaaaatctttcttctgtattactaatatagccaagccagctttattttggctagtgtctgcatgatacaactttttccattgctttactttcatcatttcatatttttccatttcaatgatcactcttataagcaacacacagatgggtttttttctaaatccagtaacataattttcatcttttacttgtactgcttaattatttacacttgctactgtcattgataaatacatgtgtgcatgtgtctatgtgtatatgttatactcaagtctatcacctaatgctttttctcttttcttccattctttttttaaatttagtatttatttttccattttgtcctatgtaacctcagtagttataaactcttctcctgttaggaattaccatagacattaaactatgtgtctttgacttatttaagtctaaaataaattagaatttttatgaatttcccaatgatacaaggtccttagagccctatgcctatttaacccacttgtgtcttatattatttacaaataatgtacatctatatctgtatctataaactgaagtagttattatttttaattcatataatcaactttttttagtcttttattcttcagggatatttttgctgacaatactattttaatagcaattatataaaaatatatatatttatatataaagttatatatcatacggccttattgtaattatataaaatatatataaagcgatatatataaagctatatataatatataataaagctttatgttattaaatataaaatttatataataaagctttatataggtagctatatccatatatctgctgatatatataaatgtaatctgctgatatatataaatataatctgctgatacatatctggttttgtttttttgcacttttactataatctactcagatgtaatgttgttacttttatcatgcttgagcttcagaggttcttgaatttgtgctatgatgtctttcatcagttttggaaagttttcagacattgtgacttcaaatattgcttgtaccatttcttctctttttctaggactgtaataacatatatgttaaaccttttcactatatcctttatgcctcctactccttactcttactcctgtattttttaattattttgtttcttcatgcctcattctgagtagcttcttctgacataacttctgggttattaattctcttttatctgtgtttaatatgttattaaactcattctttgagttcttaatttcaaacattatgtttttcagttttatgatttccatttttatgtgagttccccatttttactgaaaatctcagccttttttattatatctgcaaatagtaagcatagttatttttaaatctttcttaaaacgccactattgagaatcactgcatgtatgattctaatgtgtaatgtttctactgattttcaatcatgtagtcttgttcacttgtgagtt

SEQ ID NO: 94060 - DNA, 156634 bp, Homo sapiens
atgctttctgttactagacatattgtgcttgttctttagtaaatggtcctattttgggagaggatgagttggtactttttttgatactcatgtttttcttaagaccctaatttttgcctcttgcttccccttcatctccaaggctctaagattcacctcccacttcaaattgctcccacctctaaaagagtatgcttttcctagacagatgcctctgttcccctgcatgttcgtataccctcccacacctcctttttttgatcttcaatagtcagtgctctgatccacaaggctcagacctattctcagtatttcccattcaggatatgatcttaactttctagggatgattttttctcggttatcctttctctctgataagaccaatgactatatattatgaaagtcaccccaatcatactaatagtgtgggactgaagtttatgctctggaacctttactagaaatttcactttatcttacagtgagccatcagtcagcacctgtttggagtagtgtatacacaccaggggacatctaattaatgatactatcatccagttattcattttacatcttcttttaaaaagtaacattgttttgaaatatgtcgattaaaattaagttacgttatgtttgtggcatttctttttgtacaggtraagtagahtacgtgtctttaaactattaatacaaaatttactaacatttattgaatgcctaccaagtgctagttattcttctttgcaatggagaaaagaagatatagtaagacataatgccagcccttgaggagcccaatcttaattgtgagaggcagataaatatgtgaataattatagtacagtgggttaagtaattcatgattaataatgtacaagtgctatggtgtattagtcagggttctccagagaaatagaataagatgaagatacatagctacccatatctctatctatataaatgaaaaattggcttacacaattatgaaggctgagaagtcccaagagctgccatctgaaagctggagacccaggaaaggcagttgtgtaattcagtccaagtgtgaaggcctgaggaccgggggagctgatggtgtaaatcccagtctaaggtcagaagaaaatgagatgtcccagctcaagcaatgaggcttgaaaaaagaggtgaatttctccttcctccaccttttgctctattctcagtggattggatgatgcttatccacattagggaggtcagtctactgagtccaccaattcaactactaatctcatttggaaaggccctcatagacacatccagaaataatgtttactccattatggcctacttgagttgacacataacattaactatcgcattgggtatacaagagcaaaagtttctaactctatttgagacagtcaaggaaacatcctcaagtaggtggcaattgaatgggtcttgatgaaagaatataagtttgaaataaggtgaaggtagaagggagagaaaattcttatctaagtcactagcatatggagagggatatagccccaaattatattttacatttatggaaaatcaacttaaaaagttcaagttttggatagactttctgcaaagtgatgacaggtatctaaaatagatcaaaatcacacagaaatgttctctgaaatgtatctatgacagaggtcagcatgcctagaggatatatatatatatatatatacacacacacagacacacacagacacacacacatatataaatgtattcctcatatataaatgtgtgtatatgtatacacaaagtttgtgtgtgtgtctatatatgtgtgtacaaagtttaaggtgtatgtcatgggtgttcacattcttttattatagtacaattttattatactcgaaataaaaatcattttcacccaattttattttcactattgatttttaaataaatgagcttggggaatgctcgagaatatctctattaagtgaggattaaggaagatttgaagcactagaactgaatgtccatctgaatataggggaagaggtaaggagaatgtattgtggctaatcacagataaaagatcaaaataggtgagtagctgaaagaagaaccagagaggggaggtcactgactctcttgagaaacatttacaacaacatacaagaacgacatttacatcagaaaatttagtcttgccaagttgattaatagatatttattctccatctaaggctgattaataaggtagtatctatcttaattattttctattgcataaatctttattatttcttggcattcttgaaattctcaggagtggcatgtatctaagtaatataatctgccactatctctaccttatttatttaccaatataacaacaaagagtaatggattaaaaggagtaatatataaaataagagttaaataaattttgaaaagaaacaaaggcatctaagaaataaaaaaattacaagttcctaagagtacattagactgaaagtaaaataaaatctattgagcaaagaaatagaaatagctgaattatgaaattgaaacaattaaaggggtataaaatattagagaaaaataggcaagattaaagagataaggtaggctaagtagatccattacatacatttggaattcataaagaacaacagcaatacaatgaaaaaatctaatatttaacactatgttcgataactgtcttgaaatgaggatagttttgaatatacataatgaaaggatccactgtgtatctgggaaagtgacctggaacagatacacctgtgacaaaactattagactttgaaggtaaagaaaaaattccaggaatataaaataccacatacaagaaatgtaaatcatgccagtatcagatttgttaatagaaccaataagcaagagagcaatttattttcctaattatttcctttaattaggaaacagggagacaaaggatgactgagaaaatatttttcgaaagaactgttgggaaacacaaccatattttaatatcaaatgaggaagatttcagtacaaaaatgataattaaaataattaattaaaaataaaatgataattaaaaaaataaaaaaaagatttttaattctaaatgcccaattctggtaaggtcatacatttacgaatgtctgtgcatcatgtaatataacaattaccttcataaaatagagactacatgaggtgaaaggagaaataaaatacacacaaaacattgagagactttaatactattctcagtccttaggacaactgggcaaaaagtaagaataaaaggatttaacacagtcagtaaagcagaccttacagatatatatgtagattctcacacaccagaagtaaaaaatattttttcttctcataattcttttaagagacatatgaatctttaaagaaaatactataatcccatattctgggggttatagcatctatagatttaatttatgtgataatggtgtagtggataggagcacaaatgtaagtgtacttttccaaggctcttacattttatgtgaagtgttgcagtatcaactcttaatagactgtgaaatttaagggtgcatagtataatctcaataacaaacactataataatccaaaaaggtatgtctaatgtgtcaataaaggaattaaaataaaaacttaaaagtatttagtttatctagaaggtgatargaaagggaaatagaagaaaaactatagatgggacaaatttaaagagacaggaaaatggtacacctaaataaaaaaatcaatagttaatattctatgtaaatagactaaacactacaaataaaagtcagagattgtcacaccaattctatgatgtctacatgtgatatactttaaattaaagacagattgaaattacagtgatgaaaaaagttattcaaacagtaagcttaagaaacctggaggtgttaggcaacattagaaagagtagactttaaggcaagaaatactaccagatatagagagactgtcatcagatttcaggataatctccccatatcaaaagccttaatttaataatattttcaaagtcccttttttgccatacaaggtaaaaatgccttttgagtgccatatattcagtttctgaggattaggatatggatatcatttggtgggaagcattattcagcctaccgcagcctgtaattaaaagcttctctacacttccaagcacttgggaattgtttaaaaaaaataaaataaataagtaagtaagtaagtaagtaaataaataaataaataaaagcttttctacaaaggcaattactggcctggatgttctcactgatgaacacttcttagcaatgtagaaataaataatattaatttttccataaaataaaaaaagacatcccagtttgtttgatgataaccaaaattaccttgataccaaaatctgacaaagaccttacaagaaaggaaaactctaggccagtatctctcataaccataaacatcctgaataaaaagttagcaaatagaattcggcagtatatacgagggagaatatgttccacaatttccccgtaatctttccaagtcaattttccccaggaacaaagcaatcactgtggggatttctttaaacgtggattatgatgctttttgcctattctagagcattatgtgatgagtcatagtatgcattctttggtgtctggcttctctcattcagtgtcatgtatatgagatttgtccatcttgtgtgtacagtttgttatttttcattgctaaatattattttctcatgaatatatagttggttctcattatttgtggtagttatgatccatagtctctgggaatactaaattaatgaatactgaatcattgctcctagggaattacagggataggttactgcgagcctcttgttacaatatttttgccaactgatcaatacataaccttttcaaaatgtatgtttcctcttaaagacaccttatttaatatatattgttgattcattaacactgagctcatggctcacagcactataccttacaccagaatgaagcatatttaacacatgcattttctctgtaaggcacatcacagccttcttgaatttaggaacactagacagaactttggcattatgcttaggagccatttcaaaaagcaaaatcaccagcaaaaagtacaaaaatgcaaaaaaaaaatgtggcactgaagaccatcaggaggacacttgcttacaggatgagaacaaaaagaaggcagagtgttgtcttattctgtctcggctggaaacgagtgtaacgggtgacttaaaactttcacaggtctgtgcatacttgtacatgtcagccaatagccctagaagaactacaaataatgattttacagttacaaataaatttattgagtaggtgaattcacaaatacagagccatgaataatgaggatcagcctaccattctcttgttgatgggtattcgtgttgtgtcataattggctacaatgaattaaactgctatgaaccttctaatacaagtctttatgaggacatgtgttttcatttctctcagtaaaatacttgggagtggaatttttccattatagggaggtgtatactttcaagaaactgacaaaactcttttcaaatgagttttactgtgttatactcccctctacttctgaaatctttactgggccaatgtggcattaagcaaaacatggaggatatctaaagaaatggaaccatgccctgaatgaggtaagttgtttctgcagtaagggttctcagagaaaggttccatccttcttggatttcctcattcaccaggggccttccttactccagcagtcattacacaaccaacactgctgctccaaggccaagactccctgggcagctgtcagcattgttcccatggggatgaggaccgctgggttgtgtccttacctcacaatgtgattactgactcctcatccattagtgtcatttctgaacctgcactgggttaacactrggaaataaaaacttcccacccacttcttgcaggaggctgtgtgggtaagctcaacataatcttatttcaagagatcataaattgattggtacaactttttggaaggtgatttgataacagctagtaaaatttagtataataatttagcaagatacaagtgtaaaaatgtatgggcttacatgtgaaggtatttattgcagcattatgctggtaaaaaattgaaaacacaaaatatttgttagcagggtactcattaagtaaatgatagttttttcataaggtgaatatttagtaatcatttaaaatatgagggatatataaatgctaatatgggaaggcttaataaacacacacatatacacatataacaaaaagaaagttgcaggccaatattttactaaaatatcaagtttttaaaagaccataaaagatactcatgtatatgcatagacaatttctgtatggatgtactagaaactaatagtagtgtttagctctagcagatggatcagcaagatcaggcattggtgagagaggcatttgcatttttgttttatattccttcacaaaattttacttttcacatgaactgtgctatttttatgataaatgaaagtcatttttaaaatgtaaacataaatattttaaatgttattttgctattttactgagtttgcaagccatctttgcttttatatagtagtttttaatttgcgtttctcaaatgtcggctcttcagcctttacgcctacccttcaagtagctcagggaggaaccctgctagcatatgaagacctggaggagaaatggttgaacagccacagttggaatgtatgcatgctggagagactggaatgggctgtggcattggttgactgtgaggttggtttgtgtggcagatcctctctttgtttctctctaagcagggttcccttaactattggcagagggtatctagtggcaggagttcagagatcatctggagaagatgggatctataaggtcttggagataaggataacatttttggcaaaggctatttgattgccccttagtttttgatgtgtcttggagccatttgtcatgtcctctgcttggggctgcttaggctctgtagggctaaatggagtcagggaggggcatagaggagagcaaggtattggctattcacagcctggagtgcttagtaacatccaagacttaaggcctgggaggagggcaacctgggtgttgagaaacttttgtctgggagatttcagattttcccattataccaactttttcatgttctaaaatgtgattagccttgggaaggaaaggtgaaaagtttctctggctttctcttcactgtgttgctgggattgctttgaacctggaaacattccgttagtgaataaattctccaggggacagattcgggaggtaaagaaggagagaaaaagaaagaaggagacaattgggctttccacagcattattactggaccttttcctaggggcagtgtggggacagttttcactatcactaagagtaaagacagcagcatcttgttgtagctcatggagactgctcagcactagccaggcagaaggtagcttgggctggtccctggggagcagtagaactttccaagcctttccccttctctggaggtgagtgtcttctagaggttcctctctgtgaagtagagagtaggagaccatcatgataggagggctgaggcttggctgccttctagaacaaggatacctagagcctgaagagtagacaggggagttgcatagaggatgagctctgaawcaaatcctccctccagggcagagggcagattcatctcttctctgccccatgatgaagagaggcacagtgctctgccactacctaagtctctgccctctcttttagccctatttcttcttcatatctgcttgccatattgtaggggagctccacaaagagagacttatctttttgactgggcaatactttagtgaagagtgaatggagagtcacatcttacaacaggaaagagaatctggtcaggatgactactctgtttattcattcatttatttattcatcgcataaatatttaaagtgtactcactggctcagtgtcttattctgttcttgraactgaagatgtgacaataaaaaaaaaagaggcgatcttttctcaaggtattttattctaatgtaagattcagatttcaaatgaataaacaaggaaaagtttaatataattttagaataaggtagaggatatattgcctctaaaccatagctgttttcttgtctcctggacccagggtggaggtcacattgggagttgggaattaaaattccagccttttcactccttctggatttctcctcctctgtatcatctgatgacaagaggaataactctcagagccagaggttgctaatttggagctggccatactctgcctgcttgaaggagacacattcacttagttaaaaggtggggtataactttcatcataaaacagaaagaaagaagtgggcaatctactcccgcaagccagcacaccagaagtcagggaaagactcaatactgtgtcacaaaattgctcttactttctgacaatgggcaggttagaccctacctccaagtcagccagttctaccaatacaaagaaatgattataaagataactgaagtgaaaacttgaacaagcagaatgcaaatgtagcctactgtattagtctgttcttacactgctatgaagaaatacccaagacttggtaatttattaagggaagaggtttaatcaactcagggttctgcattgctggggcgggggggggtctcaggaaacttacaatcatggtggaaggcaaaggagaagcaaggaccttcttcacagggtggcaggacagagtgagtgcaagcagagggaatgccagatgcttttaaaaccaygagatgtcataagactcactcactatcatgagaacagcatgggagaaacctgccctcatgatccaattacctgcacctagtcctgcccttgatacatggggattatggggatttcaattcaagatgagatttttgggtggggacaaagccaaacaatatcactcacactcagaggaaacaaaggaaagaagtaaccacatctaagtaggatttgctaaaaatacttttgtataactgttgagatgcagtaggtttttgtatgacacggacataataggtagagaagacagtttagttccattcaggatggaagacatamatgagcaggttgtgatcaaggaagtacttagggtatctggtcagagcagagttggagctgagatgtccagtgaattgagagacaacagtgcgtgctggggtggatgggttttcatgcctgtggtgcagtgttggtgaccagtgcttatcttcttggacatatacatttatctaccattctacctacctatctattcttcataaaacatttaacatcaaccttgtatagagtcatggtgtggagcctagaagccggaggggaatattttctcaatctggaaatgtctttagtccttttgtgatcagaagcagtctcatttttttttttttttggctctttccatttcacaaggagcaaatcctcaggactaaatatgtgggagtcacagtggtgytactgaattttgtctcttaggcttccctggctcccagtaagtatgccatttgttaccttcttcctttgtcagtgattgtaataagaaattatgtaatcatcatagtrtgtgttgagaaatgcctgctgttcctcctatatttattctatggtgacctctctgtcatggaaatccttatcacatatactgctgttcccttgatgctcaggggttsttactttccatgattcaaacaatacctttaatgacatgtgctgtccaactctatatgaacttttttgggggtacacaaaatttgcattactgggagtgatgactgtgaaccattatgtggctctctgtaactctttgaagtaaaacatcattatgagcagacacactgcatctggctggtaattgtattattgattgggttcctttctgaaatctggtcagtctatgccacatttcagctcccttcaaatcaactcaaaatgaattaaaaacttaaatgcaagagctgaaagctgaaactgccttaaaaagagggatatcttgccatatttgacaacaaggatgaacctagaggacatgctaagtgaaataaacagaaggacaatatcccacaaatgtaaggtacctaaaatagtccaactcataagagcagaaaatagaatggtttttccagggraaaatggggagttgctgttcaatgggtataaagttttaataatacaagagagtagcttctagagatctgatgtataacattgtgcctatagttaacaatactgtattgtgcacttaaaaatttgttaagaggggtagatttcatggtaagtcttcttaccrcaataaacaacaacaacaacagtaacaataaaggggcaggaataactccttaaaaatgattaatagggccgggttcagtggctcacgcctgtaatcccagcactttgggaggtcgaggcaggcggatcacttgaggccaagagttcaagaccagcctggccaaccctatctctactaaaaatacaaaaattagccaggcatggtggcgtgcgcctataatcccagctattccagaggctgaggcacgagaatcacttgaacctgggaggcagaggttgcagtgagyggagatcatgccactgcactccagcctaggtgacaaagagagactccatctcagaaaaaaaaaaaaagtgatgaataggtttattaccttaattgtggtgatgggttcatagrtgtacacttatttccaagttcatcaaattgtttactttaaatgtgtgcagttttctctatatcaaccattcctcaataaagctgttaaaaatttaaaaatctaccrtaagcaagacagtatgttttgggcaaaagaatagagaattagatcaatgaagcataacagagagcccagaaatagacccacacaaatatagtcaaygaatctttaataaaagaagaaaggcaatccaatgagaaaggataatcttttcgacaaatgttgctggaatgactggaaatccaaaccaaacagacaaacaaaatttagacacagactttatacctttggcaaaaaattaactctacttggatcataaacctaaatgtgaaatgtaaagctttacaactctaaaacaaaacatagaaaaacctaggtgaccttggcttttgtagtgactttttagctacaataccaaaagcacaatatgtgaaagaaagacttaagagaatgagaagaagagacacagtttggaagaaaatacttgcaaaacacatacacattacagaacatgtatcacaaatatacaaaaacctcaaaactcaacaagaaactacttggttacaaaaatggggaaatatctgaatagatcactaaagaacatgtatagatgacaaataagcatgtgaaaagatgttccacatcatatatcatcagkgaattggaaattaaaacaacaatgaggccaggcatggtggctcatgcccataatcctagcactttgggaagccaaggcaggttgatcacctgaggtcaggagttcgagaccagcctagccaacatggcaaaaccccacctctactaaaaacatacacacacacacacacacacacacacacacacacacacacacacacacacacacacacaccctggcatggtggtgggtgcctgtaatcccagctactaggtagcctgaggcaggagaatcgctagaatcctgggggtggaggtggaggttgcagggagccgagataatgccactgcactacagcctgggtaacagggtgagacgccrtctaaaataaaataaaataaaataaaataaaataaaataaaataaaataaaataaaataaaataaaataagataarataaaaataaaataaaataaaataaaataaaataaaataaaataaaataacaacaagacaccactgcacacctagtaagtggctaaaatccaaaacaccagatgctggtgaggatgtggaccaacaggaactctcagtcattgctggtgggaatgcgacatggtacagccacgttggaagacagtttggtacttccaaaagtttggtactttcttacaaattttagcacacaatccagtaatagttctccttgatatatacccaaatgagttgaaaattaatctccacacaaaaactactacgtgaatatttatagcagctctattcataatcgtcccaagtcagaggcaatcaagatgtccattatggtcrgatttttgtgcctctaaattcatcccttgtagacttaacccacagtaccttagaatgtgaacttatttggaaataaggttgttgcaggtgttattaggtagtatraggtcataatggagtagggtgggctcctaagcatatgactgatattcttatgaaaagaatgccacttgaagacatacacaggaaaaaatgacttgtgaacttaaaatataaaccagaaaagaaatagaaaaaaaatcaacaaagccaaagtaaagtctctgaaaaaattaataaaatggataaatccctagcaagaataataaggaagcaaaagcacacaaagtaacaatatcagaaatgggaacaagggatatcataacagagacagtgaaccttgaaagcatgaaaatgagtatgagcaactttatgccaataaacccaacaatttagatgaactaagcaattctcttgaacacaattcttcaaaatggacacaaactgaagtagaaattctgaatagtcacatagctattaaatacatggaacccgtaattaaaaactttctcacaaataaaactcctggcctaaatgttctcaatgatgaactttgccaaacgatttaggaggaaataatgcaaatgtttttttcccataaaataggaaaagagggcttatttttccattcatttatgatagctcaaacctgacaaggaccttacaagaaaggaaaaccacagaccaatatctctcattaacatagaggcctaaatgaaaagtggaccaaatatattgcagcaatttaaaaagggatagtatagccaagaattatctcataatccttcccagtcaatttccttccaagaattgcctgggatttcttttatggattttgtccattctagagcatgttacattaggaccatacattaagcatattttggtgtcagattattttatgcagtgtaatgtatctgaaatttgtttatgttgtatacatcagtactttgttacttttttcctgaccattattcccttatataaatacgtagttgactctcattactggggttagttatgtcttataaagtcgctgggatcactgaattagcaagtagtgaatcattgctgaatagtatttcctcatatgaatatcaaattatcttkttgatgggcatttattttctgtcattagtagctataataaatatacaatgaacatgataacagaaatatttgtgaggacatgttttcatttgtattaggcaactgcctagaaatagaattggtaggtcacagagtagatgtatatttaagttaataagaaaccaatgttttcccaggggtttttattattttacattccttcctactgctccattttctactctgccactgtatagttaataaccctggaaacatgtctggagaaaccgaaccatgccttgacttagggaatttggatctgtaatttgctttctcagacaaaggttccatcctcctcggacttcctcatttctcagcacccttccttcacagttctccacctgtcataacatgactcagcacagccacctgggcagctgtcagcacagttcccatgactgagaagccacagttggaatgtctgcatgttgcaaacagtggaatgggtgtagcatgaacagtccatgaggttgaagcaggtggcagaccctgtctattactcacttagcagggttcccataactatgggcagaggatttctgataggagtgcagagatcatctggaaacacgtgcttcataatacttggaaatgaagagaaaatttttgataaaattccatttggtggcctctagaattttgctctgtgcctaggagtcactagtggggccatsatggcgarcggggagcttaggctccacagggccacgtggaatcagggagaggcatggagcagttcagggggctaaccattcacagcctgggttgcatggtgataactcagagcctgaaggaaggcaacctggagtgttgagaggttcctcatgagggagatttcaagtttgcccattagacaacttttcggtgttctaaaacttgattaacctcaggagggaagggtgaatgtttttggcagcttttccttgacagcatccctggtgtgtctctgaacttgtacaaattgttcctcagtgaatactcatccttggagacagataagggagtgagagaaggaagcaaagagaaggagagagatagakacagttggactctctcctcagcactcgtatttctggacttttgcataagcttctgtatgaggacagtatccttcactctgaatggagacagaagcagctgttcctgtctcctgagyatagctcagcactaggtgagcgagagatagcctgggctggtccctggggagcagtagaactttccagtccaggctgcttctccggaggtgagtgtcttccagagggggttcctttctgtgaagtagacagtaggagagcatcatgatgggagggccrgggcttggctgcctcctagaacaaggatacctagagcctgaagactggacagtgggagttgcatagaggatgagctctacagcaaagcctgtctccagagcagagggcagaatcatttcttctctgccctatgctggcgagaggcacaatgctctgccactacccaagtccctgctctctcatttctccccattccttccatatatctgcctgccacatagtaggggagctccagggagagagattgcaggttgactttatgttgcttcagagaagaatgaatggagagaagagtcaggctgtatagtccttgttcattcactgattttttttctttaatctattcattgatatattcatttaaaatacagagtgcatactctgttctagtgtcagactctgttcttggcactggtaatacaagagagatgaagtgaacgagaaagagaaatgacctacctatgaagtatttaattaaatattggattttgatgataaattaataaacaagtaatagtataatgtgactggagatattggtgaggataattagtatgaaaaatgtagcctaacacaggtttgagaggaaggtgtgcctgtattgttttagagaagctgagtgggaaggggcccataaagaggaaacatttgagcaaatacctgaatgtggtaagggaaggagtccagacattctaaggagttcagagtgatccattttggtgtcttctgacactttttgttgccccaggactctggagaaaacaggtggtcacggaggagcagatctgctctgtggaccttccaagctgctctaacagactgagaccatggcaagttggatgcaggcacagacttcccattgggaggtcttgtctctctgctgaaactggggtgttgagaactgggagatgcagaggataagttacctccacaccacagctgttttcttgtctcctggccctagggtggaggctgtgttgggagttgagaattaaagttccagcctcttcactcctggacttctcctcctcctctttgtcatctcataacaagaggaatcaaaatctcagagctagaaattgttaactgggagctgatcagactctgtctgcgtgggggagacacagtcacttagataagaggtggggatggctttcattataaaaataaaagaggaagaagtgggtaatccactcaagggagctggtatcccagaggtcagggaaaaactcaatactttgtcttaaaatggctcttaccttgtgacaatgtcctggatagacctcacttcccgacatcaccccccaaaatggtaaatataactgaagtgaaaacttttaaatgaacataatgcaaatggagcctgtgtttagaggatacagaagaaaaaagtaaccatgcctgtgtgagattggctaggaatactttatttatttattttttgagacggagtctcactctgttgcccaggctggagtgcagtggtgcgatctcagctcaagcaattctcctgcctcagcctcctgagtagctgggattacaggcgcgcaccaacatgcccagctaatttttgtatttttagtagagacgaggtttcaccatgttggtcaagctggtctcaaactcctgacctggtgatccgcctgccttggcctcacaaagtattgggattacaagcgtgagccaccgcacccagccaggaatactttcttataattgtttagatgcattaggatttgcaagatggagacataataggcagagaaggcaatttagttccacccaagatgatagaggtgctggtgtaagtgaacacattgtgatcatggaagcagacagggtggccggtgagagcagagttggaggcagatgtccagtgtattgagaaagagtgcatactagggtgggtgggttttcatgtttaccatttggtattcataactggatttcatcttcttgaacatatacatttatcttcaaaagatatatattcttcatgaagtatttgacatcaacatcgtgtagaaaatagtagagtcaggttatggagttgaggagcaggagaggaatgttttttcaacctgaaatgtccttaatctttttaggataagcggttgttctctctcttttgctctctagatttcacaaggaacaagggcttagaactaaatgttgatgaattactctagtgccactgaattttatctccttggcttccctggctctgaagaactacatcatatcctttttgctatattcttctttttctacttggtgacattaatgggaaacacagtcatcatcatgattgtctgtgtggataaacgtctgcagtcccccatgtatttcttcctcggccacctctctgccctggagatcctggtcacaaccataatcgtccccgtgatgctttggggattgctgctccctgggatgcagacaatatatttgtctgcctgtgttgtccagctcttcttgtaccttgctgtggggacaacagagttcgcattacttggagcaatggctgtrgaccgttatgtggctgtctgtaaccctctgaggtacaacatcattatgaacagacacacctgcaactttgtggttcttgtgtcatgggtgtttgggtttctttttcaaatctggccggtctatgtcatgtttcagcttacttactgcaaatcaaatgtggtgaacaattttttttgtgaccgagggcaattgctcaaactatcctgcaataatactcttttcacggagtttatcctcttcttaatggctgtttttgttctctttggttctttgatccctacaattgtctccaacgcctacatcatctccaccattctcaagatcccgtcatcctctggccggaggaaatccttctccacttgtgcctcccacttcacctgtgttgtgattggctacggcagctgcttgtttctctacgtgaaacccaagcaaacgcaggcagctgattacaattgggtagtttccctgatggtttcagtagtaactcctttcctcaatcctttcatcttcaccctccggaatgataaagtcatagaggcccttcgggatggggtgaaacgctgctgtcaactattcaggaattagccttgctctgaggacttttacatggtaaagcacttagtatggattctagaataatctgaaaagaacttgctcatctttgaactgcatcataattattgccattatcaaatgatttgcatgcaacaaaatacttttaagttacagctacggtttttagtatgcttagttgttacttgaaactcagtctattatttttaagacatgtcttgctatctagctatctatctatcatctgcctttcttaagatatgatgatttcacaattaaactttgaaaaattaaatgtcagagatagactatctatatagtctagaaaatagactagtggttgcttagggctgaggggaatgcagacatagggtagtgatagctatggggtacaggctttctttttgaaatgatggttgtaaatatctatgaatataccaaaaatcattgaactatacattttcaatgagtcaactttatggaatgtgatttatatttcaataaagcttttgaaaatagtatattagatcatgaagaagtattgtgaagaaaagtgaaacaggaatgaaagggaatatctcttgcaggagtgttgaaatttcaaataaggttttcagggaaggattgagagaggtaaggtggtgatacattcggaaacttgttaaagaacattccaggcatagtgagtaataagtgagagatcctagggaaggcataacaaagatgctgaaatggagtgtgcagaggagaaagcaatggcagtcagagtggtaactggaatgcagaccatgtagagccttgtgagcctttttttttttccaggtatgcaaaaagataatattattttactatttttttcytttttttttttccttttttttttttttttttttattatactctaagttttagggtacatgtgcacattgtgcaggttagttacatatgtatacatgtgccatgctggtgcgctgcacccactaatgtgtcatctagcattaggtatatctcccaatgctatccctccccccttccccgaccccaccacagtccccagagtgtgatattccccttcctgtgtccatgtgatctcattgttcaattcccacctatgagtgagaatatgcggtgtttggttttttgttcttgcgatagtttactgagaatgatggtttccaatttcatccatgtccctacaaaggatatgaactcatcattttttatggctgcatagtattccatggtgtatatgtgccacattttcttaatccagtctatcattgttggacatttgggttggttccaagtctttgctattgtgaatagtgccgcaataaacatacgtgtgcatgtgtctttatagcagcatgatttatactcatttgggtatatacccagtaatgggatggctgggtcaaatggtatttctagttctagatccctgaggaattgccacactgacttccacaatggttgaactagtttacagtcccaccaacagtgtaaaagtgttcctatttctccacatcctctccagcacctgttgtttcctgactttttaatgattgccattctaactggtgtgagatgatatctcatagtggttttgatttgcatttctctgatggccagtgatgatgagcatttcttcatgtgttttttggctgcataaatgtcttcttttgagaagtgtctgttcatgtccttcgcccactttttgatggggttgtttgtttttttcttgtaaatttgtttgagttcattgtagattctggatattagccctttgtcagatgagtaggttgtgaaaattttctcccatgttgtaggttgcctgttcactctgatggtagtttcttttgctgtgcagaagctctttagtttaattagatcccatttgtcaattttgtcttttgttgccattgcttttggtgttttggacatgaagtccttgcccacgcctatgtcctgaatggtaatgcctaggttttcttctagggtttttatggttttaggtttaacgtttaaatctttaatccatcttgaattgatttttgtataaggtgtaaggaagggatccagtttcagctttctacatatggctagccagttttcccagcaccatttattaaatagggaatcctttccccattgcttgtttttctcaggtttgtcaaagatcagatagttgtagatatgcggcattatttctgagggctctgttctgttccattgatctatatctctgttttggtaccagtaccatgctgttttggttactgtagccttgtagtatagtttgaagtcaggtaatgtgatgcctccagctttgttcttttggcttaggattgacttggcaatgcgggctcttttttggttccatatgaactttaaagtagttttttccaattctgtgaagaaagtcattggtagcttgatggggatggcattgaatctgtaaattaccttgggcagtatggccattttcacgatattgattcttcctacccatgagcatggaatgttcttccatttgtttgtctcctcttttatttccttgagcagtggtttgtagtcctccttgaagaggtccttcacatcccttgtaagttggattcctaggtattttattctctttgaagcaattgtgaatgggagttcacccatgatttggctctctgtttgtctgttgttggtgtataagaatgcttgtgatttttgtacattgattttgtatcctgagactttgctgaagttgcttatcagcttaaggagattttgggctgagacgatggggttttctagataaacaatcatgtcgtctgcaaacagggacaatttgacttcctcttttcctaattgaataccctttatttccttctcctgcctgattgccctggccagaacttccaacactatgttgaataggagcggtgagagagggcatccctgtcttgtgccagttttcaaagggaatgcttccagtttttgcccattcagtatgatatgagctgtgggtttgtcatagatagctcttattattttgaaatacgtcccatcaatacctaatttattgagagtttttagcatgaagggttgttgaattttgtcaaaggctttttctgcatctattgagataatcatgtggtttttgtctttggctctgtttatatgctggattacatttattgatttgcatatattgaaccagccttgcatcccagggatgaagcccacttgatcatggtggataagctttttgatgtgctgctggattcggtttgccagtattttattgaggatttttgcatcaatgttcatcaaggatattggtctaaaattctcttttttggttgtgtctctgcccggctttggtatcagaatgatgctggcctcataaaatgagttagggaggattccgtctttttctattgattggaatagtttcagaaggaatggtaccagttcctccttgtacctctggtagaattcggctgtgaatccatctggtcctggactctttttggttggtaaactattgattattgccacaatttcagagcctgttattggtcgattcagagattcaacttcttcctggtttagtcttgggagagtgtatgtgtcgaggaatgtatccatttcttctagattttctagtttatttgcgtagaggtgtttgtagtattctctgatggtagtttgtatttctgtgggatcggtggtgatatcccctttatcattttttattgtgtctatttgattcttctctctttttttctttattagtcttgctagcggtctatcaattttgttgatcctttcaaaaaaccagctcctggattcattgattttttgaagggttttttgtgtctctatttccttcagttctgctctgattttagttatttcttgccttctgctagcttttgaatgtgtttgctcttgcttttctagttcttttaattgtgatgttagggtgtcaattttggatctttcctgctttctcttgtgggaatttagtgctataaatttccctctacacactgctttgaatgcgtcccagagattctggtatgtggtgtctttgttctcgttggtttcaaagaacatctttatttctgccttcatttcgttatgtacccagtagtcattcaggagcaggttgttcagtttccatgtagttgagcggctttgagtgagattcttaatcctgagttctagtttgattgcactgtggtctgagagatagtttgttataatttctgttcttttacatttgctgaggagagctttacttccaactatgtggtcaattttggaataggtgtggtgtggtgctgaaaaaaatgtatattctgttgatttggggtggagagttctgtagatgtctattaggtctgcttggtgcagagctgagttcaattcctgggtatccttgttgactttctgtctcgttgatctgtctaatgttgacagtggggtgttaaagtctcccattattaatgtgtgggagtctaagtctctttgtaggtcattgaggacttgctttatgaatctgggtgctcctgtattgggtgcataaatatttaggatagttagctcctcttgttgaattgatccctttaccattatgtaatggccttctttgtctcttttgatctttgttggtttaaagtctgttttatcagagactaggattgcaacccctgcctttttttgttttccattggcttggtagatcttcctccatccttttattttgagcctatgtgtgtctctgcacgtgagatgggtttcctgaatacagcacactgatgggtcttgactctttatccaacttgccagtctgtgtcttttaattgcagaatttagtccatttatatttaaagttaatattgttatgtgtgaatttgatcctgtcattatgatgttagctggtgattttgctcattagttgatgcagtttcttcctagtctcgatggtctttacattttggcatgattttgcagcggctggtaccggttgttcctttccatgtttagcgcttccttcaggagctcttttagggcaggcctggtggtgacaaaatctctcaacatttgcttgtctataaagtattttatttctccttcacttatgaaggttagtttggctggatatgaaattctgggttgaaaattcttttctttaagaatgttgaatattggcccccactctcttctggcttgtagggtttctgccgagagatccgctgttattctgatgggctttcctttgagggtaacccgacctttctctctggctgcccttaacattttttccttcatttcaactttggtgaatctgacaattatgtgtcttggagttgctcttctcgaggagtatctttgtggcgttctctgtatttcctgaatctgaacgttggcctgccttgctagattggggaagttctcctggataatatcctgcagagtgttttccaacttggttccattctccacatcactttcaggtacaccaatcagacgtagatttggtcttttcacatagtcccataattcttggaggctttgctcatttctttttattcttttttctctaaacttcccttctcgcttcatttcattcatttcatcttccattgctgataccctttcttccagttgatcgcatcggctcctgaggcttctgcattcttcacgtagttctcgagccttggttttcagctccatcagctcctttaagcacttctctgtattggttattctagttatacattcttctaaatttttttcaaagttttcaacttctttgcctttggtttgaatgtcctcccgtagctcagagtaatttgatcgtctgaagccttcttctctcagctcgtcaaaatcattctccatccagctttgttctgttgctggtgaggaactgcgttcctttggaggaggagaggcgctctgcgttttagagtttccagtttttctgttctgttttttccccatctttgtggttttatctacttttggtctttgatgatggtgatgtacagatgggttttcggtgtagatgtcctttctggttgttagttttccttctaacagacaggaccctcagctgcaggtctgttggaataccctgccgtgtgaggtgtcagtgtgcccctgctggggggtgcctcccagttaggctgctcgggggtcaggggtcagggacccacttgaggaggcagtctgcccgttctcagatctccagctgcgtgctgggagaaccactgctctcttcaaagctgtcagacagggacacttaagtctgcagaggttactgctgtctttttgtttgtctgtgccctgcccccagaggtggagcctacagaggcaggcaggcctccttgagctgtggtgggctccaccccagttcgagcttcccggctgctttgtttacctaagcaagcctgggcaatggtgggcgcccctcccccagcctcgttgccgccttgcagtttgatctcagactgctgtgctagcaatcagcgagattccgtgggcgtaggaccctccgagccaggtgtgggatatagtctcgtggtgcgccgtttcttaagccggtctgaaaagcgcaatattcgggtgggagtgacccgattttccaggtgcgtccgtcacccctttctttgactcggaaagggaactccctgaccccttgcgcttcccaggtgaggcaatgcctcgccctgcttcggctcgcgcacggtgcgcacacacactggcctgcgcccactgtctggcactccctagtgagatgaacccggtacctcagatggaaatgcagaaatcaccgtcttctgcgtcgctcacgctgggagctgtagaccggagctgttcctattcgggcatcttggctcctccctctcttttttttaaaattatactttaagtcctagggtacatgtgcacaatgtgcaggtttgttacatatgtatacatgtgccatgttggtgtgctgcacccactaacttatcatttatattaggtatttctcctaatgctgtccctcccctctcctcacaccccacgacaggccctggtgtgtgatgttccctgcctggtgtccaagtgctctcattattcaattcccacctatgagtgagaayatgtggtgtttggttttctgtctttgcgatagcttgctcagaatgatggtttccagcttcatccatgtccctacaaaggacatgaactctcatccttttttgtggctgcatagtattccatggtgtatatgtgccacattttcttaatccagtctatcactgatggacatttgggttggttccaagtctttgctattgtgaatagtgccacaataaacatacgtgtgcatgtgtctttatagtagcgtgatttataatcctttgggtatatacccagtaatgggatcactgggtcaaatggtatttctagttctagatccttgaggaatcgccacactgagccttttaaggatgtttgctctttccagaagcacattggaaaaccatcacagggrgctgaagaagagtgacagaatctgtttaatgttttaacaagatcatcctggttgctggatgaacaatacacgaaaggacaataaagggagaaggatgaaggccagatggagattgcatcagttagattttgctatacgagagataaccagaaaactccagtggtatacagtgataagtttttatttttgtgcttagagtttcagctgatctagggtggctctgctgatctcaggtggatttgttcgtgagtctaagggttggatgggggttggctgacctaggctgggcccacatttgaggtcatgaaaagtgtgtctttgatctcatgtggcttggccacaacatttttaaggcacccttctctgacttgcacaaatttttattcccatattataaatgagtaaacaagttctgaaaaatgaagtggcttgcctacattaagcttctagcaaattgaaaagctacttcttggatgaagatctcaacttcaaatcctccacaaaatgcttctcctaatgtctaatgccattgagatacatagaggaatgttatttaatatgtgcaataattttttgagataggtattactaccccattttatcagtaaggaaattaagaccaagaaagggtaagaaaactgtactgattcacacagcatattagaaacaaagtgaaaactcaaattcagtggcttgctaaattttcattgcctttttttttttwaaagcatgccactgctatctaataargatcacatttatctaagcttgcaaggatccaggaactctyccaatgatgaacttaaaccaaatcccacatattccctatctactccccactcccaccccaggccattgggctccttttagaacctgcacagaagtgtctcctaatcttgggggaaattaaactgtctactaaagaaatcactagatgtctacatttcctgatcttaaaagtttgcagttattctgtcatgaaataggaagtgaagcaactacagttctctcttctcaaaacagaaggattaggatttcctttctgttgtctgagttctggggcttgcctttggctagagttctgttgatatttttctccacctagactcagcctttcttcccttctcaacggtagcacttatcctttcccaacacagtcagagaacttgtatctccaccggctactaatataattccaatttccaccccatctcaaacacaaattacttctggtaattcccttcaagcaagttctgacacctgatgtgttatctcatgttaaaaaattgtaagtggccatgctaaggagccaaaaatgatgaaacctaggaatgcagaagcagaacttagtgttgtaataaaaaatatgatttacaacaatcttgtttggtatacatacaatgacatgtacagtcattactgtgctacattgttattagacacaaaatggtatgtgctgtactttggtgactattatttccatcagttttatacatggtcttccttatggtttaattattcttactcaaaacacaaaaggcatctcttttctctytcttatgcaccaagcagagtatatagctgatgtcttgtgagtgtggagaacagccagggtactccaagacttgtcttcctctttcttgcctttcttccagtgtggccaaatgaactccctgtttcctgtctcaggtgatttccatttgaccctgatgttccctttttactatgtgcttattccgtgcccccagccaatgtttccctgagcagcccttctcttttcctactcttcgtcggctggaccagttctagatcaatgtgatgccaatcagtgccaggctccttggggtcagtaggctgtgcctggtatcaggctttctccagaactgaagggatgaatatattgtgattattgttgcctaagagactatccaaaattttaaaaatactcaacaaatacagccaggtactcaaaaccttcagagcaaaggaagcctgcttacctaaattttggttacaaaggagttacatatgttataatggagtttcagaaatatgacaagggaatttttagcttaagtgtctcttcagggctttgctgaagaacagaaatctagtgtgtttggctcccttggctgcctggttttcttcaaaggggtctccaagaaggttcctatcctgcccagacctctctccattcccataaacaatgctgctgtccgtgctgctccaagctcagcactaggagccctccccaaggccaagccttagttcagactgaggagagcctctgctaccctcgcttgtggagttaggaggggcatgtgaatggggttcccttgagaacagagacgaagtcacaggacctatgtttatccctcttccaccatggtaatccctaaataatgtttataatttctcactctacagttactccctagtagtatggtatactctgaggctaaaataaaacaaaccctgtcaacagactaggcctttttgatcagtcagaaatgctcagtactacagaagcggacctcatctctatactaactgagttgtttccgtaaaactgatcctgtctcctggagatggctagcatccagtcccccagtgcagaagaaagaagctcagtttcccaaatgggcaaggaccgctactggtagacagataggtaagtaaaagaatcattggccagacgacctgtatggattcaaaaagagttgcaagtatagttcttgtcacagggaactgtgatcatttggcattcttctcacagatcctgcggtagctgatgtcacatgatgcagcatcaaatgtctttgttaggccaatggtcgcacagttgaaattctgattctgattggtaacactaaatgagaaaacaaaacaaaacaaaacaaacaaacaaaaaacaaagcatggtgatggcccatcattttagcccagcctcttcctgattccagagtgagagtcttgcaggagttttgcctggaagggcagcagactaccgggcccacacacgtctccatctgcgtagcctcctttttagctcagatccttttcctaatccagctccgcaaatgcagctctaaacccaccctttcctgtcagctctccygtgagcgtgtatggattcacagtcttggactaactaactcactctggcatttggttagaagcatctcatgggctgtctcttcttccaaaagtactgtttaggatagcatgcatgttcacagcaagaggacaggaaggaaaaggagagaggttgtgcatccctttccagaccatagtggcctcagaaaaacttggtggaggtatttgttggctctcccacctctttttctgtcattcagtctgtttcagtctgactgaaaaggctctggtttcggagaaatgtcatgtgtttgggactagctttatgatatttaacacatttctaagctttacttgtcctcagttcaactgtctgtgaaatggggagcgataaaagcttttcatgtagcatcatggggaatatttcaggaaacaacatatgcaaagtgtttagcatagtgctggcattagcagacactgaataaatgtcaatttcctcctctctgtagggaagcccagttacaggctgggggactgacttgacctctgtctgaatcactatttttgtataaacactgggaagattattgrtgttctcaccaatcctcatctccatggaacaattcacaggagacagctcttgggggtcagaagttcatagctttaagacatagacaagttgcttataataacctttcttagataaagaaggcatatctggggaaacttgtatgtactttgtaataaaatgtgatctgtgggttaaaagacgaagcccttttgatcagtcagaaacactagtgttatagaaatagatctcatctctataccaactgggttgcctccataaaactgaccctgtctcctagagatggctagcatccagtctagactcatatctagtctgtttgaagtcaagagactgagcttttttgatcagtcagaaatgctcagtgctatggaaactagcatctatagagagctacaagatacatcaaatgaatgctatgtaggtggatttgtttggatcttgatatgaataaaataatttgctatatgaatactcttctttctccttatgaaagtttgatctctttcataagaaaacatttattaaaatgtgtctcagggaatagatgggttggaagaaaggagaagagcagaacagagtcaagtgtcagcgtttgagctattccagggtgaacccagcaatctcaggtttggtcttttgaagcaaaccaagatccccaggaaactgtggbatgttcacgtacttgccattgaacacagagttgttgatccaaygccaccttttctcttcacgrtggtaaattaagccaataaaatacttctcagcatcagttatgtcctgaagaaacttctrgaaataaaaaaaaaatttyaccagtgagtcttttaatgatgcctctcttgagccaatgtgcccatgattatatctgatcctgggaataaggaaggccggtagagaactctgggaccrgctatagctgggactcacaactaaccctaaagaagtcattgtcaagattcagagggaatttggaaarcctgaggtcttgttaaaacacagactgctgggctcctggttaagtaggtctagtgaagggaaccaataatttacttttctacaaaatgcccaggtgatactgatgtttctgtccagggaccacactgtgagaatgaaggggaaggggtactgtacaatctaaaacagggtcatttaaaaaaatatgtcatgcttctatccataggattgtttttgttgccagaaattttgtatgctaagtgaggctgaaccaagtgctaataaaatgtgtttctatatattgagtacttaggaaaggaaaacggtgagatttaaaagtgtattgcttttaaaagtgtaatccaagaagaaataagcaagtgcttgtcaaatatttgctgatttgacactagtcctagacatctttgttctgtaattaattggtgagttacaaatcatttcagccagaagtgtttcctatacttgtcacatacgtcccataatcagtgggtatccaagtcttattctttccatccccatggctatttccttagtttctcrcttttcaatgttctccttttctgaaatatcttatttcattactttttaattaattactgaatgttctcattcaccaaacatctctcgagtgtctattatatgccatgcattgtgttaggctgaggatgtggaaacaaatatatttctcctcaaagaaattatgatcaagagggttggcaaactacaaccagtgggccaaatccagacttcatcctgttttggtaaatgttttattggaatgcacccatgcccattgtttacacattatctacggctgctttcaagttacaacagcagagaccaatgccctgaaaagcttaaaatgtatgttatctgacccttttttaaaaaagttttctgacccatggtctaaaaccagaatccttaatgctgaactctcatgctggaagccatggatggtttcccaggaaaactatgaaaccactggaatgttatgaaaaatattttgcttatgtaatgtttctgggaaggggtacatagattttatcaccattttaaaaaagtcagtggtcccatcatgtttgaagaaccacaggtttaatgagggaagacaaccaacttaactagcataaggaggtatctcaggtgtagtactaggaaattatatactggatctggaagaggcagaaaggaggaagcgatcattctacatagatctgaagtttttctagaatgatagatgaggtgayacctgagatgaattttaggagatagctaagtttgtcagacaaactgtcagggagagtatggacttcctggaagagagcatggattataggcaggtggggaagcagcctggagctcttgaggaactacgagatgctcagcgtagttagtgcagaggtggcagggaggtggtttgagagacaaggctggagcaaaggcagaggcggcactgtgcaaggcctgatatgatgtaaggtacatggatgtgctttggtcaagraataggctgaggtggacatccaggccaaagtgactcagcgagtttagggagcaggcatatatatatatatatatatatatatatatatacttgttatataacctatttgtgtaagctcatgcttagctcagagccactattgtttgaaaaaggtataattgacctgccgatgctgtgcacgcaacttggcttggctcaacgtgccttgacatggtacaggctctggtgcccagagaaagagagagagaaccaaggctgtccatcttgcagactgatagagggcagccaggacatggctcagcatgcattcatgcccagarggagaaagagttaagctgctgaccctgaacgctaagggagagccggctgcgcagctgtgaatgggagcggctggagcaagcagctgagacagacagacagagagtatgagaaagctgctgatgaaagagctgctgaataaaactacatttcacctgtgtatggccccctgagtgttctttcagctatctgccacccacccactcccctaggaccttagcatgggctggaacctgaccctgagtgtgacatttggcatggtcatgaacctgacatatgccatgctaggagaactggcgtttaacccactttaatttggaaaatggtacagtttagagccttagaggtattataatgtcagttctgaggaggatagctagaaagagtgcaaaactggaggcaaggagatggattagaagaattctgaagaaatccaggtgagaactgaactatttgttgttggcatagagagaaaaggacttgtttaacaaataattgaggaagaaaagagaaggtaaagtcccagaaaactcttaagccttcaatcttgggtgacatgagtactcaccagtatttggaatgcaacaggaagagtgggggggtcaaatataattgactcagttttgaacatagtgagtttgtgggcctcttgaaacatcgaagtggaatttggtatacttgttgggaggagaaggatgagctggagatacagacttgcgagtcagcagcaaaccattgccatgatgacctttgtctttttctttaacgttttttttttttttttttttttttttttttgagacagagccttgctctgttgcccaggctggagtgtagtggcacagtcatggctcactgcagcctccgcctcctggattcaagcaattcttgtgcctcagccacttaagtagctgggatttcaggcatgcaccacctcacctggctaattgttagtagagacatggtttcaccatgttggccaggttagtagtgatgacctttttcatcaccaaggaaaaggtacatggatgtgttttggtcaagcaaattgggatccacaaaacttaatgggtgtggcagacttgtcacacttgcttcttcccgttgccttccctcctttcctcttttcattcccctgtcttgctcctgtttttctatcttaagacattttcccttgctacctgggtacttagccctagagggtttgtagcatccagatcccttggtcatctattaccaagattcagaaaggagawgttcttacaaattcttctaaatcacaggaggactttctagaggaggaataaagggatagaagcgagagaagcaagagtatagtgtatgtagcacagattagagtatgggttttggagtcagagagttctgaattcaattccacgttctgttatttgaccttgggcaaattacttttctgtgccctagttgccatttataaaatgtggataataatacatcctcattattattatcatgatcatcaactgcaaattcagtatgacctgattcttactttttcacactactaattttgtcagttcacgtcttccttgtttactatgcagactgggatggtacattgacatcacatctataaggtattctttttgttgttaaacaacttttatacacatcatctcatttggtcatttgcttcactttaaatgtcttggcccatccccaggatatcagctaattacagtgcgctatagaaaagaccacaaggtgcgaatttctgtggttaaatgaaactggaaaatcatgctgcttcactgctactaagaagaatctcctaacctccagtccagaacaaatagcttcagtttttcagccagccacctctccattcctcactccatcccatccccactccccacaagtttctaccccatcccacccactgaggctgtgtggagtgtgtggctttactgtaccattccagtgttctcaccagtttctctggcgtgttgacaattgccaatgtggatccttttcctttgcaaaagtccctgctttcattccaagatgattcagaagtggataagaaaaaacatcttgcttgataaaattcccagtctttggggcagactgaagaggtscaagaaaggagagtacgagtttactggtttgggttatgaatcctgcaactaagtcatgaaacagtgatacatatttttgctttgttttaacaattatattggtaaaaattattctccatccaggaagaaattccacccagtctagtctggttccttgacaataatataaggagaataaggagaagagcgcagtggctgaataaagtttccattagtcatccccctacaggaacaccaaatttgacaactatctacacacaaaaaagcacatatacatacatgagaacaaaaaatcagatgaacactcagtacctggatagctgaaagaggcactgcagagggtaggaaagatagtcttgaattgctgacaccacccccaccctatccctgctgcagtgacagcatggcatggtaaagtstatgtgcatgggagagggagtgtgcagggattgtgagactttacattggactcagtgctgccctgtcacagtggagggcaaaacggaccaaactcagctgatacccacccatggaggaagcatttagatgagcgctagccggaggggaataacccatcccagtggttgaaacctgagttctggcaagcctcrccactgtgagctgaattgctttggggccctaaataaacttgaarggtagtctaggccacaaggactgcaactcctaggcaagtccttgtgctgagctgggctttgagccagtggaattagggggcacctactgagataccagccagggtggccaagggaatgcttgtgccattgctctcccaaccccaagmagcacaacttgcagctccaaaagagaccctttctttctgcttgaggagaggagagggaagagtaaagagtactttgtcttgcatcttggatgcaagccacagtagaatagggcactagtcagagtcgtgaggtccccattccaaaccctagttcctgaaagacatttgtagagacacctagacataccctgggccaaaagtgaatcctctgtcttgaagataagtacacagtcctgacaggatcccttacctgctgatgaaagaattcttgggccctgaataacaagcagcaatacctaggtagtatgttatgggccttgggtgagactgagatgtcttgggcttcagatgaaacccagcacattcttctgcttgagaaaagaagagagaaaagtaaagggggctttgtcttgcaccttatgtaacagactggccacagagaagtaaaggtcagctcttggggtccaagattctaggccttgactcttggatagcatttctggacctgccctgagccagataggagcccacagacataargggtaggttctaggcctggcagcattcgtgacaagctgaccaaacagcccctgtgccttaaacaaaaatcagtggtagtctggcagtgaccctgtgggcctgtgatggtagtggtcatagggtgaagctcctctgcctgcagaaaggggagggaagagtggaaagaactatgtctcatgaatcgagtttcagctcagccacaggaggacagaacaccaggtagatttataaggtttttgactccagtccctggttctaagatagcatctccagacctatttagggcctggtggaactcactgccctgaaggggaggtcacaggcttggctggcttcaccatatgctgattatagagccccaggacattgacaaaacataagcagtagccatgtagtggttacagtgggccttgagtgagactcagtgctatgctggcttcaggtctgacccaatgcagtcccagtggtggtggtcacagggatgcttgtgtcaccccactcccaggtctgggaaggtcagcatagagaaagagattctgtttgggagaaagtaaggaaaaagaataagagtctctgtctggtaatccagataaatctttcagatcttatccaagaccaaccaggtgggtacctctacgagtctgcaagacccacagcattactgggcttgggatgtcccccatgcagatagagcttaggtcacagcrcccaagtccttttgaatacctggaaagccttcccaagaaggatgggtataaacccagaccatgaagactacaataaatacctaaatcttctatgcccagacactgatgaacatccacaagtatcaagaccattcaggaaaacatgacctcaccagttgaggtaaataaggcaccagggaccaatcctggagaaacagaaatatgtgaccttttagacagagaatccaaaatacctgtgttgaggaaactcaaagaaattcaagataacacagaaaagaaattcagaattctatcagataaactaagagatagaaataattaagaaggatcaagcagaaattctggagttaaaaaatgaaattcacatactgaggaatgcatcagagtatattaataacagaatcagaggggtcacagaagtcagaggatacaaaagaaaaaagaataagaaacaatgaagcacacttgtaaggtctaaaaaatagcytcaaaagggcaaatgtaagagttactggccttaaagaggaagtagagaaatagataggggtagaaagtttattccaagggataataacagagaacttcccaaacctagggaaagatatcaatatccaagtayaagaaggttatagaacaccaagtagatttaagccaaagaagactaccttaaggcacttaataatcaaacccccaaagttcaaggataatgaaaggatcctaaaagcagcaagagaaaagaagcaaataatatacagtggagctccaatatgtctggtagcagacccacagcgttactgggcttgggatgttccccaagtggaaatcttataggccaggagagagtggcatggcatatttaagttgctgaagcaaaaaaccctttaccttagaatagcgtatctgatgaaaatatccttcaaacatgaaggggaaataaagactttcccagacaaataaaagctgagggatttaatcaacagcacatcagtcctataagaaktgctaaaaacagctctttaatctgaaagtaaaggacattaatgagcaataagaaatcatctgaatatacaaaattcactgattatagtaggtacatggaaaaacacaatatcacaacagtgcaactgtggtatgtaaagtactcttatcttaagtagaaagactaaaagatgaaccaataaaaatgataactacaacaacttttcaagacatagacagtaaaaacaaagttataaatagaaacaataaaaagttaaaaagtgggagacaaagttaaaatgtagagtttttattagttttctttttttgcttacttgtttgttaatgcaagcagagttaagttgttatcagcttacaataatgggctataagatagtatttgcaagcctcatagtaaccttgaatmaaaaaatatacagtagatatatgaaaaacaaaaagcaggaaattaaatcataccaccagagaaaatcaccttcactaaaaggaagacaggaaggaaagaaagaaggaagagaagatcaaaaaacaaccagaaaacaaataacaaaatggcagaagtaagtgcttacttattaataataatattgaatgtaaatggattaaactttccaatcaaagtacatagagtggctgaatggatgaaaaaacaagacctaaygatctatttcccacaagaaacacactccacctataaagacacatgcagactaaaaatgaagggataaaaagagayattccatcccaatggaaaccgaaaaggagcaacagtagctatayttatttcagacaaaatagatcttgagacaaaaactgtaagaagacacaaagraggtcactgtataatgataaaggggtcaattcagcaagagaatataacaatataaatatatatgcatccaatactggcacacccagatatgtaaggaaaatattattagagctaaagaaatagatagtctccaatataataatagctggagagtttaacactctgctttcagcattggaccgatctttcagttggaaaatcaacaaagtaacattggacttaatctatactatagaccaaatgaacataatagatatttatagaacattctattcatcagctacagaatacacattcttttcttcagcatatggatcattctcaaggatagacyatattttaggtaacaaaacaagccttaaaacattcaaaaaattgaaataatattaaacatcttctctgaccacaatggaattaaatagaagtcagtaacaagaggaagtttggaaactgcacaaatacrtggaaattaaacaatatgctcctggatgaccaatcagtcaataaagaaattaagaaaggaattgaaaaacttcttttaacaaatgataatgaaaacacaacatactgaaacctgtaggatattaagacggaagtttatacctataagtgcctgcatcaaaaaaaamcaagaaaaaataaaaacttcaaaccaaaaacctgatgacaaatcttaaagaactaaaaaagcaagcacaaattaaacccaaaattagtagaacaaaagaaataataaagatcaaagcagaaataaattgaaatgaagaaaacaatacaaaacatcaatgcaacaaaagtcggctttttgaaaagataaacaaaatcaataaacctttagccagaccaaaaaaaaaaagagaaagagatgacccaaattaataaaatcagagatgaaataggagacattacaatggatggcacagaaattcaaagaatcattagtgactgctatgagcaactatatgccaataaattggaaaatctagaagaaatgggcaaattcctagrcacatacaacctaccaagattaaaccacaaagaaatccaaaacctgaacagatcaataacaagtaatgagatgaaaaccatgataaaaactctcccaataaagaaaagcccaggatccaatgatttcactgctgaattctgccaagtatttaaagaagaactaataccaatcctactcaaactgttctgaaaaatagagaaagagggaatacttcgaaatttattctatgaagcctacattaccctgataccaaaaccagactaagacacatcaaaaaatgaaactacacgcaaatataccaatcaatattgatgcaaaacacctcaacaaaatactagcaagctgaattcaacaacatattaaaaagaycattcatcacgaccaagtgagatttatcccaggaatgcaaggatggttcaacatatgcaacttaatcaatgtaatacattatatcaacagaatgaagaacaaaaaccatacgatcatttcaattgatgctgataaattatttgataaaagtcaacatcscttcatgattaaaactctcaaaaaacagggtattgaaggaacatccctcaacaaaataaaagccatatatgacagacctacagccagcatatattgaatggggaaaaaatgaaagcctttcctgtaagatctggaatatggcaaggccgcactcgctttcatcactgtttttcaacatagtgctgggaggcttagctagagcagtcagacaagagaaagaaataaagggcatccaaattggaaaggatgaagtcaatttatccttgttttcagatgatatgaccttatatttgtaaaaacctaaagattccaccaaaaarctattagaactgataaacaaattcagtaaagctccaggatacaaaatcaacagacaaaaattagtagcatttctatatgccaacagtgaacactctgaaaagaaattaagagactaatcccatttataatagctacaaataaaataaaatatctaggaattaatttagccaaagaagtgaaagatctatacaatgaaaactataaaacatggacaaaagaaattgacaaggacaccaaaaaatagaaaaatattccatgtttgtggattggaagaatcaatattgttaaaatgtccactctactcaaagcaatctacagatttaatgcaatctttgtcaataacccaatgacattattcacagaaacagaaaaaattatcgtaaaatgtacatggaaccacagaagacccagactgtccaaagctatcytaagcaaaaaaataacaaaactggaggaatcacattacctgatttcaaattatactacagagctttagttaccaaaatgccatggtactgtcataacaacagacatatagaccagaacagaagagagaacccataaataattccctacgtctatagtgaactcattgttgacaatggtaccacaaacatgcattgaggaagggacagtgtcttcaataaatggttctgggacactggatattcatatgcataagaatgaaaggagacccttatctcttgacatatacaaaaaccaaatcaaaatggattaaagactgaaatctaaaatctcaagctatgaaaatacaagaaaacttyggggaaactctgtaggacattgaagtgagcaaagatttcttgagtaatatcccacaagcacaggcaaccaaaggaaaaatagataaatgagatcatatcaacttaaaaaagcttctgcccagcaaaggaaacaatcaacaaagtgaagagacaatccacagaatggaaaaaaatgtttgaaaaccacccatttgacaaggtattaataaccagaatatataaggagcccaaacaactgtataggaaaaaaaatctaataatctagttwaaaatgggcaaaagatctgaatagacatttctccaaagaagttgtacaaatggcaaatagaaatataaaaaggtgctcaacaccattcctcattatagaatttcaaatcaaaactaccgtgagatatcatctcaacccagttaaaatggcttttatccaaaaggcaggcaataccaatgctggaaaggatttggagaaaagagaaccctcatacattgttggtgggaatgtaaactagtacagctatggagaagagtttggaagttcctcaaaaaactgtaaatagaactaccacatggcccagcaattacactcttaagtataggcccaaaagaaaggaaatcagtatattgaagagacatctgcactcccgtttttatcgcaacactattcacaatagccaagatttggaaacaacctaagtgtccatcaacagatgaatggataaagaagtgtggtacatatacacaatggagtactgttcaaccataaaaaaatcagatcctgtcatttgcaacaacatgaatggaactggaggtcattatgttacatgaaataagccaggcagagaaagacaaacttcacatgttttcacttacttgcaggagctaaaatttgaaacaattgaactcatggagatagagcatagaaggatggttaccaggggctggaaagggtagttggtggggaggtatgggggagaagtggggcttgttaatgggtactaaaaaatagaaagaataaataagatctagtatttgctggcacaacagggtgactatagtcaaacataatttaattgcagatttaaacataactaacagtataattggattgtttgtaatacaaaagataaatgcttgaggtgatggatactccatttaccctgatataattattacatattgcatgcctttatcaatatatatcatgtaactcatgaatatatatacctactatgtactgagaaaattaaaaaataaaagccaaaataatatgtacaaagagaatgaactggaaggtcgttatggtccctttgagcaaaaaaattccataagaataaagacaatgggagaaatctctaagaattcagtgcatgagaacctaggggatggggagtaggttgtaatcatgcactttacctgttccatagctccttgtggtaatgaagccgttgggacttggggaactgctcccaaaaatctgtgagactaaagtgaaaagtaaacctaaaggttatggtatgatgaatacaacacagaaacagaaacatcagagtatgggctgtgtgactctgaatcatggagatgacaagaagctcttggccactctgagctagaacatttcaaataatttctttctttgagccttccatctaactactatcattatttgtcaacttgacacccaaatcctatttcatgtctcctttttttgatgtagccataggcatcaaatcctgagaaaaagaacagaagaaaggaaaagtaatggaggaatttagtatcagagagaaactctcacactcctatcgtatataaacctttgacagtgttttctccaaaggactgtttggagtacttctcgcccaggctccacacagcatctttgctgttctttctacttctggtgtcccagattcagtatgaaaattcataatcctgggcaactctgggactcttttctcatcagcactgtattagctctaaggattgaagctaattggaacaaaatttcagggccaaggggatattatcagacaaggaagcaggtgaactttagggagattttctataagcagggaagggtccattcatttctagaaatccatataggggcctcatttccctgggaacactggctgtctgagcaggcagccgcagtggcttcagaggctggtcaaacatctaattgggctgccagttatttgtccattgtggttgaagaccactttactctgacatcaaattagttacttacatttatcttaatgaaacaaattggcattcactttttatttcagtaccccgtttatagactctaagatgtaatagcctggttttcatcagaaactactttgagattataacttaaggactcaatacatattttatgagtattttctccatacagctcactgtattgggttgcctctgttgatactaagataaatgagaaacggtctttctcctaacgatgtcagtagtaataggtgtcttaagaggaagtgagaggatgttgttgggaaaggcttcagaaggaagctggtttaatcgggagaggagaaccatgccccactcatctctctatctcccatagctactggctattaagcactttcacattctattacaatgattagatataaatcatccccatatccaggagaaaaactaaggatcagaaatttccctcagtctgctcttggttttctcatatgtaaaagaaagggaattaattagaagatctttatggaccctttgtacaaaagaatttcttgggaaaggaggctgtgtggaaggtctctaggaattcagcatagaagtagcaggaggatggggagaagatttaccaccatgcagattacctgttccatagctcctggtggtggtgaaaccatcgttacttttgttaaaaatctgtgggactgaaaagaaaatcagctgttggctcagccccaaatgtgmctgcatgatgaatatgacaaacaagtatcagcacaggggctgctagggtactgtgactattagtgggaaatactgaactctctgactcagtgaagatgcataaatgtggttttgtgaatacgttcccttattcatatttctgtcctgctgtctgacatgataggaattgcaccttcagattgcatcatgaggaagacacctcttagctaactactgcctcccactcacgtttccttcctcatttattttccctactggcttctggggctagagaagattctagtttctgattgcagtaaaatcctttcataggaggcttctttaactaggcatttggatgaattaatttatatgtatacaaagagaaatttctttctcagttaaatcctgttacattatacttcagctcttaccatggccttgtcattgggttgaactggagctgtattytagattttgccaacaataacaagcgctgccaagtacttcagctgagatcacccaaataatactctactagcaaaagctttgcgtggcgttctaaccatcagaaactggtaagttctatatctccaaggtagaccaaggagcctgggccactgtgtgtgctggggagtgagaaaggcattgccaattgacctcaggttgggtcagttagtctcaggtggaaagacttggatatgtaacctttacacacaaccatgcattctgagagaagagtcaatgagcaagacaacatgaagtctggggcaagaggttgctcaaatactcacaataaagtagaaataaggtcattccaacaactttaagcactaccacaataagcccagagatgatcatgtgccagttcatgatgaaggagctgcaggggcctgtgaagattagagcacagcagcatcagaattcgggtacaaggctgcttttcactaggacatatcccagcctctcgctcagagtacccaaagcaaggcaggcttggaagacaggcatgacattgacaggtaccaggaggtgacccagcgtgggccgcgaacacagaaagaatcatgtattgattggagccttggaacttggcatactgcctctccttcactcattccctactccaggcctcagccttgccctatttgtggcctcctaaattctgtctaataattaaaccctctcctgtattttgagaacccttatcyttgraatgacccttgttcccaaggaccttagtctgtagccttcaccatactgacttaagttgtcagaagcctcagtcttccaaataccaggggtaggtgacagacaggacaggcatccctgaaggtcttggcattggtcaacagtccatgcagccaagacagacagacagactcacctctttctccctggaaggctaggcttgcttgcagatgggggtcttcctggtggcctaatgcttggtgtggcaggcaggggccccgtctcctgagaatatgctccttttgcccaagcaacgttcttccttcttcacagtctctgccttggtagcatccccaagaaatacctcttcctgttcagtggggttcttggcaaagggagcaggcggggcaaagaagggaagagactctctagccctagtggtggcaagagcagacttcctgccaggagagttctaatgcagaggaacattttaaggacaatttggaaaacaaaatacctcaacacagattcacccttcctctgtgtctaaatctccttgaaatacagtgggaagagaaatgtagtaaaattttaacaaacattgaatctggrtaaaaggtagctggaagttatttgtactttccttacaacatttctgcaagtctgaaattatgtcaagttaaaaatgttaagaaatccagttgaagacactaatatgaatgagcaggttcttgctgttccatttgctccatttgctggagctctgctcattcccctttatcatggactcctctctggcaccacctgctcaccttccagacctcatggtggctcttcagtgtttcttgaacatggcactctgctggatacagcagtgggctggggtgaacaatactcaagtcctattgtcaaggagtttttaatttcgtgttaaatttgaaaatttgcttttattttccctactatgaaaactactgtgctcatgacaaaaaaatggctggaaaatattaacaaggaaaattgagaaaacaaaaccatttataaccttgtacatttagttatagtcattgctagcacctcagggtgtatcctttcgagatgagtaggtagatagaaagatagatggatagatagatagatagacagaaaaacactggttcacaaagaacaatgggaacatattgtacatattgttttgcaatctatctgctcaagattaagctaacactatgttatatatatcttttcatgtcaaaatatagattttgataatgtattatttaatatgtgcatagcattcaggtgtaaaactatatgatttatttattcaggtgtaaaagtatattatttctttaacaattgcataaccacaaatcttctagtaaagtgtggtggacaagaacaaagttttaaaaatcagtcctgcttttgattcctggagctgaccttcactagctgaacatccttgattaagttactgagtctctttaccttccatttctttatctataaataggagtaattatagtaaataccacataggattgttccgagaaatgagcaagataatgcttgtaatttcaatagcgtgataytcagcatcttaaacataaatccttagtattctaactattttctaaaactcttctaactatcttcccaatgcacagtgaacagctaagtgcatgcatccttttacatgtccttaataactttcttgggctaagttatcagaaatataaatgctggatcaaaagacatgtacatttggagggctttggaacattaaagttgtgttttgttctacttggatagtcctctgtgtttttgaaaaatctcattgaacctgatttatctggtcacaaggtaattacttctagaccctagattgctgtccagaaggatccayatatttattggacaataaatatggccaattatgccagctatgttaggaagtatgggaatcaggagacttggttattattatttagaaagtttttaacagagactttctgaataacttaataaaatctatacacttggatagcaagtgaatcttttataacaaagaggtataagagatctttcaaatatcatcaaaagagaagaaaatgtcatagtataaaaggatgtccacagaagttttgggggtagtactctgactgatgcattgtgggacacctctgctctgctagaaaatctaaagaaaaatctaaattcttgttcaaggcttcgcactgcaatgcttctcttaaactcgacattatcagaaaccttgctaaaaaaaagccaatatctgcaatggcaaatgcaactgaggggttactagagatgaagtcaatagcattgggggcccatgcccattgctttgggaaaataataagaaaggggcttctagtcacacaattgtaaggaaatacccacacattgttttttggggaaaaaaccatgagatcactaatttttaatcagttattgcagactgggataacaaattctctgcttagtgagtcaaattagatttttttcactaggctgagtcctaaaaataaagaaaaaagttttattgaagagtaaaactgaaatttaactttggcaatcttcatgtgacatcaagttggaaatgctaagtctttagggactgtattatgcaatattataattgcctgagcagacaacggagtcacctctacattgtaattaccaaagagttaagaagaccatgcccacaattgtaggtaatttggaagggacacagtgtatggctaaacaagacttctgggttatcgtgtgtgttttgtgggggaaaatggcagtgtgcagtgtgtgtgtgtgtgtgtgtgtgtgtgtgtgtgtgtgtattgacatggatagtcattaaaagctttcctatcctaacgagcaaaaaaagaggatctataacgttttcttaatccagctcccaggatcagctgttgatgctgataggctatggcaccacacagctggactgctattttcagaatgtttaccctatggtgacagtggcagcaacaataccaacttggtggactgatcagactttgtcaaagtaggaactgtaactgccacatttggattaggtgtccatggggtatcaagaaaggaaaccaaaagaagaaaggacatcctatgattcattaattggagtttcaagtggtatcaacatgaatatttacagacataactttattttgtatctcaagatgataaagactagtactgtctcttgagccttattagtagcatatatatatatttatatacatatgtacatacgtaagtatatgtatatttccttaaatgtatattgctggaattctctcaggcagtttagtgagaaaacctgaaaatttgaaagagacctgatgtttccccttatcttcacagtcagaatttttgaatggattgccagttttcacagccccctcttccccacctcctgctttctcctcagctcacgccagtctgagttccactatgaccacatcactaagtgctgactcccactcgatgaattaaatgggctcctttcagtctttacgccacttgtggcagaggcccacattggcctacattgtataatctttttcttggtctccataattttacattctcctgactttcttcccttctccctggcctctccatttattatttttctcctctgcctattcctcagattttgtagttatccctcctctcttcatctcacggttttaatcaccatgttcatgaagttgattcctaaatctttatcagagagcttcagatctatatatctctgactagctacatttttcattgaggtgcttcgcagacaccccagagtcaccatttcccaaaatgtattaattgctataccatggccaaaacaagttcattctcttatgttccatgtctctgaatgtaaagaccatttgtttagttgcctgaatcatgaagtgtgggtattatccttggcttctctaattccatcccatctatgatggttaatattgagtgtcaacttgattggattgaaggatgcaaactatcgttcctgggtgtgtctgtaagggtgttgccaaaggagattaacatttgagtcagtggactgtgagaggcagacccaccctcaatttgggtgggcaccatctaatcagctgccagcacggctaggataaaagcaggcagaggaacatggaagggctggctgagtcttctggacttcatctttctcctgtgctggaggcttcctgccctcaaacatcggactccaagtccttcagcttttggactcttggacttaaaccagtggtttgccagggtccctcagaccttcaaccacagatgaaggctgcactgtcagcttccctacttttgaggttttgggactctgactggcttccttcttcctcagcttgcagacagcctactgtgggacttcaccttgtgatagtatgagtcaatacttcttaatgaactccccttcatatatacatctatcctattagttctgtccctctagagaaccctaatacaccatctaataaaactccaagtcatggtgactttacctcctcaaagtctatcaaatctatcctctttactattttctctctgctaccccttggccctctccttgactccttcagtaacctccaaagaaacatttctgccataatcttgcctttaatagttctccactctttagtcagaatgatctaaatgcaaacttgattatataatttccatgattaaacattttagtaactttctattgcatttaggacaaggctttggccccttaacatggtctttaagtctttgcatgttcattcttttagcaaacgttgctgagtgctgccatgaaccagatactcttctgggcaatgaggaccatgtgctggttcttctgtacctctcatgacaccacatctaccctaccattgtctgctagtgacattaaacttctagttttttatgcactctctcctggatccaactcttcaaatatttatctgacacatgtttattgagcacataatatgtgcaaagcactaacggcaccacttgctgtcttccaaacacacacgtatactcctatatcctctttgactaaataattctgactcatctttcaggtctgagctcacccttcaggtctcatcttttcagaaaaactttcttgccgattctctttccctggcccagttgagtttagtgactgttatctttggtgtcgcataatatcatgtattttttccttgggagcacttattgcatgataatgcacttgtttgcttcccctattagactctataaagtcaggaaggcagggctgagtctgtcttcttcactgttgaagctccagcatatccacagtgctcagaacactgcaccatggagttaggcttttagacttgtaatctaaatctttatttgtgagagcatggtaaggcctaaaaaatatttctaaccaatcaaaaatttgtgcaatagtctttatactagttgacaaatttgctgtcatagtgttcaagaatgatcatttaagtgccagaccatctccaaaagtattcattcctgattaaatctttctatctcaaataaccaccttggagaatgcattgtgattatagtactttaaataataacaaaccatcccctagtttgtaaatagagttaacttatattcacccttaccatattaataaaactatatattttaaaggaaattgctgctcagataatataacacaccagaactcatacaaaccacagaaaaaggctgctttgggaataattagaaggaacatctagtagaactctattatatatacctgaacctgatgtgtcagagctttgaggtgaggggaggctgtggggcctggagacaggctgatttagagcttgcaggaaggctgtatggttctggagcctaccagcagcagagatgcacttggcttctatttcgtacagtgactccttaaatgaattgggaatcccattgcagagaacagtcattccagttggatgatgatgacattaccccattaatataaggctgtcccagcaccaagccaaagaaacactatgctcagtggtcatacttcctgctcagttggtctctagcctggcaacacagaactagagtaaatataaaacttcccccattttccttgatcaaatcctctaagatgtggtatttgcaatatctatcagaacccatcactaggcttcaggactttgaatatgggcaaaactcatttctcacttcaaagtttaacatgtggaaaaaacaatgggtatgcgagaatacagtaactcaaaataagatgagcattatgaagaaagagatccaatgtccatctgtgaaacaaaatcattacaagacataggaaatgttagaaaacacctcatatgtttttattaagattttagaaaacactaactctatgaaagagatatgacttaatataatgaaatggaccaacaaacactttgagatttaattgctggcttaaaaaaacaatgaagtgaagggctctgaatagctgattggatacaatagaaagaaaataagtaaatcagaagatattgaaatattaatttggaattcagagaaaaagtgaaaaagaaatacaagtagaggagaaagaaagatattaatattagatccaactgatccttatacattctgtggcttgcaaaagagaaagcatgaaaaaataacatataagaacagcaataatcaaagtaattgtgaaagaaaatataagtgaaaaagctgaaaattaggcaaaatcaatgaaaggaaatctaaacctagacatcatttcggatttctttaaaaaagaaatattctggaagcctctaagtagaaaaatctgtgaaggaaacaaaatattaagtgtctttaaaatatttgttgaaatattctaaatcctagatgatcatagataaacatctagggttttgatagtgaaatgttgtgactcaggaaccaataataaaagtaaagtacaatccagattcaacttaaaattgctcagggatgtggctgtcagaattcgtgatttatagcccaacttccactccctctaatgcagagtgctcagagccctgtggtctaatgggatgcctggtaagaggaaagggtctatcctctctagtctagacgtttgactttcttcagaagaattccacagaaaaatgacaccagaayacaataatctatcactatattctgggttactcaacctaaatagcattgtttttatttattcatttagttttttgagacagtctcactctgtcatccaggctggagtgcagtggcgcaatcttggctcactgcaacctctgcgtcctgggttcaagtgattctctgcctcagccatctgagtagctgggattayaggcatgcactaccacatccagctaatttttgtatttttagtagaggcagggttttaccatgttggccaggctggtctcaaactcctgaccttgggtgatccgcctgccttggccttccaaagtgctgggattacaggcgtgagccaccacacccagccaaaataccatcttttaaagagtttatttcacagttctctgtctcagttccttatcccttgtaagcaagtgcttgaatgcagaaacacactctcacaccccattggagagaggttgcaaactggtggcccatagattgcactcagtatgcagctgtatttagtttgacctgttcagtgttttaaaaaatttggatcaacatattgaaatttagatttcaaccgatatcctagtacttaggagatctcacactatggagaacacatgtgcataggccagtggtcagctggagcaggagtcaggcctcatcaagtctgtctccagtctcaccacctctgtggaaggaatccagttgccagccattgtcatgcatgcaaagctgtttttttcttagaggagagtgagaatggtttacagtcatacatctattgaaagagggaaaacaaaagatagaatgaggagaccacaggcttccagaacaatgaaaaacatgtatatacacatataaacataaaagatacacacacacacacacacacacacacacacacacacacacacgcagagaaagtttaagagtttttagtatttggggactctggaggctacatggcatacctggaggtcagggagcaagggcagggaaagagagaaagggacctgtgggccgaactttattggggtcaaggaatcatctaaacagattttccacatggagttttaattggtgcgtttaaagcaagcaggcataagttccaggggcacacagaggtggtcactgcagcatgtctgcacactccatgttgggtgtgggggtcaggatggcaagtagagcaggctgcagccagctgacctataatgagctggtcaccaggaggcagttgtataaggcagctatctgaattggccacacaggagaacctggaagtgtagaattggaaaccatatcaagggtgactgagccctgagggaacgtatttctttgtgaaaattagactatatatatatatatatgtatgtcatatgcatatatacacacacatatatacacacatattatacacacatgtatgtatatatatatatatatatatatatatatttttttttttttttttttttttttgagacgaagtctctctctgtcacccagactggagtgcagtggcgcaatctctgctcactgcaagctctgccttctgggttcatgccgttctcctccctcagcctcccgagtagctgagaccacaggcacccaccaccatgcccagctaatttttttgtatttttagtagagacggggtttcaccatgttaaccaggatggtctcgatctcctgacctcgtgatccgcctgccttggcctcccgaaatgtgactttgccaaaaaatacaacaaaagataccattatgaaacaaagaacaactgttatctagaaaacctacatgattaaaacttaattaactaaaagaaagaactagaatttacacaggatgaatttctgaatgcaaataagtgatgctattgtgaaaaagtggccataaatattttacagatgatgagtttctcaaagagtgaaactacggagtgaatgagaaatactgttgctgagaatagtgaccatacctggggacttgttggagaaaaatgaaatattctgtggtgttttatattgcagctgatgaaaacaaagatataaataattctaagcagctagctatatttacttgtggtactgatgaaaaattttatgcaaccaatgaattcattaaaaggatacccatgatacataaaatatcaaggaatgacatttttgtgtgccaagaaaagccttgatattctactgtagagaagtcaaattagtaagcatgactatagagaaattctgtgatgatacatctaaaagacagacttattcatgaatttaaaaccactgtggcaacattttgcaatggcaaggaagtgaagtctgtttattgcatcgttcatcaggaaacacattgtactaatgtatttatagatgtggtagttaacgtagtataccagacatgcttgaatgtctaggaccataaaatattcagtgctttgtatgatgaattggatgcataacacgataatctgttgtattccacatgtgtactaaaaagcataaatgaacaaaagaaatataggtacacagggatttaaaagagtactacatttcactgactttgtacattatttttaataccatctctgaatttgggatgtatcttagtcaatgataagaaggcactgtgcagtattttaataggcagattttaatttttctttcttagtgatatataaaattatggtgcatcttacgattgacgttatctgagattctgtgaaatatgattataagagaatgccacaaatttaagccattataatttaaaacttataaaaaatagataaatagctatataaatagaacttaacaaaattgacttgagaaatagaagttttgaagtgccctarctaaaagatggccctatgattttggaataattgtaaagcataagctgccaraaaatatcatttgaaagcagcaatttctgtgataagattaaatttgaaatcacttttgaggatcaatagtctttgaattcaggaaatattttgaattacacagatacacaattataaaggtaagacttacaaattttgtgattgtggctggggctggtcgtagtagtctgttctcacgctgctgataaaaacatacctggctgggcacagtggctcatgcctgtaatcccagcactttgggaggccaaggcaggtggatcacctgaggtcaggagttcaagaccagcctgaccaacatggtgaaacccagtctctactaaaaatacaaaaattagctggacatggtggcgggcatctgtaatcccagctactcaggaggctgaggcaggggaatcgctagaacccgggaggcagaggtggcagtgagcagagatcgcgccatagtactccagcctgggtgacagagcaaggcaaaactccctcaaaamaacaacaacaacaaaaaaccccacatacccaagattgggtaatttataaaggaaagatgtttaatggaatcagtttcacagttccacatggctagggaagcctcacaatcatggcggaaggcaaaggagaagcaaaagcatggcttacatggtgacaggcaaaagagattgtgtaggggaactcatttataaaaccatcagatctcatgagacttactcactaccggaatagtatgggggaaactgctctgtgattcaattatctccacctggccccgcccttgagacgtggggattattacaattcaaggtgagatttgggtggggacacagccaaaccataaatggtgaattggtataaatggtgaattgactattatacaggtgcatcgagcaaaaggttcattattttgtttggtsatggatagtgcatataattctgccaaagcaagatctctttatctgtttttatagtgttgtggcctataaaccaatggtttataaactcaaatacctataagggcctgaaaattagtataatgtgtgaaatcaaccagggataagaaaaacatctctcagaactataaaactttattttactgaatgaagcacataacacaaacatgcataatattggagaaaatatattaaattcattgaaaaaacacaaactggggtggacatggccactcatccctgtaatcccacactttgggaggctgaagcagatggatcacttaagatcaggagtttgagaccagcctggcctcatggaatgacatgtaaatgtcctatcagagaaatatttaaagtgcttacatagtgtgtaatgttaacaaaaacagccaaatctatgatgtaatctttaaaaaatattttacagggccagacgcggtggctcacgcctgtaatcccaacactttgggaggccgaggtgggcagatcatgaggtcaggagcttgagaccagcctggccagcatggtgaaacctcgtttctcctaaaaatacaaaaattagccagacatggtggcaggcgcctgtaatcccagctactcaggaggctgaggcaggaaatcgcttgtagtgagctgagatcgcaccactgcactccaacctgggcgaaagagcaaaactccatctcaaaaaattaaaaaaaaawatatatatataacgtaatatttcaggtatacataaaagtataaatgataatayaataataataaacacctatctcctaacctaagagctgaaccattacaaaataatggaatctctttttatactactcttccatcagcagtaaccacgttcctgaatgaggtgtttataattctcacacatttcttcctgttttctcacacacttatggaaccctgtataatatgtggtggtgttttgtagatatttaagaactgcaataatggtatcctagtatataaattgccctaaaactttccttgttcattcaacaatatgtttgtgaggtcatccatgttcagttgcactgctgtgtagcacaccattgcatgaatatatcacaatgtgtttatccatttatctattaataggtattttgatgtttctaatttggtccatgttggagctgagatttgcaattatcagccgttatgactccagaacctccaggctaaacaactgactacactactttcaattggagtctctctgaaacttcatatcctagaaacaaaaagtagtggaaaaacctctgttcatgatattcaaactygttgctcaaagatctaaatggaaaataaaagacacaaaatagtgcagtaggaatccccaggtttataccaaactaaaccgtgtgtaaaatcaattacttaattccatcaggtgtttaaacaagtcgaaaggcactcaaatatcaccttccccaggctcttactaattatttccataattaatctgaggttggaatgtctagggctaactctggaaatccttaaagttcatagatgggtgattaggtttttcatgtttccctcaggctatggatatctgtgttcacacttccacatatgaagggctcggctacctctctcctccaactaggcgatgcctgaggacctgaactgtgtctgcaacttgggagatgctagtcctcagcaaaacagtgaagtccatacactttgtcttcaccaattcttcttcagtttcccctacttctactataggcatggatgaccctcaagtgcacacagcatatttgctgaatgattaggagaagagatgatctggaatgagagggacttggagcattctcccaatataattacaaactattaaatagttgtgtatatttagggcctttttttgcacagaaaagcttggggttaacgcctgtgtcgtcatttcatctcccaaccttatttaaaagcacgacacctgctcaggcagtatttaagtgaatarcaccattaaataaatcaacctttatttaaatttaatcataaacctgtcaagttaaatataccttgcaaacaaagtggatcaagtagaataaaacaaactatgtaagaggctctagcaataacccattctttagatcttctctgacagttcatcttttttttttttttttcggtactgaaatttaatcttctatttaaatttcccattgagtctgagccaggccattctaagaatgatgcttttttttttcctggtccacaactaacttatgtgtttatcccttctctacatgtctgctcatggacttaattgttccatttatgtgattttgtaccactcagcgcagcataaatcttttggttacaagggccagaaattcaattcaaacagatttaggcaaaagtggtatgtattggttcatggaatatgataaaaggttgttcaatgaaaccaaaacagggcaaggatatagctgggcctctggaacatcaggaactgaataaaagcaggttttagccatattcacttcttgtctctgttcctttctgcgtgtaataggctatatggtagagaatatagctatgagaaactgctggatttcatgtcttaccaatgttttctttgatcaagttagaaaattcccaaaaacagactttgatgggcttgcaatggatccatcaaatatggtaaagggcgggatcatggagaactcttggcgacagcacgaggaggagcagttgtctctaggtggaggtggttgttctctgaagaaaggagggactgagaaggcagaaaaaaaaaaaaggccttttccaactatcctcactacctcttgcccacttgctcctcccagaattttacagcctctaatcttcccaacattttccttctacctttataacccaaatcaaatcttatatttttcagggtagcctctcttttgatgactacaagtctatttctagttccaacctctaatctgagtttcacttcttcattttcaaaggtctgctggtgttttctaagtggaaaacatgatgtctacccagttgtaatacactccaagttttactatttcttccarattcaaaccaacttcctctctcaacttctttaatttttcttaagtgattacatcatattagaatcccacaatgaaatcctccctgattcttccttccctatcaaccaccatattaagacactagttgatgatgtttttccaaaggtctctcagtctattccttcttcattattcctaccacctcatcccagaccaaatttccttttattgtaactgaagtgtacatggttcaaatcctctgtctcctcctcgtcaaataaatcctgcacataaaataactgctgtgattgtgtcacttccttacttaagattctgttataaccgctaacatgaaaaagccccaactcttgagcttagctccataatctgacctctacctgctatagagaacttgctatgctcattcccccctctaaacctttgtctatgacattcacttgcattccgatccaaagcctggttacacagtttgtttatgccaataattttgacacctaattagatgcagcctcttattgctatttaaatgtttcctatatgtttgtgtgtaaccctcaactaaattgaaggttctatgctaaacagaccatattttattactctgcatcacccttcgagcctaaatgcagggtactagaaatggttagtatgtgggcaaatacaaacaactattattttctcttctcttagtttcttgaaaatataacaatttcaagaaaaaatccaatgtggaatccaaaaaagttgaaatcatagaagtactgtacaacattgtgactatagttaataaccatgtattatattactgaaaattgctaacagaataggttttaagtgttttcaccacaaaaatatggtatgtatgtgaggtaatgcttatgttaattagctcgatttagccattccacaacatgtgcctatttcaaaacaacatrttgtatatgataaatatatacaatttttatttttcaatcaaaaaataaagcaaaaatgattacattgcattgtgggatttacaatagatgtgtatgtaaaatatatgacaaaaagggcacaaaggatgaggattggtagccaatgaaactacttttgcaagataattgtatataatattaactctaagtagttatcacaggataagaattgattctgtaatccttacagcaaccaccaaacttttataaaaataggtatatctaaagtgcaatagaagatttaaaaaatttttttctaaaagaagtcaggaaagaaggaacagaaaacaaaaacagatggaacacataaaagacaaaataccaacattgtacacctaaatccaaccatatcgaaattaccttgaatgtaaatgagctataatcaaaggacagcaattaaaagactggataaaaataatatccaacaacgttcttcccttaacaaacattttttttttaattttctgagatggctgactgtagggagacctgctgaaactattgctatggaataaaagatgaaatgctcctgattattgtaaatacaaaattgcatgcaggattgtgtaaagacaatgccaggttggactgccagaatgagccaacagcgtgtgatgtgcttccccctgcagagagcctatgaatggacgtgcagtcaggaaggtttcacatcaccaagattcctatcctagaaaagcagatgttcatagctctgggaatggaatgcgacccttgtggagagcctataaatggacgcatgggcaggggcgcctgtccatatggataagatagggctataaacgccctcatcttgccacggctcttctaagcctttttagggttaaggcatactctcttctgagaatttctggtctaaccagctgtctagcttcatgtcctgtttccatggattgtttgtaaccagcttttgttgcaattgttactgctgattaatatcttgctaatcataggttatggaaagattgtgtttctgttttaaggctctgttagaaattactgacacacacactatattgtaaattcttatctctgtatactgtacttctacaaacaaatgtactgtacttctacatacaaatgttatgttaaagaattacttcatccccatgtgactatctcacctcataatcaaatgaccctaaatccctcactaacctacccctgctgtcactaaacttaagaataaatgctagtatatccagtgcattgctggcaccgcgggagcagaaagcggtgacccccctggacccagctttcactatcttgtgtgtgtctattatttctcgacctgccggtccgcctgggaacaaagagagagccccgctgcattgcaggctgctggccagataccacaatatctgacacttttattttcagggggggttgactctttgtagtccagagtgctgtgggcctgtctggagtgacatggtttctaaggtcaaaatgcaaagtaaacacaggtcactatgagctatactttctccaatgtgctggtctacttgttttacttttctttttgtaaaatacttgttcttcatttttttctattgtggtaaaatacgaaaaacaaaatttaccaacttaaccatttttaagggtacaactcagtggtgttaaatacattcataatatgcaaccatcatcattgtgcatctctatgattcttttcatcttatgaaaccaaaactctatacctattaaacaataactcctaattccccccttgctcaggcacctggcagccaccattgtattttctgcctccatgattttaattaccctattatctcatataagtggaatcatataatatttctttttgtgactgacttgttgcagttagtgtaatgttctcaaggtttaaccatgttttagcataatgcagactctttttaaggctgaataaaattccattatatgaatagaccacatttttcttatccattcattgttgatggacactttggttgcttccatattttagttattgttaataatgctactataaacacaggtgtacaaataatctttttgagatcctgctttcaattcttttgggtatatacacagaagtggaattactggattatatggtaattttatttttaactctttggggaactgccatactgttttccacggtatgggaagtctttgcttaagccaatgtctagaaggattttttccgatgttattaatatcttctagagtctttatggtttcaggtcttagacttaagtctgatccatcttgagttggtttttgtatgagatgagagaggaggatccagtttcatttgttgatgtcatttccctacttcatgtttttgttcactttgtcaaagatcagtttgttgtatttggctttatttctgggttctctattctgttccattggcctatgtgcctatttttctaccagtaccatgctgttttggtgactatggccttatagtatagttgaagttgtgtaatgtgatgcctccagatttgttatttttgcttagtcttgctttggctatgtggactccattgttttttctagttctgtgaagaatggtggtggcattttggtgggaattgcattgaatttgtagattgctttggcagtatggtcattttcacaatattgattctacccatccatgagcatgagatatgtttccatttgtttgtgtcatctatgatttctttcagcagtgttttgtagttttccttgtagaggtctttcacatccttggttaggtatacaggtatattcctaaggtttttttttttttctttttttttttttttgtagctattgtgaaaagggttgagttcatgatttgattcttagattggtcactgttagcatatagcagagctactgatttgtgtacattaattttgcatccggaaacttttctgaattcatttaccagttctaggagctttttggataagtctttagggttttctaggtatacgatcatatcatcagcaaacagtgacagtttgacttcctctttgccaatttggatgccccttatttcttgctcttttctgattgttctggcttgaacttccaataccatgttgaatagaagtggtgaaagtgggcatccttgtcttgttacagttctcaggggaaatcctttcaacttttccccgtttagtagaatgttggctgtgggtttgtcatagatggcttttattaccttaaggtagtcccttctatgctgattttgctgagagttttaatcataattttgatttgcattttcccaatgattaatgatgtcgaacatcttttcatgtgtttattggccatttgtgtgtcttctttggagaaatgtccattcaagtcctttgcccccctacccccacccttttcttttgaatgaagcaacaaaagcaaagatttattgaaaatgaaagtatactccacagtgcgggagcaggcccaagcagcgggctcaagggcccaatacacaatcttttcaggtctaaataccccctagaggttggtgttccccccttcagagtggtgagttaccccaggccctgggtgggtccacagatgatatctgggagccagggattaaagtaaaaaaccctagaaatttacctggtatcccattctactgaagctaagctggcactcaaaccacaagacaaagtttttcccattcttctctgccctttccccaggcagaggagcctctcttgtggccatgaccaccatggttccacagggagttctgccaggcctccactgatgttcacttaaagattaagagctcttcagtcagcttgtgatgaatgctgccagacstagaactcattcttcaaggcagtggatttccctccagcccaggacaggctcagaaatactgaccaagagcctaggcctggattcagggactccaagatcctgcttggtgctctaacctactgtggctaaattgggacctaaggtggaagacaaagccccatttacttttcctcttgcttttctcaaaccataaccaccacagctggagatgtgctggatcacacctgaagccaacatgtctcagagcccaaactgcagcatattacctggatatcactgttggttattcagggcccgggggctctttagtcagtaggtgatgcatcctgtcaggtctccacttttacagagcagcactgagttcaatgtaaagtccctcaatcactgcactctccttctctcaaagaaattgatttctccacaatgtgtggctgctttcagggggtgtgggcagggtggcacaaacactctcttagccactctgacataggtcatgtgccccccaagtccactggctctgagcctagcttagcactaagatttgaccaggaattgcagtccttgtggcccaatctgcccctcaagcttacttagagacctagatcactccgtcttgcagtggcaaggctggccagaagttctggcctctgggataggcaattcccttctggctagggccaattcaaatgctccctccatggacagatgtcagctgaatttcacctggttctgctttctgctgtgacagggcagcacggagttcaatgcaaagcttcacacctgctgtgccctccctcaagcacacagatactctatgccatgtggctgttgccaaggcatggggaggggtataggcttctattcagccacgttgctccatcccttccccttcccttttctaagctaataagtcattacataaattagtctttttttttttttttgatggagtctcgctctgtcacccaggctggagttcagtagtgccatcttggctcactgcagcctccgcctcccaggttcaagcaattctcttgcctcagcctcctgagtagctgggattacaggtgcatgccacaatgcccagctaatttttgtatttttagtagagacaggattccaccatgttggccaggctggtctccaactcctgacctcaagtgatccacccgccttggcctcccaaagtgctagtattacaggctctcaaaaatgagctaccatgcccagcctaaattagtgtttttaaattatgtacaaaacaaaacgtggagttacaaactaaagttacaataatactagcttttagactcataattttttaagtgtattaatccctttaatcatgtagagaacaaaaagtggagttacaaactgttgttactaacttacactagcttttattaactgcccatgtagctttattaaggtcttttttttttcatacagctttgaattcctatctagtgttcttttgtttcaccttgcagggctcccttaagcatttcttgcagagcagatctggtggtaatgaactctatcagattttctttgtctgaaaatgtcttaatttcttcatcacatttgaaggacagtttattgaatgaatataggatggttgacagtattgtttttagcactttgaatatatcggtccagtgcctttctcttaacagacatatttgaaaaataaagagatatttgaaagtaataggatagaaaaattaaccaagtgatgtagtttggatgttgttctctctaaatctcatgttgaaatgtaatccttaatgttggaggtggggcctggtggcatgtgtttaaactatgagggcagatctcttgtggctttgtgctttccttacgatagtgagtgagctctcatgagacctggatgtttaaaagtgtagtgcatctctcctcccctctctctcttgctccggctcttgccatgtgagttgcctgatcccccttcacttcccatcatgactgtaaacttcctgaggtctcaccagaagcagatgctgtcgccatgcttcctgtatagcttgcaaaaccatgagccaattaaacctcttttcttataaattatccagcctcagatatttgtttatagcaatgcaagaacgacctaacacaccaagaaaacgaaaagcatatgaatgctagagtgactattttaatatcaaagtgaacttcaaggcaagtattataagatataaagtattatgagagataaagttaattttaaagtattttataattctaaaattataaaagggtaaattcatcaaatacacataacaattataaacatgtaagaatttaatatcagagcttcaaaaaggatgaagcaaacactgacaggactacagagagaagtagacacatccataattgtggcaaaagatttttacacttctttcttattatttgagattaaaatgagacaaaaagtcagtaagaatgtagaagatctaagtaacactatcaagcaccttgacctaattgatagttatggggcactacattcaacaacagcatatctttttcaaatacacatgaattattcacaaagatagacaatatgctgggccataaagtaagtctcgataaatttcaaaagattgaaatattacagaatatgttttctgatggcaatggaattaaattagaaattcaataagatatctagtgaagtctaaaattcttggaaattaaacagtgcaattctacataaaacattggttaaaccacaaatataaagtataattagataaaagttcaagttgaataaaaatgaaaatgtaacatatcaaaatttgtgtgatgcagcaaagaagtgttgagcaggaaacttaaagcttaaatgtttatattagaacaaaaaaakgttaaaatattgatcaaattctctgccttaagaagctaaaacaggaagagaaattaaaccaaagaaagaagaaaagaaataataaataataaaacataaataggaaataaaagagaaaatcagatgaaaccaaatgatgattccttgtaaacatcaataagttgatgaatcactagctagaacaataaataaaaagagacaacaaagtaatcaaaactgagaatgagggaatagaaagccagatactacagacattaaaatgttaataaagggacattctgatcaaatttatggcaaaaagttaaaaacttagataaaatggacaaactccttaaaaaatgaaaccaaattagacacaagaagaaatagaaaatcttaatagtactatatctattaaataggttgtaattattttaaaaaaagcaaaccttcatgaattaaaaacttcaggtccaaatggtttctctcatgaatcatatcaaatatttagagaagaaataataccaatcttacacaaagttttaagataataaagatggcggaaatgttttctaactcatttcattaggccagaataaccttgtcaccaaatcttgacaaagatatgtaattaaaaaaaaataaaaatagaggttggtattccacataaacatatatacaaagatccttgacaatatattagcaaataaagtagtgcaacatataaagagaataatacactatgactaagtggggcttataccaggaatgcagaatttatttaacattcaaagattaatcagtgtaatttaccatgttaatgaaatggagaagaaaaactgtaggatcatctcaataaatacaaaaaaattttaaaataaaattcaatactcattaatggtaaaaattgttagcaaagtaggaattaaaatgggctttttacagctgataaagggaatctaaaaatgatctacagttaactatacccagggatgaaatagtgaatattttcttcctaaaaacaggaacaaggccggaatgtgtamtcacattaaatctaatcagcactacactggagatcctagccagtgaaataaattttaaaaaaataaataaagggcatacatatggagaaagaagaaataaaattgtctttatttgctgatgactaagtataaaatttcaaagaatcttcaaacagctactagaaccaatatattaattcggtatatttgtaagataatggttaacatacaaaaatcaattgtatttttatatgctggtagcaaataaaaatgtaaacaactctatatacaataacattattaaatattaaatacataagaataattttaccaaaagacctttacactaaaaattacaaaacattgttgagataaattaaggacaaaaaataaagagatatgtttatagattttcagatggaatatttttgaatatttaaaaacttgctagtagtctaccataatcaaaaagtgaggtattggttaaaggctggacaaatagatcactggaatgcaatatagaaaccagaaaaagattcatgcatatatagtcgtatgattttcaacaagagttcaagtcaatttgaaaataaaaatcttcagtgaatgatattggaatacttagatagacatataaaaacagtgaagttcagccctacttaatactacaaaaaaaattaattcaagatcaattatagtcccaaacatcaaagtaaaaactatgaaaattctagagaaaatcatagaaactgtttttgcatgtcagaggcaggcagatattttttatagcagacacaaaaagcacaaacattgtagaaaaaaatgacattagattttattaaaagtcatcatttctgcttatcagcgcactattaaaaaataaaaaggaaaaccacagtctgggtcaaaatattcacaatgcatatatcagacaaaggacttgtatccagagtgtatatgttatatatatatatatttttcacatacatatatacatatatgtatgtatatatacatgcacataaatcaataaatttctacaaatcaataataaaaagacaatataaaacagttgtgtatatataggagttggataagaatacatatatgtatattatcacacatacacaaatgctacaaatcaataaactcttataaatcaataataaaaagataactcaatattaaaatgggcaaacaaatagttactttataatagaaaaaatacaaatagccaagaagcacacaaaattgttctccatatcatcagttagaagacaaatgcaaatggaaaccacaatgagataccatttcatccccactagaatggccaaaatcaaaaagactgacaacaccaaatgttggtgggaatgtggaacagctctcctacattattgaggggagcataaaatgtcagaatcactctggaaaactctttaacagtttttataaagttaaatgaatataaattttttaacacagtaatttcactcctaggtatttacctgagaaatgaacctatgcctacaaagaaatggattcaagaatgtgtatagaaactttattcatagtagccccacactgtaggcaatggaaaatgttcagcaatagtgagtaggtaagcaagcagtgactcatataatattatgggtgaatctcagaaacataatgttaaaaataaagccatacaaataaacatatgaaaagatgctccacctctacaccaacagggcatctagaagagtggatctcaacattggctgcaccccgaaatcacctgaggagcattaaagaataaaagcctcatttcatctcaagagatttgatttgattggttgtatttggcctggacattgagatttttaaaaagccccttagataatttcaatgtgcagccaagagcgaggacctaggtctttaagggaatcctgggacaacttcagtgtccaccaaggaaaggaagccagatgaagttgcaaattttgtagccactgcaggtgaagaaatggctaatttttggaggaaaactgaggtgaagatctggatctattaagaccaagtgcctgagaggaggaaacagttctctggccccacagctggcagaactaagagccttggtggtgagctgctacaactgtgaagcctgtgaaccacgaagcctatcaagatttaaatgtctggtataccttgttttctcctgagtctttcagtacctgatttgaggaaagccttcctggctgggttcctgtgcaggaatacagacaatgccaaatctctacaaatttacctttcagctaggtgattttggtagggtctccaaccagagagaccaatacttggtaccaggcaaagcaccatcttcaaaggcaaattgggcatagccagaaagcccacacagggcacctactggcatccaggtcacctactgagcaaatatctgcttctcttccatcattatagagtaggtaaaagtgcatttctggatcagtgtattttcagacaaaacgacccctatcctctcgtgcctcttgaagttgaagttatgtggtacctcttgaagctggaattatgacataattatcattccaagtttgtctttgtttccatgaaaattgcgaagtttgaagaggattatatccttattgtagtagtgaatatttccaaaaatgatgctagcacaagttccgagaaagaggtttaacagtcatgttaaaagccaaacatattatcttgggatttagatattatttcagaagagatgatttctcatggtttgatttataccaataataagctatagtatataaaggatttacaccaaatacttaattattttgttcattttatcaaaacaaacctagggtaccaacattattcttgcctaggccatgtatagtgcttaattattttattcatctataagtgagttcattgatacaaagtggagagactttcaattgtgttttatagaagaaattggaaggctttgtgaggaatcagagttgtattcctgaagaatcagaggcatatttatgaagactcacaggcgtattaatgaagagctcatttcatgtccattctcagcacagtgtccgggaatctgccttgtggtcggctcttaccttcaggctgctctgagcccagagcagaatggtcatcacagctctcctcaacttggcattgcctgagatcaggayggctgcatgcccagagggacaagctgccattatcccaacacaaaccatcacccctattttgtcgcgccacagaatcagtaggggcacagagatgaaggcarcacaggatgatatcacaaagaagcagaaaaaggagacaagagacttgagggctttaatgtgggcctccaggctggggtcacgagagtttctggtatagaccttcattgtcctcatgtgccttcccagggagacagtcagcatcccagaagaaaccagaaacaataggaaaggaggcacagaccacagatagcagaagagaaaggaataaaataaattgagatctttaatctgccagttgagccttgtattgttattcatgaatagcacagttgtgactgtgaagtgaggtctgctaaaaaagcaccaaacacagaggacagtgcagatgcaggagcaaagaataatacccaggagcatctgggagatcttcctggagacccagcttgccaagcagatcaggaaggtgtgagagaaacggatgagcttggagcagtaaagcaggctgaggcaggcagcaagccagaggttggcttggtttgcaatcatccatagcatgatgatggcttggtagctgtggttcagtggttcactcaacttctggaagtgggtaagctggatagcactcakgaacagcagtccatgcaggaaaagccggctgatgctgagacacagcagcacacaatcactgttgctcagtgsctgcctcttcactacatcccaaaaattcaccaagaaaacgaaggcattggtcagaaaccccactgcaaactccaggactgaaatgaacagaaatgtactcctgacttcataggacacagtgcggatgcgagttagagtcaacatgatgtcacttctctaattggctattctacttctcttctctagttggctaatctaaagacctggttgccacccagtgcagaaaggtaaatgtacgttccaagccaggacctttccttcacaaagcatccagctctttgcctagatctatcccaaagcgagcgcataaaaagttctggcaggaaacttagagggatgttgtttctctagaacatctcttggatacacgtaagagcttatcatagggtggaagactgatggttctacctcttgggtgatgcaagattaataaatccaggtgttcctgtacaaccgccttcccagaaggccatagcacagcatcacggatgcaaacaaaacagggcctcaatttccccaatccagttttgcatgcccatctggacctgtgggggtggcgaagagaacaggatttgcttatgggttttgaggcaccctgcagcaggcaaagcagatattcttggtgatctaaggtttgaaatagagtctcttttcatttgcattccttctctcatctgtgaagtaatgactcttatcacagactgtgtttttaatatagataaatgcatggttcctttccatgtgtcagtgtatgattgcagttttatttgctgttgccaaaggtttcatgcaatcatcattattatgccaggcactgtgcctggcaaggagaatattaacatgaacaagactagcacgctgtcatgaagggagaggaaagggggcatagctggtttggattattattatgtttattttttaattagtataagttctggggtacatgtgcagaacatgcaggcttgttacayaggcatacacctgccatggtggttcgctgcacccatcaacccgttatctatattaggtatttctcctaatggtctccttccccttgccccctaccccctgacaggccctggtgtttgatgttcccctccctgtgtccatgtgttctcattgttcaactgccacttatgagtgaatttcccccgataaatcctttaagagttattggtgctgccccattggtgtttttcgatactttctctttgtattttttatgttttcttttgactaaagctccttttttattattagtagtgacataagtcagtgattactaaagatgttcacttttgttttattctgaactgttcatacgcagatatttatgtagtccttatttgtgcatcatgatgtagcagttgtatttaattaattgtgtttgtgaccacttcatttgggtcattcatgcttacagagtgtcaaacacagaattctgcactttcaacttaagctaattttctccttgtcttcaccacaccaggtggcggtgttgcactaaaggtgtttagaaaagatgtttgcctccctaaaaagtctaggtagaaacttgctctactgcacaagcagagatatataactatacagttagaaccatttatatcaagattataatcttttattaaaaaataaagttctttatgttatttcttggaacaccagatccaatcttaatttttcaataatcaagggctctttcagagaaaggtaacacaaaccttcattgatacaccccctccatttgacttatgtacacacagtgtttgggattatctaagtaatctcctttgcagatagtccttagctattggctattttttgaaaaatggtttactcaggaagctaaaaacagtaaagtcaactgcaatgccagtaagagcagtggtaggaacacaaaagctccttatttgttattagtagtgatataagtcagtgactacatctttatcagatgtaattaaaaaaatcttagtccctggattttgcaactaaacagatgttaaaaattcttaacctatataaattggtgtttcgacttttgctgccatttatttttggagattggaattacattctttggattgatttttaaaaattggtctttgttagcttgacagaagaacactattattagtaatatcaaacctcattcccttaaaataccttgcttagatgtttccaatgactagagaaatggacataccaatatatgtttattaagagcaaaatatattccacctgttgtaatgggcattgaggacacactggtaaacaaaggcgtattagaggaactgaaagagcacagccttaaagccataaagcttaaagtaagccataccttactttagaggaaaaacaccactagatgacttcagatagcggagtgaactgaaagaaacaatgttgggggagagacaacggacaggaaacatacaattggggtagtgtcaataggaaacactggcagtggccatcatcaacagcactcaaaacagatgaaatggcacccaggaagtcgatgaggcaggaaggagctcggtgctttcacggggagaggggaggcccgcgtggctggcttgtagccacaggtgaggctggagggcgacttcttccactaccgtgtgattacaatataaagtaacyagtgattggctatctcccattcttcccccgtgattggctatctcctgttctccccctgccggaattcctaggacagcgagacaggtgggaaacaacagacctaggaggagtctctgcacctccaatctccccaaataatcgggcaaagcaatggactccagcttttccaggaagctccagctccccagcaaccgagtcctcccccatcgctatttaacagctcccaccaggtggcgccagaacactgcgaggcctggaattcctggcaggctcgcagtgcatcctcacctcagccgtttaaatctagcaataatggggttccgtatctcacgcaactgaaattttagactccacttactgcgttatgataggctgaatttccttgaatctcacagttgccctgcgaagaatgtagtgatatttccattgtactgatgagaaagtggtttcaggaaagttaaatagttaaatatcttggccaaggtaagtaacctagtgagcagctgggattccaaccgcaggtattctgatttcacctttggcgtttcttcctctgagcctaactcccaatctagagtacgggctggaggagatacccttgctttgataagacacctggtaacatttttttttttccccaacctcagccctatctgagcttttttcttactctttttttcttttttttttgcgtgggcagggggagtgcagttgcccttgtggactccctcaagatgatagctcattccattcccaggagatagagaaaaattgagtctggataggtttatatctcaggaggccactgttctggtaagggaaaggaatggggaaaatttcgctaggctcgttgaaagaacgtgtcgatgtatgcaacaggttaacatagctattcataagttagagccctagagcataaaaggaaattcttcagaatttttcaggtggatctgggatgatgtcttcctttactcccttcctacaggcttcctatatcttctttgcttccattatactttgttcacagcactattgtagcacttaccatatgtattaaaatatgtatttgtggctgggcgcggtggctcacgcctgtaatcccagcattttgggaggccgaggtgggcgaatcacgaggtcaggagattgagaccatcctggctaacatggtgaaaccctgtctctactaaaaatacaaaaaaattagccgggcgtggtggtgggcacctgtagtcccagctacttgggaggctgaggcaggagaatggtgtgaacccgggaggaagagcttgcagtaagccaagattgcccccctgcactgcagcctgggagacagagtgagactccgcctcaaaaaaaaagtatttgtttacatgggtatcctcaattatattgagttcttcaagagtagggattatgtattgttctttttttttactccttattgtatatgacaagtaattagatttttgttggtttatttggccattcactttaaatccaaagtaatggtttgaccaaccttgctttcttatgaatataggtatattggccctgcttcaatctaggtgaattcactcttcggattctttttatatttatttccttttatgagacagggtctcactctgttgcccaggctggagtgcagtggtgtgatctcagctcactacaatttctgcctcacgggctcaagccatcctcccacctcagcctccagaatatctgggactacaggtgcatgcctctatgcccagctaatttttgtattttttttgtagagacagggtttcaccatgttgcccaggctggtctcaaacccctgagctcaagcgatctgcccgactcagcctcccaaagtgctgggataacaggcgtgagccaccgagtctggcctcctgggattctaacatgttttctgcactgaagatcaaaggctgaatgtctttgtaacccattatgtagccattcaggacagcactcatcctaagagaagaaaaaattaggtagtgaaatcattcattaacaaaactgtaggcaccaaagtgtaggcaggctcttgttcgggggacatggtgtttgctatgagggcttgtcctctgttccagtctgatggatttcagtctgaatccaaagaacagtttattaagtaagcccttttggctgcaagcagtaaagattcattcaggtgagctccagtaatatggatttttataggctatatcaatagttctcaaggcttaaggtgccccacactagggagatcaggatcaccaggggacttgctagaaatgcaagactgctgacctatggaataaaaacctctgaaggtgttcatgactgtgttctaacaagtcattcaggtgattctgacgcacactcatgtttgacaactacyggggcataagagagaaagattttccaggacttcagcaatgagccatacttcacagagattaaacatcacttgggtgctgaaactttattcagaatccatgttggggtgtttttttagcagtaggagttaattgccattcacttgaatgctccactgtaagtgatattcagactcttgttagaaaagaaggcctttgatggtttagatggtatagtgccaagagtcccaggaattcccaaatccagctctgccatttattcctgttacctgagaagaacagtgaaagggggtataatgtgggtattactcttttaaatgtgacagcagcacccaacagctctcgctgcagagccctggtaccagttgggtttaagcaagcagcaggcctaggtagaatccacacacccaatttgccattctttccagggtagttactaccaatcgcctatgtggtattctcgccattatcagcggaacttctgtgtttgttaggcatgtcagtattcccaatttaaaagaactacaaatctcatccttctttcagataggaatgtccaaatgacacaagaaaaagtaattggatggaatttcttagaaagcccttgttgcatttccctttttctgtgcctgaacttgagtgttattgttggactctaaccatggggcaaaagccaagagaatctcaaaggcttcactctgaaatcttgatggctgaaaccacaccagcaactactcttttccagccttctcattatgtgataatgggaaattcttatgtccttaagccacaatgcttggaacattattattggaagccgaatgcaattactaacttatccaatatgaaacttacaccttgggaccagaatgcgcaagagtggagagagggagagaagaaatgggagcgggagagacacacacacacatacacacacacagrgagagagagagagagagagagagagagagagagagattacttacccacttatttggagaaagagagaaagaggagataacttgcctgcatgaaggatcttggatctaattgcccatctaagcatgagaagccaagggtgaaatggagagaagggcagcctgcttcctgtctaggtttgcttgtcaagaagaggcaggaaacaagaagtacaatagaggaaaccaaagaaaagatgtctttacttcctacattttaaggcatattgtttttgcccacacgtatttgttaaagggaggttggcagagtggtaccggtgtgaggacatgtggttaaagattctctcacacagtttttatttcagtttctctattttttcattttgttcttgctactaattgatcttgctagcaattctttctgtgtcttacactgagaaagagaatctgagtggttgagtggtgacagagtgggatgcttcctgagctgtaggccaatttaaggattggctgtctttgggttaggtgcccatccctggtcccagcatctttttttttttttcttttattattatactttaagttttagggtacatgtgcacattgtgcaggttagttacatatgtatacatgtgccatgctggtgcgctgcacccactaactcatcatctagcattaggcatatctcccaatgctatccctctcccctccccccaccccacaacagtccccagagtgtgatgttccccttcctgtgtccatgtgatctcactgttcaattcccacctatgagtgagaatatgtggtgtttggttttttgttgtgatagtttactgagaatgatgatttccaatttcatccatgtccctacaaaggacatgaactcatcattttttatagctgcatagcattccatgctgtatatgtgccacattttcttaatccagtctatcattgttggacatttgggttggttccaagtctttgctattgtgaatagtgccgcaataaatatacgtgtgcacgtgtctttatagcagcatgatttataatcctttgggtatatacccagtaatgggatggctgggtcaaatggtatttctagttctagatccctgaggaatcgccacactgtcttccacaatggttgaactagtttacagtcccaccaacagtgtaaaagtgttcctatttctccacatcctctccagcacctgttgtttcctgactttttaatgattgccattctaattggtgtgagatggtatctcattgtggttttgatttgcatttctctgatggccagtgatgatgagcattttttcatgtgttttttggctgcataaatgtcttctttcgagaagtgtctgttcatatccttttcccactttttgatggggttgtttgcttttttcttgtaaatttgtttgagttcattgtagattctggatattagccctttgtcagatgactaggttgcaaaaattttctcccattttgtaggttgcctgttcactctgatggtagtttcttttgctgtacagaagctctttagtttaattagatcccatttgtcaattttggcttttgttgccattgcttttggtgttttagacatgaagtccttgcccatgcctatgtcctgaatggtattgcctaggttttcttctagggtttttatggttttaggtctaacgtttaagtctttaatccatcttgaattgatttttgtataaggtgtaaggaagggatccagtttcagctttctacatatggctagccagttttcccagcaccatttattaaatagggaatcctttccccattgcttgtttttctcaggtttgtcaaagatcagatagttgtagatatgtggcgttatttctgagggctctgttctgttccattgatctatatctctgttttggtaccagtaccatgctgttttggttactgtagccttgtagtatagtttgaagtcaggtagtgtgatgcctccggctttgttcttttggcttaggatttacttggtgatgcgggctcttttttggttccatatgaactttaaagtagttttttccaattctgtgaagaaaggcattggtagcttgatggggatggcaatgaatctgtaaattaccttgggcagtatggccattttcatgatattgattcttcctaccatgaggatggaaggttcttccatttgtttgtatcctcttttatttcattgagcagtggtttgtagttctccttgaagaggtccttcacatcccttgtaagttggattcctaggtattttattctctttgtagtaattgtgaatgggagttcactcatgatttggcaatctgtttgtctgttgttggtgtataagaatgcttgtgatttttgtacagtgattttgtatcctgagactttgctgaagttgcttatcagcttaaggagattttgggctaggacaatggggttttctagatatacaatcatgtcatctgcaaacagggacaatttgacttcctcctttcctaattgaataccctttatttccttctcctgcctaattgccctggccagaacttccaacactatgttgaataggagtggtgagagagggcatccctgtcttgtgccagttttcgaagggaatgcttccagtttttgcccattcagtatgatattggctgtgggtttgtcatagatagctcttattattttgaaatatgtcccatcaatacctaatttattgagagtttttagcatgaagggttgttgaattttgtcaaaggccttttctgcatctattgagataatcatgtggtttttgtctttggctctgtttataagctggattacatttattgatttgtgtatattgaaccagccttgcatcccagggatgaagcccacttgatcatggtggataagctttttgatgtgctgctggattcgttttgccagtattttactgaggatttttgcatcaatgttcatcaaggatattggtctaaaattctcttttttggttgtgtctctgccaggctttggtatcagaatgatgctggcctcataaaatgagttagggaggattccgtctttttctattgattggaatagtttcagaaggaatggtaccagttcctccttgtacctctggtagaattcagctgtgaatccatctggtcctggacgctttttggttggtaaactattgattattgccacaatttcagatcctgttattggtctattcagagattcaacttcttcctggtttagtcttgggagagtgtatgtgtcaaggaatttatccatttcttctagattttctagtttatttgcgtagaggtgtttgtagtattctctgatggtagtttgtatttctgtgggatcagtggtgatatcccctttatcattttttattgtgtctatttgattcttctctctttttttctttattagtcttgctagtggtctatctattgtgttgatcctttcaaaaaaccagctcctggattcattaattttttgaagggttttttgtgtctctatttccttcagttctgctctgattttagttatttcttgccttctgctagcttttgaatgtgtttgctcttgcttttctagttcttttaattgtgatgttagggtgtcaattttggatctttcctgctttctcttgtgggcatttagtgctataaatttccctctacacactgctttgaatgcgtcccagagattctcgtatgttgtgtctttgttcttgttggtttcaaagaacatctttatttctgccttcatttcgttatgtacccagtagtcattcaggagcaggttgttcagtttccatgtagttgagtggttttgagtgagattcttaatcctgagctctagtttgattgcactgtggtctgagagatagtttgttataatttctgttcttttacatttgctgaggagagctttacttccaagtatgtggtcaattttggaataggtgtggtgtggtgctgaaaaaaatgtatattctgttgatttggggtggagagttctgtagatgtctattaggtccgcttggtgcagagctgagttcaattcctgggtatccttgttgactttctgtcttgttgatctgtctaatgttgacagtggggtgttaaagtctcccattattaatgtgtgggagtctaagtctctttgtaggtcactcaggacttgctttatgaatctgggtgctcctgtattgggtgcatatatatttaggatagttagctcttcttgttgaattgatccctttaccattatgtaatggccttctttgtctcttttgatctttattggtttaaagtctgttttatcagagactaggattgcaacccctgcctttttttgttttccatttgcttggtagatcttcctccatccttttattttgagcctatgtgtgtctctgcacatgagatgggtttcctgaatacagcacactgatgggtcttgactctttatccaatttgccagtctgtgtcttttaattagagcatttagtccatttacatttaaagttaatattgttatgtgtgaatttgatcctgtcatgatgatgttagctggttattttgctcgttagttgatgcagtttcttcctagtcttgatggtctttacattttggcatgattttgcagcggctggtaccggttgttcctttccatgtttagcgcttccttcaggagctcttttagggcaggcctggtggtgacaaaatctctcagcatttgcttgtctgtaaagtattttatttctccttcacttatgaagcttagtttggctggagatgaaattctgggttgaaaattcttttctttaagaatgttgaatattggcccccactctcttctggcttgtagggtttctgccgagagatccgggcttagtctgatgggcttccctttgagggtaacccgacctttctctctggctgcccttaacattttttccttcatttcaactttggtgaatctgacaattatgtgtcttggagttgctcttctcgaggagtatctttgtggtgttctctgtatttcctgaatctgaacgttggcctgccttgctagattggggaagttctcctggataatatcctgcagaatgttttccaacttggttccattctccccgtcactttcaggtacaccaatcagatgtagatttggtcttttcacatagtcccatatttcttggaggctttgctcatttctctttattcttttttctctaaacttcccttctcacttcatttsattcatttcatcttccatcgctgataccctttcttccagttgatcacatcagctcctgaggcttctgcattcttcacgtagttctkgagccttggttttcaggtccatcagctcctttaagcacttctctgtattggttattctagttatacattcttctaaaattttttcaaagttttcaacttctttgcctttggtttgaatgccctcccgtagctcagagtaatttgatcgtctgaagccttcttctctcagctcgtcaaagtcgttctctgtccagctttgttccattgctggtgaggaactgcgttcctttggaggaggagaggcgctctgctttttagagtttccaatttttctgttctgttttttccccatctttgtggttttatctacttttggtctttgatgatgatgatgtacagatgggtttttggtgtggatgtcctttctgtttgttagttttccttctaacagacaggaccctcagctgcaggtctgttggaataccctgccgcgtgaggtgtcagtgtgcccctgctggggggtgcctcccagttaggctgctcgggggtcaggggtcagggacccacttgaggaggcagtctgcctgttctcagatctacagctgcgtactgggagaaccactgctctcttcaaagctgtcagacagggacatttaagtctgcagaggttactgctgtctttttgtttgtctgtgccctgcccccagaggtggagcctacagaggcaggcaggcctccttgagctgtggtgggctccacccagttccagcttcctggctgctttgtttacctaagcaagcctgggcaatggcgggcgcccctcccccagcctcgctgccgccttgcagtttgatctcagactgctgtgctagcaatcagcgagactccgtgggcgtaggaccctctaagccaggtggtggatataatctcgtggtgccctgttttttaagcctgtcggaaaagcgccgtattcgggtgggagttacccgattttccaggtgccgtccgtcacccctttctttgactaggaaagggaactccctgaccccttgcgcttcccgagtgaggcaatgcctcgccctgcttcggctcacacacggtgcgcgcacccactgacctgcgcccactgtctggcactccctagtgagatgaacccggtacctcagatggagatgcagaaatcacccgtcttctgcgttgctcacgctgggagctgtagaccggagctgttcctattcggccatcttggctcctccccccagcatctttaatggcagcatggaaccttgtgattagggacataagatcagttttctcagcagggacccatgggtggggattccttttgagggatctctggacccctcttaaagttttattttgttcacaaacatgagctaagggtgaggaggttttaagtaaaagctgatagagctgtaagccattggatgacagccctttcgtgcttcttcgtagcagatttcacataagagaacactgtgtagctctggcacttggagggttcttyctctgtctgcagacacgggagctcaagccatacccagagacagtgtggacatggcaattcccggagagcagaccaggaggagagggaggtacctggaggaaggatgccaagccagagaagacagcaaacatgacagagaccgtacatggctgtaagacattgtttgtgaatttaagacatttcctatggcattcttttcacatttttcccttggggtaggggactgaggggaaatatacctaccagtggctcattataggggaaaatttctgcagaatttagtgtttgatgttgaaaaacaattgtgtacatttgcatactattatattatactgccacaattttagcaattcaaaatattgattgaaattacttactcttctccaataatcttgaactaaaatggtatttccaagaaaatgcattatgaccctctcaatatgccaccacatacctcctagggtatgtgtaccctsatctaaaaaaatagaactcaatggggatgccaaacaattgggagggactttgtggagatttggaggtcctacacttgcaggtggtggtaaaagccagaaaaatgcagataacaggaggacaactttttgctcatagggtagactatgattagacatttttggtggagatatttatttatactggacaatggagacgaaacacgagcctgtcatagcagggctagcagggaccattttgtcacatggcacagaaacagaaactggaagttaggatagtggtggtgctggtagtggtggtggtagtcataggcatagtaaaggtagtgttttgatgaagaaataggagaattacatgaaattaacttgtaccttggccttcacagaaatgaaaagaatactggcagttaatctctctgcttttccttctgtgggtttgaatgttttctttctgctactctctacatgtgtatcccattctcttttggacaaacaagcattttcagtaaaactaatctctgtatcttaataacatgccgtaatcccacagacatagtgctcactcagtgcagtatgattcaggcactgtgtctcaaatctaaatttttgggagggcgaatccatctggacgaagtcggatcatctgtccagctggttcactcagctgagatcagagtgttagggttatgttgagcttcccacacagaagtggaccatgcaggtgtcagcgaggcacaggggaggggggcatggaggaaataatgggggtttctagaacaagatttgagcttaaagagaaatagccatctctgaggtgaggatgctagaatttgacaactgataggattggagggattcccgtttgggagacttggtggcaaatccactttgaatttgttgaatgaatgaacaaacatttagtttgaaaaagccattttctgtatttactgctttcaaaccctatgaacattggattcctggattgaaattaaattagtatgactttaaccccaccactatatgagtgacctttagcaactcatttctcttagtttctgtttcctcatttatacatgggcattaaaaatacctgccttatcttaaaggattgttgtgatcaatgaaatagtacagattaaagtactccgaggctgggcgtggtggctcatgcctttaatttcagcactttgggaggccaaggtgggtggatcacctgaggtcaggagttcaagaccagcctggccaacatggtgaaacaccatagctactaaaaatacaaagattagccgggcgtggtggtgcatgcctgtaatcccagctactcaggaggctgaggtggaagaattggttgaacccaggaggaggaggttgcagtgagccgagattgcgccactgcacttcagcactttagcctgtgcaacacagcaagactctgtcttaaaaaaaaacaaaaatatttaaaaggtactctgaaaactgcaaagtgtcacacaatgcaaagttgttgtcgttttttgttttgttttgagacagagtctcactctgtcacccaggctggagtgcagtggcgcaatctgggctcactgcagtctctgtttcccaagttcaagcgattctcttacctcagcctcccgagtagctgagataacaggcgcccgccaccatgcctgactcatttttatatctttagtagagacggggtttcaccatgttgaccaggctggtctcgaactcctgacctcaggtgatccacctgcttcggcctcccaaagtgctgggattacaggcgtgagccaccatgcatggccaaatgtaaagttttatgtgaatactaggtgatgtgttattcctaaaattctctctgtactcatacttgtgtgtgcatgtgttcttatctgtggtggtgaagaggaaaggagtagaagacggtgtaaagctgctaaataatagacatttcacaagacaaggaaatgctgtaatgtcctgtgtacattgtttccactctcaccttcctctgaacatttctgggcagagaaattactcctactccaactaactcctttttgccctttgcaggtggcatgagatgttaaggtcttttatatgggacaaaagaaggaaaacaacttggctgcaataaaaacagaggtaaaaattaatgtttgtaggctatgaagactgtgagaaatcattttgataggtgggggtgtagatgccatgtgcttgtgagtgtgtgtgtgtgtgtgtgtgtgtatgagtatgtgagagaaagagggagagagagagagagagagagaaagagagtcttgtagtagtggtttttctccattggcctgtggaatcagttcagtgtgggatgtgttgactgtttactgtggctattcctaagggttgaggaactggaggaatagttcttaacagaatttaagctaatgatactgcttgttggatattatttcattttcagaaaggactggctgaggaggggttgggaaactgacattggatgtcaggtacttatgtcagcttaggctcaaagtaacatcatgaagtactcatgatcatccctgatttccagataaggcaactgagcttcagaaaattgaaatggttgtccaagttctgcagaaagtaagtagaggacctcatatttaagcccaggctagtttgatttgaaactccatgttcttctttctttttttttttttcgattattagagacagggtcttgctgtgttgcccaggatggagtgcagtggtgctatcatagctccctgcagcctcaaactcctgggctcaagtgatcctcttgctgctgtatggaggctgagaatccctaaagtgcattctccaaattttccaaaattcctcaatttttatggaaaattccccagattttcagttgaaatcatctgaaaatttaacatgaaaatactctccaaaaaaagatttatcttgaatgaaatactatgtttgacaatttcatactaaagggatattttagggacaactaatccacccatagttaattactggtaaaatccacacagataaaattattattttctacaaggattttattccaggaagggagaacacatgaagtcatgttccatgtaggaggaggaaggatgcacactgggcctcatctgtcacttctgggctcagcattcagaatgggctcttcatgtgggtctggctttgacagagagtttgaggaggctctgtgggcagcatcttaaggagtggctagcactcctctgagcactttggggaatgcacacctataaaacagagcaatatattcttgaatgcactattaccccagtggcttgggaaaggggaaatgtcagaacgacaattacaacacacatagaatgcttactatggcctatgtatcatgccaaatgattcacatgcattatttcattccctcctcatatctacacaacttcactccaaagaacatgcacctgtgcagcttccagagtcccctgtggatacttagtctgcttggaggtgtggggagaagtaatattcttctggactaaaaactgaaagaagcagataatccagtgttttgaatctgtgtagaaatctatctcgtgcttatgacagctctgggcagtttcttacctgcagtggttccctattgcttgcaaaatcttcttgctgagatgagatgctagaatctctgcattgtggctccagtgtactttcccagaagtgtccctgattgtctcacaactgtcttctctgtgtctttttactgcagtttctaaaacaggttctgttatttctttttttttatgtttttttattttttatttttttattattatactttaagttttagggtacatgtgcacaatgtgcaggttagttacatatgtatacatgtgccatgctggtgcgctgcaccggttctgttatttcttacctgtgggtctggctaatgctgctcccttcgcccaaaatatctttccttttcgccttcccttcccacttccacccagctatggctttgatttctttcctgtccctcccagcatgtgtattctctgtccagtagcatttgctggtgctgtcttctctttagcatcgtagccatttgacttctctctgctatgaggtcatggaggaatcacgctcatctatatttcagtgcaggcttgaccagactgcctggctttgcattctgggtttgcctctcattagttacatgacctggggcaagtcgcctttgtgcctcaggtttctcatctgtaaaactgggataataacagtaccgactgcatagcgtagttaccaggaggaagtgaaataatgcatggaaatcatttagcatagaacataggccacagtacgcactctgtagatgttgttactgttattctcatagtgccttgtttgtagtacacacataatgactgtatattgatggaattgtgtggaggaagtggttattgctatattttctgtggccggaagtgaggaggcagccccagggctaatgcttgatccagaggtggggtcacaatggttagggtaagggtggtggctggggatggagaaaaggatttttttttttttttgagacagaatctcactctgtygcccaggctggagtagtacaatggcacaatctcggctcactgcaccctccgcctcccaggttcaagcaattctcctgcctcagcctcctgagtagctgggattayaggcacgcgctaccatgcccagctaatttttgtatttttagtagagacggggtttcactatgttggtcaggctgatctcaaactcctgacctcatgatccgcctgcctcagcctcccaaagtgttgggattacaggcgtgagccaccacacctggccgagaaaaggagatattttaatcacattccaatcctcacgtttgcatagtcttcgaggctcccaagtagacatgcttttctaatatctccaagcctagataaggccatgtcaccagacagcaagccactccaggcaccacaatgattataccttggtctggcctgaaccatgtttttaaatccagggacttggagctaagcctttaaactgctacagtcaggcaacatcatagatgttgtgcagggtaggtgttcaataatttttcctttgtaaacatgaatgactgcctgctatgttcggaattctgatttggggtcgaatgagagattggcatatttgaatgggccttggattggggattcagggtctgagctcttgtcacaactgtggcagatgcaaactgatcatattaattgtaactgacacttactgagtatttactaagtaacatcaagtcttttactcacattattttgtctagtttataaatttattgataggtagtattttaatcttcatttaagttacagaatcagagacttagttgcttaagctcccccagttaataagcagacctgggctttgcaattcaggcctgccctgttcggatctggaactctgagtcaccacccacacaaacctcctattcctgggtctcaatttcctcttctgtaaaataaggaggctatgcttagtgatttttaaagttctttaagggcgataccaaacaactcaagtcacatgtcttaggagcttgatggatgtgcatttgggtggcagtttagacatttgctgccttggggccattgtgaacatcagtgagatcatgtaggtgaaggtcttgtttttatttatttatttttattgaggcaggctctcactctgttacccaagctgggctgcagtgacatgatcatagctcactgcagccttgacccccaggctcaggtgatactcccacttcagcttcccaagtagctgggactacaggtgtggaccaccacactcagctgattttttttattttttgtagagacatgttctccttatgttgcccaggctggccttgaactcctgggctcaagtgatcttctcgtcttggcctcccaaagtgctaggattacatgtatgagccactgcttcagacccaaggtcttggcactcggccagcctccatgcatgccagttttcctttctttcctcttttagctgtaaattctttgattctatgatgccaaagaaacacggtaagtcagtgttaccacggtggttgktgttcactgatggttcatgaaatcagaaaagtaaggataaggaagtaaactttcaaagagataaattgattcaattttgattatctgtctatgtctactgtgaaacgactgtgataagagatagtgatttttgtttgtattttccagatgatatacatggtttataaatttaggtctcttggcccagatttttttctgaattttcactagcccataaagacaaatgcctagaaatagcagtagctgagcaggactttttaaactatgtgtggtaaaacagcaattgttttaaaattgtccaatatatcacagactgtggcttttgtaaaattaaaactaaattacttgaaaaataaattttaaaaaagcatatacagatacaagctccattttttaattatcaagatcaatgacatgaaatgattctgtcaaattgtaatgcaagtctctcaacacttaccttcaatttctgtgcttatttttctggaagctggcaaccacaggttcacagataactcttggagtatcacagagcggggaactctgccccacttggaggaaggtccacttagtaacagagcaaagttcttaacctggggtttgtagatataattctgaaagcctgtgaacttggagggggaaaatatttacatatcttttctttgctaaattctaattgaaatttagagttaggctgcaaactacagtggtgttagtagtacctatgaatttggtttcaagagaggtcacagttactttcacatcatatatttaaaacaatctcaagatattgtttacgcttatcatgtttttgaaattgcaatcgctattagacatatcgctttattgttagtatgtcattaaagaggcacaaactataatttaaaaaatattatagtaactgtgtttcaatgtaattgattttctttgtatctcagctcactacaacctccgcctcctgggttcaagtgattctcttgccgcagcctcatgagtagctgggattacaggcacgcaccgccatgcccggctaattttcgtacttttagtagagacgcggtttcaccatgttggccaggctggtcttgaactcctggcctcaggtgatctgtccacctcagcctcccaaagtgctgggattacaggcgtgagccactgcacctggcctaagaattaattctaagaggggtttataagcatgtctcagctccataagttcttcttgcccactgccctccaaaaagatcaatgagaacagcaggcattgcagtaaataaagagttgaataatcacagtgttggccaaacaagagcaggcaaaaacttctcaatcccctctccctcaggattcaaaggctaaggtttgtaaagggtactttggtgggcatggggctggggaacttgtataattgattggcagggaatgaaatcacaggagcacctaaaactgtctttgtgcarctgagtcagttcccaggaggggtgtgtgtgttggcctcaagactaggtggtgtctgttggtctactgaaatgctaacaaatatctaaaagaccagttatttaggtttcacaatagtgattgatatggttaggctttgtgtcagaacccaaatcttatcttgaattgtaatccccataatccccatgtgtcaagggagggaccaggtgggatgtgattggatcatgggggcggatccccctatgctgttctcatgatagtgggtgagttctcatgagatctgatggttttgcaaagcagttttccctgctcttgctcactctctctggcctgccgccatgttaagaagtccctgcttccccttccaccatgattgtttcctgaggccttcccacccttgcggaactgagtcaacgaaacctcttttctttataaattacccagtctcaggcatgtctttatagaagtgtgaaaacagaccaatacagtgatgttatctttggtagttggggaagttatgaattttgtgacactggttrtgtgactggggcagtaagcaacttatagaaaaacaaactaagccatggcaggacattgtttatgcctattctttagcaaagtctaagcccctaccataattccaaccttgccttatgaatgcgcctttaagctccaggcaaggagggggatcattttcccttgactccaagtttaactataaactaaatccctctcataggtttcttggcctttgtactagaataagcaaaaagccaaccaaaaaaaaaaaaaatcccctagaaaacataatttagcctgggaggttagaagcaagatggagtcagtcttgttagatttctcttatttatagttctgcaaaggcagttcaagagtcaccagactgttaaaggatttccatactgcaaacaagcttaaggacaccttaaagaagaaagaagaaaactatttttaaaacatttttaaaacaacttccttccatcacaatcatcagattgtgctactaaacgtcagtgagttcctgagagattcggagtcagtgcaagagaccagggctcttttggaatactggggtcatttattttttgctctttatcatctacaaattgtgtctgtgttctcttaccagacatacagggtgtcctcaccaccgattaaacattcagtgcctggaggggatggagtgggtcatgggagctggcttttccttccaaaagtcttaaggatgtccttcttagagcaagaccacgattactaattaactaaaaattctgatcctggaaataaaagctggccattcatttgcatttgaaagccattaacattttcttgataggtcggtaaatagttaccagatctttggttgctttggtggactgtgctcctctgcttttattgctaagccatccttcagacagagagggagcggctgcaagaggtaatgaggtatgtttgtgaaccttgtattcttttacggttacagatgtgtgtctacaagtgtgtgtgaatttgagttgatctcttttagtcaaaatgcccttgttggccgggtgcagtggctcacacttgtaatcccagcactttgggaggccgaggcgggtggatcacgagatcaggagatcgagaccatggtgaaaccccatctctactaaaaaaatacaaaaaattagccgggcatggtggcgggcgcctgtagtcccagctactcggagaggctaaggcaggagaatggcgtgaacctgggaggtagagcttgcagtgagccgagatcacgccactgcactccagcctgggtcgtagagcgatactccgtctcaaaaaaaaaaaaaaagcccttgttaatttgttaaacacaaagataaacaacaccaataataaatcaaaaattatgcacatgcatacacatggaacaaaattctcatttatctttttttcttagtgtgtgtatatttttctgaactaaggctggatctataagcctgattgtagtgaaacctgtgtgtttgtgtgtgtttctgtgtgaggtgtgatgaattatttaatacttaggttgaggtagcaggcagaaattctttcagattctggaaatgaagtgagagaaatgaataaaaggagttagaatttgggagtgagattagagcattttccctctgaaaggatttggagttgtgattgagaaaatgtaactgaagaaccaattataatcagaaaattgagaaatatatcactatgcttatgggtttggtgcctctgttgattaaatacagaataattttaggggatagtctgaggatgtgtgtaaaatattgggatgcatttatgagttggtgtgcattggtgggtaggagaggtttcctgtggaatstgggaggaggtcataaagagaaaggtagggtatctgtcctggcagtcatgtgtggagtagaatgggagtgctcgtgggaagaggagaaggtgataaattgtwgttggcccttaaacttaaaaacttaaaataaaatacttaaaataaacttaaaataaaacttaaaataaaacttaaaaaaagttggatccttactagttgccagtctagctagacacacgcaggcatttcttttctgactggttacagaggtgggaagggagagttactcttggggaaagagagagaaattgagactaatccccatgggtctccctgaaaaaggataccactaggttcttcatgcaggatctgatcagtggctttgctgggcgaggaagacctcccaatgtccaaactgtctacagtctgtgtcctggtgtgggacagtaagtgtatgtctgtaggtgtgcaaagagggggtgagatggagggggtctttggtttgttgtgctggtaggtccctgtgctaccagggaccaaatgaagtgggacactaaatttaagacagcttgttgctatttcagtcacactctcacaagatgccaatgattattttttattatcaggcattccctcacaaatacattttaatgagctaataaaattactataaaaattgttctataagcatggaatggaactagaaaagaaattttccatttaaaatttgttcaggtggcagctgtggaatgtgatgagaaatataagcctttgcacaccctgttgctgggctcaaggaggagttagctgtctcctagagatgatccttttgcagttcagatggggaaactgagacccagaggggttaagtggatttttccaaggtcatacagctggctagggtcagagctgactcttaaatctctcaccttgggtgtgaccagacttggaagaaaaaagccattcattagctaccttatcccttcccattcaccaagcagctgggaaaggatggcccaacctactaatatcgcccagcatttttgatgaatagctatggctcactggggtcctctttgcaagttgttcttagtctatctatccacaatgaatcctcttttccactagatctcatgtcttgtgttagcaaaggattttaaaagaatggcttagacctccatatacacatcaaacgctggctataatgccggaaagaggacaaatatccagtttttccaaattaatttagatagccattttaataatttgggcccccatgtggtttgtctactttgcctaaagaactataatggtaccaggacaatgagctttgacaattattcatatactaaataattcaagaagaaaaaaattctattgcttttgcgtaatgtatatatagtaataattctttttttaaattttactttaagttctggaatacatgtgcagaatgtgcaggttcgttacatgggtatacatgcgccatggtggtttgctgcacctgtcaacccatcatctaggttttaagccccacatgcattaggtatttgtcataattctctccctcccctagcccgccatcccctgacaggccctaatgtgtgatgttcccctccccatgtccatgtgttctcattgttcaacttccacttatgagtgaaaacatgtagtgtttggttttctgttcctgtgttagtttgctgagaatgatggcttccagtttcatccatgtccctgcaaaggacatgaactcatccttttttatgactgcatagtatttcatggtgtatatgtgccacattttgtttattcagtctatcattgatgggcatttgggttggttccaagtctttgctattgtaaatagtgctgcagtaaacatacgtgtgcgtgtgtctttatagtagaatgatttataatccttcgggtacataccctgtaatgggattgctgggtcaaatggtatttctagttctagatccttaaggaattgccacgctgtcttccacaatgcttgaactaatttacactcccaacagtgtaaaagcgttcatatgtatatagtaataattcttatatttcagtaagattwttttctgaccaacctaattaaaattgccacccttaccccaacattcctcatttaccccccactttttctccatatacttayacagtataacccagtgtatatttatttattttgtttattgtctcttttttctattcatgggaacataagtctcatgacggcagggatttttatctgttttgttcattgttgtgtagtcagtttttgaaagaatgcttggcacattgtaggaacttaataaataattcatgaatgaataaataaactgcaagcagatttctttcttccagagatgtagtttagataatgatgaatgatcttggcaaatgaggcacatcagtagcttcttctaggtctcccagataatttaaaacgtgctatgggccataaacttaatgtgtttttatttgataaaactataatctcacagaaagcccaagctggtgtacactgtggggcattatagcatagaatacagagtgatggttaaaagccatggctgtggagtccaaagggcaggtgttcaaattgtggctttgctccttatcagctgtatgatgacatcaggcagtttatttgacgtttctgaagcttagttttttcatctgaaagtgaggatagtagccatgattaacttgcagtcgttataaaaatggcatgtgacaaattatggaaacctcttaggatatctgctcaatcactgttaaccattattatcattagcattaaaattgcatagttatatatttgtcctataaaaaaatagtcaaagattaaggacagattgccaagtagcagttttttaaaaaacatttttaaaagcccttaaccctatttaaattatttccttttttatttgcgtcttgccatttttcctgatcttagtttttcttcaattgcatttctaattgagataggaagcttcaccatcaagagttctataatgcaggaagtaaggtcaatcagataatgctggagttttttttaaggtttaaggaaatctttctcttgtatagctagaaaatagatattattgttccatagagcaagtaaccatatttgaaaatatggagcaaaaggactattaataaacagcaaacatgtttttaaaaawatgctaatgatattttattaaaaagtcatatttacctatgcatattggttatctattgcagggtaacaaattaccttacaattttgtagtttaaaacaacaaacatttattatctcccaatttatgtaggtcagaaatatgggggtgagttagccgagtggtgctgatttagggtctctcatgaatccagccaatatgtcagccaggactgtagtcatgtgaaggcttgaataggggtagaggcttgctttcaagggacctcactcagatggctcttagcagaagacctcagttctttgctagaaatttccatagtcctgcttgaatgttatgatggcatggtaactggtttcttcaggaaatgatccaagagaaagagcaaggaggaagctgtaatgcctagtcttggaagttagatgccatcccttctccacatcctatctgttgaaagtgagtcactaagtccagctcatcctcagagggtgaggtggtggggactcgccctacctcttgaagagaggagtatcaaataatttgttaaattaaaaacacctgcygtgtgatgattttaaataacattgaattatattttacttcacgtatttactgattgctgtctctatggatatttacacttttttgctattacgtgtaatactgtgatgaaaaacctttatttgtatatacattgattcccaagtgtgtaagtgtatttaagggatgaatttctataaatgcaattgctgggtaatgggcatgagtaattttaatagtttttaccaagtcttcattgagcatagggtgtttatagtttgaccagcagtcggtgggtgtttcttcatagtgtctaacatagtgtgttaataaacacttggaaaaaaattaaatatttttataaaaagcaatctcacatcttacaactattagcatctaccaaagaggaggcatggtcacttggatagacattctaactcctcttcttatcagtgaacataagattactctttgctttattagttaatttaattataccaggcatgagagattattaatctttatggaatttaacaagcaagtttaattttataggatttcttatgaagctctttggaatgtgagatagtggtgacagtcatggtaagaaagactagaattggagtaatttattctagaaaacacaaggcaatccttgctgtagagaaaggttgctttcacagctccatttccttttgcatagtaagagggcattacgttgactaacagcagtttcttatcagtgtatgagaagtaagtcctcttattcaaccaatccttggataaatgactaaggatggctgcttcctactgaagagaatgtgggaggaaacattgattgggtggagaatgagaccgcaaggaaatatcaaacaattcctaaattagggagtcatgaattaagacctcacaggagaagaagggtgatgttctttttgagtaaagagagtatgatttacaaggcagcctgggaaagcaagcrttggtgggttggtggagaaagtaggccttgtataggcaagactgtagctatggctcctcttcctggctttctgcacctatgtcccaggcaatgcatgagtcatccaacacacggggccataaagcacttaatgaaggtcataccagagcaagccaaccrggacagcaatcagcattgttcatcagctgctccaccagaacaccaagtcgggtgtggtgacacactcagggaaagtgggactgacatattttgtaggaacattctgtttcttacccaggacccattacctgtcttctctttggtaaataatgagacctgtgctttatgacttagaatatttttatttgatttccacaataagaaggtggcaatagataataataacaaaagaaattgtagtttcattttacagataagaaaattgagactcaagagtattacataaattgtttcagctaccacagcaaaaaatggtatggttgggaatcaagctcagggattctcatgctctatttagcaccaccttctcttctgagaagaacttggggatagaataaaaaaataagacactaatgaaatgtttagcacatgtgtcttttgtgaaagggagaaatagagtaktgtgagatttctgtgactcacttgaaaatgacttttaaaaactaatatagaagccaacatcaccctgataccaaagacaaagacacaacaaaagaataaaactacagaccaatatcccttattaacatagrttcaaaaattcttgacaaaatactaacaaactgaatccaacagcatgtggaaaagataataacaccatgattagtgagttttattacagatatgcaaggatgattcaacatgcacaattccataaatgtgattcatcacacaaacagaattaaaaacaaaacccatatgatcatatcaatagatgcacaaaaagtatttgataaaatccagcattccttcataaaaaaaaacccttaaaaaccttggcgtagggagaccatacctcaaaataatgaaagccatatatgaaaaacccatagccaaaatcatactgaacagggaaaagttcagtacgattgaaagcattccccctaaatggagaaaagacaaggatgcccattgtcaccactcatattcaatatagtactgggagtcctagctgcagcagtcaggcaatagaagaaaataacaggcatccaaactggaaaaaaggaagtcaaattacctctgttcactgatggtataatcttatacctaggaaactctaaacccttcaaaagactcctagatttaataaatgacttcagtaaagtttcaggacacaaaattaatgtacaaaaattagtagcatttccatacaccartaacaatcaggctgagaaccaaatcaagaactcaatcccatttacaataaaataaaataaaataaaatacctagtaatacatttgaccaaggaggtcaaggatctctacagacaactataaaacactgatgaaagaaattgtagatgacacaaattggaaaacatcccatgttcaaggattggaggaatcagtatcatcaaaatgaccatactgcccaaagcaatctacagattcagtgcaattgttatcaaattaccaatattattcttcacaggtttagaaaaaacaatcctaaaattcatatggaaccctgaaagagtgtaagtagcccaagtaatccaaagcaaaaagaataaagctggaggtatcacattacctgacttcaaattactctaaaagactatagtaatgcaaacagcacagtactggtatagaaatagacatataaatcggtagaaaagaatagagaactcagaaacatagccaaatacctacaatcaactgattcttgacaaaaatatgcactggtgaaaggactccctattcaataaatggtactgggaaaactgggatgtcatatgcagaagaatgaaatctctcaccatgtacaaaaattaactcaagatggatttaaggcttaaatgtaagacctgaaactataaaattactagaagaaaaatctaggaaacactctctggacattggcctaggcaaagaatttatgaccaagtcctcaaaagaaaccacaacagaaacaaaatcagacaaaaggggacttaattaaactaaaaagcttctgcacagtaaaaaaatraaatagagtaaacagacaaccaacagaatgggttaaaatattygcaaacagtgtatctgacaaagggctaagatccagaatctataaggaactcaacaggaaaaaaaacacataaccccattaaaaagtgggcaaaggacatgaacaggtatttttccaaaaaaaaggcatacaagtggccaaaaaacatgaaaaaatgctcaacatcactaatcatcagagaaatgcaaattaaaaccacaaatgagatgatatcttacactggtcagaatggctattattgaaaagtcaaaaaacaacacatattggggaggatgcagaaaaaaggaaatgctgatacagttttagtgaggatgtaaattagtacaatctctatagaaaatggtatggagatttctcaaggaactaaaattagaactacccttcaatccagcaattccactactgagtatctacacataaaaaaataaattgttttatcaagaagacacctgcaattgtatttttattgcagcagtgttcacaatagtaaagtcatgaaatcaatccaagtgttcatcaacagatgattggattaaaaatgtagtgtacctatatgccatggaatactactcatccataaaaaacaatgaaatcatattttttagcaacatggatagacctggaggctattttttctgcgtgaaatgacccagaaacagaaagtaraaaactgcatgttctcacttatacacgagagataaacagtgagtatatatggacatacagagtcatagacactagagactccaaaaggagaaagggttaggggggaggtgaaatactacctattgggtacaatgtacactatttgggtgattggtacactaaaagcccagtcttcaccactatgcatatacatccatgtaacataattgcatttgtactcctaaatctataaaaattaaaatcagtacaaaatatttttaaaaagtgaaaaaaatgctggtaggaatatcatagatcttctagttcaatttatttcctttgtaaatgagaaaactgagaatgagaaagcttaagtaaattttccaaggtagtctagctggttattttcagaatgaagattgcaaaaaagagaattaactagatttaaagtctcctggaagatgctatatcatctatgtaccattcttgctaaaaaatcaaacttaaatctgataaaaactctaaagctaataattaatttacaggaactataagggtagagaaacatgttagcatgcatagagatgtaatcaacaaaattcagattgcaggaaaaatctacagaacaaattctgtttattaaaaaatacataacagatataaaccaattacaagagataaatcttacttgcatcctcaggagagcagaacaaattataaaartttatcagacaatgaaagaaattttraaattcactagatatttgatgacagtaaattattataaacatatattaggtatgataatattttgccttttgcaaaatttcttatcttttaaagaaacatactatttttagattaaaagacatgagayctgagatttgtttcaaagtaattcaggggtagggagaaaagtggaccagaataaggacagaatgaattggccatgagctgataattttttaatttagataatggatgcttgggaggcttgttatagtattcattgcatacatttgagcttttccattaaaaatcttactagttatatagtaaatcaaattcaaatctaaaattgttttctcttacattttagagatggcaagaaagaagctgaaaaaatttactactttggagattgtgctcagtgttcttctgcttgtgttgtttrtcatcagtattgttctaattgtgcttttagccaaagagtcactgaaatcaacaggtaagaagtaactctggggctctctccatatgttgtttttattagagcaaaccttcawcaatgtcaggaaagtaatgctttcmtgctcatgtgtgtatgtgtttgttgcgggggctgttatatgtgtgtgttctatgtgttttggacagctcagtagatattcattgtaggtttaagttctgatactttgatttatcaattaatgcattgcagaattccataattgactttttaaaaatatttgccaaatttccttaaataagtctaattctgctaagaatgataattaacaatacccttatgtgaaaggcaagcgagtatatgagagacttcaagcagtttgtggaaaaatagaaatatagaaataaaaagaaagctagaaagataaaaataaaaaaaactttatttctcagtgtaaactccatcaagttcaagacacttttgtaaaagatgataccagccatttagtccatccataagaamtgagggtcctgggaatttaacctttgtaatgcagtcttttttacattattaactgaaaaaaatgaatgccctttatagatttttttttaagattaggaaactaaaagaagtcaaaaggagccaaataggaaccataaggtggatttcccatcaaaactcttgcaaaattgcccttgtttgatgatgaaattagcaggagctttgtggtggtggagaaggactctccgtgaagctttcccgggcatttttctgctaaagctttggcaaactttctcaaagcactctcatgatgagcagatgttactgctctttggccctccagaaagtcaacaaggaaaatgccttgagtatcccaaaaaaccgttatgtgacctttgctcttgactggtctgcttttgctgtgactgggccactttcccctcttgggagccattgctttgtgctttgtcttaaggctcatactggtaaagccatgttccatcacctgctacaactcttggaagaaatatttcagaatcttgatccccacttgtttaaaatttctgtttaaggttctgctcttgtttgcagctgatgtgggtgcaacaattttggtacccgtagagcagaaagtgtgctcaactttcatttttcagtcagaactatataagctgaaccaattgagacatctgtggttttgactattgtttctggtgttatttgtcagtcctcttcattagggcatgaaaaaattaatttttatcttcacaaatggatgtggatggtctgctgctgtgcgcttcatcttcaatattgtattggcccttcttaaaataagttattcctttgtaaactgctgatttctttggggcattgtccccataaactttttgtgagtatcagtgatttcaccatttttccacccaagcttcaccgtgagtttgatgtttgttcttgtttcaattttagcagaatttatgttgctctgataggtgctcttttcaaattgatgtcttatctttcctagtgcctcaagctaagtcctgttcagacatgttgtaacaatctactttgagtttattttagtaccaaaaatatwtgaaatttatacatagttttttcataatacatatttttcatggactttctgaagaccctcatctaatcaaactttttttgtttattgaatttttatatcctcaaaaggagctggattatgctgaattatccatggtttcttatctgattcatctaggatcaacttcctaggagaaccaggcaatcaagtgttaacctgtggcttctctgcccctcctaccccatcccttgttacaacaatatctactttttgtagaaaaaagtcccaaagattgctcaactcttaaaattatgtgattctaaagatgtaactaaaaccattatgcagacattggcacaatttgaatttgaaacccccaatgaaaagaaaaccaatcaaaagacactgttttgtcttaatgtcattattaatttattgcagaataccttcaagaaagctcacctccttattttaggatacaataaaaataccttttctaatttactgatttttaaatctgaattcaaagttcwctagcccttaggtaagtcctagctgtcagtttttagagtggtggcctccctttacatcttttgtcatataggactttgtatttacagaagaatggcattgctcagaagcattctttgacttggggattggctgttgactgagcaagcaaagctgaggttactataattaggatgacacttgtactgcacatgttctgtgtgcccttgctgctggggttggaagtaaagaatcagatcagaggtcttcagactttactgtaaaggaccagatagtaaatattttagattttgtgggccatacagactctgccataatgacttaattttgccctagtagcacaaagcagctaaaaacaaacgagtttgtaatgtgtataatatgtaatgtgcatgtgtgtaatgttccagtaatactttgtttgtaaaacaggctttgacttaatttggcctgaaggccatagttactgacccctagactaaaggaagggtggtccccaccttcatgagcttctagtctaaaggcggagtccttgctcttatacatactatcttgtaggggagggagttgggagtagaaggagatgatatagagatacacaaaggtaaatacagtcagcaggaacaaagtgacattttataaagtgaatgcataaattttgaggtcatcagagtgaagcctactcagtagtggagttaattggaggtgttgagaactattgaatgtctgtgaaattaaatttgtctaatggtctttttatgtttgcttttggtatagccccagatcctgggacaactggtaccccagatcctgggacaactggtaccccagatcctggaacaactggtaccacacatgctaggacaacgggtcccccagatcctggaacaactggtaccactcctgtttctgctgaatgtccagtggtaaatgaattggaacgaattaattgcatccctgaccagccgccaacaaaggtttgagttatgaattttgtttccattttagaatttatgcaacttgatagtttatttttttttgttgttttgttttggttttctttattagtgactctcaagagaggtgtttatgttgcmgccattagtggctcaggcaaattaacctgtgtccatgcttgtatgacagtgcagcttcaggaaaggaagacctggaaaattcccttgggttgccagattcagcaaataaaagtgcggttgcccagccaaattcaaatttcagaaaaacaatgaataagcttttagtataagtgtgtcccgtgaaagattttgggcttacttactaaaaacgtatttgtcttttatatggcaacactacatgattactagttctttctgactctgttcatgccctgtatgtctctcctcctttcagaatttccaaagctcatctagaatctgcagtaaaaattcacaaaacattatttaaaataagggcaaagtttcaagagctctgttttggaaggaagaaggtaatgaataccagattaaagacagtgcagacatctgggcatttaccttagcccagtgtttctagattatcggctgaagtccacctgattatgatgattataaagtacttgcccacaccctatgtttgatgtgccaaatttacagaaagttgatgcacatgcatttactttccctgtcatattgtgcragttactcaatagctcaattgagctgtactcaatagctcactcaagctgtactcaatagctcactcattacttggaagctcacctagattatcacattctcagtatgtcacactactgcaacactccatcttgtcactgggtattggtgcacttcagatacagccatagtaatgtttctttggtgctttattgtaagatcttttgataaatactgtggtatcaagattgaagttcaataaatgaactttggcttttctacatgtcatatctaactgaattactccacggccttggcgtttattaattggcattctccttttttgctcagccagagagaaatactggcactttcaatgattcattttcttgtagaagatacatcttagaacttttgttgtatgttttctgaatcctgagagcggtatgctgatccagattgttgttgagagctgaggctatggataatgatgtgtttgtatggtgttcayattaaagggaatgtagctgaaagaggatggtgggaagaagttatgaacacaacagataggctaggcagaatgttctggtgtcgaaaccattgctatataattttatcattcttatcatctgtcctccaagattatatgtaaaagaactaaaagaataactttctctgcagatgattcttggttgtaaataccattgtttgattctcccagttatgagagggaatccttttccagtacaggaggaagtactgtatcaagccaccctgacaccctgagtactcttgggagactcttctttggagagaatggactctaggagtccccttcatggatcttagaaaaaaagatcactcgattatctaactctagttcggatctttagttctgggcttgaagctggttggagggcatcttcactgaattccttcctatcatatcagctgaactcgttacctcctcaccaaatctgcttttccttctcagctaccagatttctgctagtagttctattaagcttctagttcttgagacagaaacagcagaacttctgcttggctcatcccttctatccctttggccagtattccatgtattttaaaatattttccttaacaataatttccagaagaggcatttcatttccattcttgcagccatccctagatcatcatttcctcatgcttgggttgctccaggtgccccttggcatcccttctgaattccatttctcctatccattccgttacatgtgggattagaatttctcttttttacatccaacttttgttattatttctacccaacttcagtacatatagtggtttattactgtacgttgagccaagttcaaacactgtcttctatcatctaagaccctacctctgtgcctctataggttcacttaggctatacttytatgcagattttaaagacaactgtctacacttattccaaacctttgaattstaaaatcctttccactttcttgatgaagtcttttatccccaattccagaacgcagagttgaaagatcccattgatggcagggagcaggaatatttcatcaaattccagatatccagcttaggaaagaaatgatagttaatacttttaaatcctttgatttttcagggctataaagcactgtgtaaacatgggagggcaggttacrtgcttaaagataaacccgcatgccctaagtaaaygtwgcagagtaattaagctgagagaaattcacagttgatttccaaggataacaataacataagtggtaatctcaataatttgagaggttaccatatttcttaaacagaagctttgtcatcttttacagcgaacacacttggtaattgtctatgtattactcatttatttggcttatgatatccttttccaaattccagtttattatcaatatgttggggatcatgttttatgatatagcagcaagggtattgcattttgccaagatcattgtgagtcttcacctttaaattactctgtgtttacacaacatcagttaatagccattatatggtgctaggaagagcagtgagcccagataaaaacttaaagtcttaaaagacttaagtttatgtttggcaccttgaaatrataatgtagccattggtcaagtgaaaggatgtaaggggagccaggttattgagttactcagtcctggctttgcttctggaaagctctttgacttgatcagtaagtcacattttcttataaactgtgaaatccttctaagtaaaatgagacagtatgtgttcagctaaacatactcattaaacgttcgattaaatgactattgaacactatactaacctcaaaatattttagaatagtgatctctaaggttctggcaaatgtttctctgaatattcaccacagtctgatttgggggactagaaagactggattatgggaatggcagaggtggcaactttgttttaaaaagtctttgctgttagacttcactttgaggttaaatgaagtggccagcctaacaagctaaatttcaaaacctgactcaagatgcacatattataaaatagcctacatttaagatatttcacagagtcgagactaattttattcattcgttagttcaaacttgctgcacataaaaacagctagagaacattttgatgaatagagggtgatttgaaattcctttatcatcaagtgctttcaacttctaaaattcctgctctatttgaagatgggatactttgtctcattctactcattttcttcatgtggagactttctggttccaccttttttgttcacaacatcaggttcttttgtgctgctataacataatgcccaagactgagtaatttatcaaacacagaaatttacttatcatagttatggatggagactagaaagaacaagrccaaggtgctggcatcttgtgaggaccttcttgctgcatcctcacatggcagcacgtagacagcaagagacagcccactgtctcctttataagggcacctaattccctttgtctgggaggaggcttcatggcctaatcacctcttaaaggccccactgttaatactaacatactggcaacacgtgaattttggagggggcacattccagccaaagcaccagtctaactgaaattgctctaagtcttctattttcttagacttctgttttcttagggcaagcttctccatttgtctactgaattacaaactatccaaacttagtggtttgcagcaacaattgttttattatatgtagtgattttgtragtcagagattctgccagggtttggctgaatggttctgttccacatagcatttactgggattacatgatatggtggtatttagttggtggctgatcttgtctggaggtttcaagatgactttactcacatacctggtaccttggtgaaaatggtggtaagactgactgcaccctcttcccctccatgtagtcacggagtctctcttggtactctctccagcagggtagctgaacttcttacatggtggctcagtgctgcaagagacagaggcaaaagcttccagttctcttaaataccacacctaaaccagcatagtatcacttttgatgcattttgttgatcagatcagtctcagggcggcccagcttcaacaggaacagcgacagactccacctcttgacacaaagtgtgttaagagaacttgatggccattttaaacaactgcagaggaatgcttattttttttttcagagtagcataaaggctgctgttaatggtgaaggctgtggtgacctggacaatacagatcagagcaggatggggtggcacaggttagaggagtcagcactgggaatagggtgggtggcagagttgagtgactgaggtctaatgcgaattgtgaggagctcctcctgttccctccagtggcaggaaatggttgatgccactgactcactcaagctgactctgcctcagtctgggatcatgtccttttaaccagcttgcatttgtccttgcaactttgccctctttctttcctgaatgctgtagttgctgaagttttgattttctttttktttaaatcttagatctgctgtttcctaatgccctaatggtttatgcatttcaaggcgcctgtaatcttatcagtaaattattttcaccccatattgtggaaagacatagggaattactttcgagaaagtttctagttgataattgatttcacctttagaataggcttttgagaatagggtggcaatttctcttttttatacaaaaatatgtgagaaagtatttttaaaactaaaaggcccacatgcttactacagaaaatgtgttaggagagaaagtctgtgacagattcctttaggttttttctggttcttctctctacccattacactggtcagcccacaagcacctggggcttctctgttttcctgtaacagtaggaatcatggattatcatttagtggttttcattttactactttctgtttgcttctctttttctctatttcctaggctctgtcccagaaattctgatttaattcttaaggagtggatcccaggcctgcttatttttgtaatttgccaggtgatccaaatgtgcagctaagattaataaccattggtctagagcagcagttttccaacattgttctgtattagcatcacgtagagagctaataaaatccttagcactccagcttcagtgaaggaggataaggcctgagcttttatacttttcctgaattttccaggtgattctgacagggaccatagtttgagaatatagtaaaatgtgtttgacacaatgtgcaaagttgtacatttttcagcagttctgtaggtcgttatgttggaagggactttggcaaaatatggaatgttttcagtctstgtttttatattgttaggcatgattattatagtcttcttggtaatccagtatatgaaagcttgaaaaataatgacacgtttgggacttgataaaagatagggagttgagaaaataggcagttctatattattttctattatttattttcacaatggttttgattttttctatatarcgttaacttctttgaaataattattcataaatatttaagatatacaaaaatatataaccattatccagcttaagaaataaaatattatcagcagagatgaagtcccccacgcatatcccttctgtattattaccttttcctccatcctctttagaagtaaccacacttttgaaattgatatttaccatgcattcctttcaacctttactacctctatatatacttgtaaataatagatatatacagcctataaacaaaatgcatttttgtttatgcgcttaacattgtgagatttaactatgttgatagatatctctagttcatttattttgctataaaactggtacacaattgtataaaattatgtcaattttatggcaaaaataaatcaaaatcattctacagtaaaaaaagtttttcttcaatatattgaagttacatcagtcccattctgaatatttttgtaagtttttttttacttgcatctgtgtgattttagatatatatcttaagtttactagacattatcaaattgatctccaaagtggctgtgccgatttaccatctcactgtcattttctgtatcttctttggaattgacagtcttttaaagttttgccatttgaggattataaaatagtgttctgttgtggtttcagtgctaatttttctgaatactaatattggtgaacatctctcatttagttcttttctgtgaatttttctgtcttgcccgattttatattgagatgtttatcttcttgatgtgtacagtcttcccgtttgttcattcatgtgattctggattcttattcttatcatatatgttgcaaatatttactgttaagaggctttgctcatctattttatactgtcttgatgaacaaaagttttacattttaatagagtcaagcctatcaacaattgtgacttatgttttgataactatgtattcccatattacattgtatctcaaaaacaattccaggaagactaaaagcctaaaggcaaaaaacaaaaagttatagatttaagaagagaaaaaaagaatctaatataataataattgagttattcattctattttttctataaattttcttgaatttctaccgagacaatattttgtctggaagtaatggatgatttggcttcattgttttcagtcttgtacatttttctttcttgtcctcttgaattgttagaacctccaatatatttttaaattataagcaatcatagtgatggatcacttaggtttttttttctgattttaaaaggaatccttttaatatgttaccatttagtaagatacttgttgtacagttttggtggatatccatgatcaaactaaggaagttgcttttcattccaagtttgctaaaaattttattatgatagctgatgaattcaaatgattatatggtatactttttaaaatgagttttttttwatgaatcacacaagtagattttctattattaaaggatctccttatttctggaggaaacaccacttggttattattcgtttaatatgtactgatttctgttattaatcctttgtgtgctttttcttttaggcttttgcatttatgttcatggataagactcggctgtagttatcctttatgtttcatgtttgcttttgacataaagtactttctttgtttcttcccttctctctcttttaagtgttaagaagcattgggaattggaggaggagaggattggggtagagcagagcttgattgactcttaagcagtgtcttcagtatctggcttgtctctatctctgaattctattcactactcctcttcgtgttggcgaaagagcctgtatagctattatataaaaagtaacrtatctttccatcctttatgtacattatccatcaattactctgggtgttcttaaaatattctgttatgtactatctcccttaattttaccttgtgattctttaaacttttcttgtatatattttgagtctttattattaggtatatatccagttttagctgtaatatcttgaaactttaatcatcatgtactgactctatgtctctctaataatgaatttttacttaaagtctatttgcctgatattagtatggcttttattttattttattgttttgagatggagtgccactctgtcacccaggctggagtgcagtggcacaatctcggctcgctgcaacctctgcctcctgggttcaagtgagtctcctgcttcagcctcctgagtagctgggactacagccatgaaccaccacagccagctaatttttgtatttttagtagagacggggtttcaccatgttggccaggctggtctcaaactcctgacctcgagtgatctgcctgcctcccaaagtgctgggattacaggcgagagccactgcacccagctggcattctttttacatatttgttttcccctttactttcagggcttttgtgagctttagtttaggatgtgtaaactataagaaacatttagttggacttacttctttaaatgtaatctgactatctttgtcttttaaatatttaaaccatgtgatagttgacatgacacattctttctaaggtctcattttgtgccttctcttcatcctgtttatgtgctagtccccacccctactccttcataaacatgtcttttttcttaattttttggatcgaggatttccacactccccacaactctaacaattttccttcagtactgttttggtagttacacattctatattattttggcagtttctcttaaatttttaattctcatatccaacttaaaggggcattttgtgtcctgggcctaattctttttgtgtgccctaattctattcatgccatcattttctgtagtttctttctaaatctattttcctaggttttacatagtttgctttgtcttattatgtgggtcttgcaccatgtctyttcccacttcttgcaatggctcagctctactgtagaagctggcatttttgagttggccaacaaagactgtttgcattccttgctcttttggccactctgatctttgtcctttccagtttaatggaaaaattattaaactctgggctgtatacaaaaaccatcatgcttaacacccttttcaacacttttttttctttttatgctgaggtttcctctgagtgggttttacaagaacaaagacaaaaccgtggattgaggttgagttcacagtgacacctgatcttacggcagtataaaccacatatggacatcgttgtttatccctcatattggctattagtgtaaaaaatagcatttaattaaatttcattatttgtataactaagcaaaacatttttctgaccatttgcaaggctgtattctcctgaaaatgtgcttagagatactcaacccagagtatagaaaaaaaagaaatggatagtaagagaaccaagttttgttcttgccttctcaatagctgagtaacctttggcaggtcactttacctcggagaagctttaccaccatgggccaaaggtaattcatctgtaaaatgatctggtaggatgtattagttatctattgctgtgtaataaattattccaaaatttaatggcctaatatgacaaatattttctcacagcttctgtagtcagacatctgaccttggcttagctaggtgcctctggctcagtgtctcttggaaggctgcagtcaaagtgtcttccaggactatgggatgatcgttttcaagctcactcatgcaattgttggtaggattcagctcttcaggtgttgttggattgagagcctcagttcattgctggctgctagctggagacctccctcagttccttaccatgtgagcccctccacagtgtgacaacttgcctctcccagaatgaggactccaacagagaaggtgaaagagagcaagcaagacagaaacttcaatctttctgtgatctaatcttgaaagcagcgtctcattgttttctcttgtttctattacttgcaaatcacttgattcagcatgcactcaagaggagagagttctttgtccttttttgtatttaacttggttgcttctcccaaattagttggtgtgagaaagaaactatcttcattttggcttctacttgattcagtcattaattatgttagaaggcacacacctttcttaagtaagaatctatttgggtgtcaagaaagactactttctgcctctggaggagttgagagactgtaaacatgtcatatatctcacatatgtataatccatataaatgtaaggcatatatttaaaagtcaaaacaacattagtttgatttgaaagcttcagaatacagatgattgcaaagtcttattttcatttttaaaagtcaaagccgatataaatgaagctccatttgtaattttggattactggtgatatagctatattattgtttagactatttaaatatatttatgagtttttttttttgtgataaaagttatagaatgcattttgcttcccatactgttacataagaaggacactggtcagaaaaattggttgtgggtagaaactctgccattgcttggtatatggcacaatttatctaaatgtcagtttccttatttgtaaaatgaaattattcataccagagtctcaaattagatgtttcgtgctttataaatgatyrtgttctacaactaaatggagcttctttgactaacctcttgtttcaggccacatgtgaccaacgtggctgttgctggaatccccagggagctgtaagtgttccctggtgctactattccaagaatcatagctaccatgtagagggcaaccttgtcaacacaaatgcaggtaagccagagtctgccatgatgcaggaggtccagaccctctggaggttgactctgtatcccccaggggcagcctgcagagttctgctctgtggggccatataaccacatgtgacagaaggtgggcattgctcttaatcgaggactagaatctatgtgggcaccaaggaaaaattattctctgccttgggagttgagagaccatgtcctctttccaacttccccatttatggaccttcatgactgcaataatcattgatcatttttgttttcaagtttatcccttttaaagtgggggatttgaaattggtaacctctcagactacttccaactgtaattttatgttatttttatgaaatggaagtaattccaattttataaacatgttatgaaagttactagtcaatataagtgttcatggagtgaatagcccctcttcttcctcctactctaaaatgcaaagcataggccaggcacagtggctcatgcctgtaatcacagcactttgggaggccgaggtggatagatcacctgagctcaggagtttgagactagcttggccaacatggcgaaaccccatctctactaaaaatataaaaattagccaggtgtagtggcatgtgcctgtagtcccagctactcaggaggctgagccaggagaatcgcctgaacccaggaggcagaggttgcagtgagctgagattgtgccacttcgctccagcctgggtgacagagcgagactccgtctcaaaaaaaaaaaaaaatgcagagtataatgatgacaatgatgaccattctaggggatagcagaaggtgacactttagggaggctctcggtataaaggaggaggcatgttcccctttcagatgctcttggcctgatggactgttgcaatgaggtctcaactctcacctggtttaccatttaattagggagatggcatcaatggatataatcacctgtaatgcaatatgaaaataactgagaaggaattatgtatatgtatgtcaggtctgagaatgtaaagggtatctaattaataccgaatgactgatgggcctgtggaatgagtgttaggcttattgggggaggttttcaatcagattttgtagaagagagacatagatttttataaaatgtaatgatgatatctagctccagaatctgccatagatagtatgtgcgtatgatggggtatatatctgtcttttcccttcttttgagaaataaagatttttcatcaatccctttgacatgtatcctaatatatatatatatatatwwtttttttttttttgagaaggagcctcactctgtcatgcaggctggagctgtggtgcgatctcagctcactgcaaccyccacctctggggttgaagcaattctcctgcctacaaagtagctgggattacaggcatgcaccaccatacccggctaatttttgtatttttagtagagatggggtttcaccacgttggtcaggctggtctcgaattcctgaccttgtgatccacctgcctyggcctcccaaagtgctgggattacaggtgtgaaccactgcacccagccccgtgtatcataatttttatgtagctattatttgagaatttgcagagtcaactatgaaaaccttttttttctcctatgttaggattcacagcccggttgaaaaatctgccttcttcaccagtgtttggaagcaatgttgacaatgttcttctcacagcagaatatcagacatctaatcgtttccactttaaggttgtaatttgtttatttttttttaagtttttttgagagacttttattccctatcggatgagtgcagttactacaaaatagaaaattttgctactggatgtatttttctatattgctattattaattagcacctgtatgttaaagacatatacagaatagcttcctttactgtaataacttcctgaatatgtattacagtttactagtgagtttggctttcattcatttactctagataacatgtggaatatggtaggaagataaaataaggaagtatcacagctttcaatccatctctgcagatgtgctctgtatgtctctacctaaagactaacttatgcccaaaggtgaaccatttgagtttggtaacataatgagtacatctacctaagatatgaggtcagtttgatcagtgcctgattccagtatcctaagtagggatattgggaagctctgacaagtttttattttggctttccttctatttctatctctgcacagttgactgaccaaaccaataacaggtttgaagtgccccacgaacaygtgcagtccttcagtggaaatgctgctgcttctttgacctaccaagttgaaatctccagacagccatttagcatcaaagtgaccagaagaagcaacaatcgtgttttgtaagttttggaaacctatctaaggatcagagtaggaaggttacagggaggtctgtaagcatgaagaagggggtgtttcaacaatattcctgaaggttgtgrgcccattattggtgaccagaacctttaccttctaaagtatacatttttttctggctttctttctctttcctctgtttgcacaatcatttttttctctttatttttccctktatttccctccgtctataatatataaccagctgtccaccagtaaatatttactgaacatctcctatcgtaagtatagtgttctggtcatgtagtaggctgtctggtctgggagactaatgcaagaaatttgcacatggtccctttcttcaaggagtccttatctcttgttttccatagaaaaatgtcacaggagggcaaatgggactgaatgaatgggggctattgagtcactgagatataaaggacgcttttctaagcacttacgttctctccaccctgcttgctcacccatccttgtgttctccacctgtgtctaggtttgactcgagcattgggcccctactgtttgctgaccagttcttgcagctctccactcgactgcctagcactaacgtgtatggcctgggagagcatgtgcaccagcagtatcggcatgatatgaattggaagacctggcccatatttaacagagacacaactcccaatggagtaagctttcaaatgggcccctttccactgaatatcatagtctcattcttaaaggtcacctctagtattacagtgtagtgtttaagagttagagtctagagtgagactacctggctttgaattctagtcttgctattcaccagttacgtggttctgggtgttacctacctctctgtcttcagtttcttatctataaaatggaagtaatatctcaatagggttgtggtgaggatgaaatgaacagatacatgtaatgtatctagaagaatggctgccagaaagaaggtactcaataaatgccaactccttcatattttcctaaccagatatggagaagatattattaatatctgtactctcaacaacagttgattgtgatctccatatttttaggttcacctttaatcactgactcaccaggtttatcatcacaataggataaagtctcagctaaaacaatcattttttgtataaagaatgattgtggtagtgaaagaatagacagagttttgttgttattgttttattttatttccactttgttttgactgctaaaatttgaagtaacattgttttctggatttggcaatactctgttgttcagggcctttctttttcttttcttcttctctctttgtttgagatggggtctcactgtcacccaggctgaagtacagtggcacaaccatgactcactttagcctcaacctctctgggctcaggtaaccctcgtacctcagtgtctggagtagctgagactaaaggtgcgtgtcaccatgcctggccaaatttttgtattttttttgtagagactgtgtttcgccatgttgttcaggctgatctcaaactcctggactcaagcaatcctctggccttggtctcccgtaagtgctgggattacaaatgtgagccactgtgcccagctgggctttcttgactaagcagaattaatggatggaagaaaggagattacagcaataatttattagtcatatatatatatatatacacacacacacacatacatgtttgtgtatatatatctatttagccatagagtctagaaaatataataatttcttgttagaaaaaaccaaggcccagcgaagccaaattaatagctcaaggcaaaagggtttgtaagaacaagaatggcctgaacccgggaggtggaccttgcaatgagccgagatcgcgccactgcactccagcctgggtgacagagcgagactctgtctcaaaaaaaaagaggttgtaagaacagaggaagaatctaatccctactctgtgtaatttttaagcccaggctctgtactgtacatatgcctatcagaaaagcagaaaagctgttaagtcagagcagcttacctaggaatagttggtgacagttgtttcattaaggagcctcagatccttgcttctcaaagtgtgtatgtggcaggggaaccaccctctgagagaggtgggctttcagtcccttcttccatctattgaattaaaatctgcatttagggctgggagcagtggctcacgtctgtaatcccaacagtttgggaggccaaggcgtgtggatcatttgaggtcaggagttcaagatcaacctggtgaaaccctgtctctactaaaaatacaaaaaattagctgggcatggtggtggcgggtgcctgtagtcccagctacttgggaggctgaggcaggagaatggcatgaacccaggaggcagagcttgcagtgaaccgagattgagccgctgcactccagcctgggtgacagagtgagactccatctcaaaaaaataaaataaaataaaaaccgaaacaaaaattagccaggcggtagtggcacacgcctgtaatcctagctactcaggaggctgaggcaggagaattgcttgagcctgggaggtggaggttaccgtgagccaagatcacactactgcactccagtctgggcgacagagtgagaccctgtctggaaaaaaaaaaaaaaaaatctgcatttractaaaatgcccatgtagtttgcagatacaccaaattttgagaaacacttttccagagcaatagttatcaaatgtgactacatgttgaagttacctggggaagttaaaaaataacagccatgtctgcttctacctctagggattctgttttaattggtctggggtgcagtctaggttgagaactcctgttctggagtctcaaagacaagcctagactagagctccatctagttacctgattcatattaaagcatattgatggagcttttgctgatgaggttaagtcaggttaagacaggcctctttgagagggcagtttttctgaattacattttaaaaattcctatcctcttaccttctaaaaaatatcacagccttcacattccttctagatgaatgataatagctggctcattctgtaagaaaacatgagttcacttggttaacatcaactagatatagaccccatcttttaaaaatgtgtctttatgaccctgaatgtcctgtcaattagttgcatgattaagactgatttcctaaaccaaccccacagtgtgrtgctgagacttcttagtkgtaaattttggtttttaattmtctttctgcagaayggaactaatttgtatggtgcgcagacattcttcttgtgccttgaagatgctagtggattgtcctttggggtgtttctgatgaacagcaatgccatgggtaaaggaatattcatggaaaaaacargcacaagagtgattttcagtccctttcttacagcactatgataaaaggaatggatccctttaagagtgactgagccatagtgtagggagggccttatagattctctaattgtgctatccctacttcattacctattgatccatggtagccatgagtaggggattttctccaacttatgattttcctgaatctggtggcctctgttggaatattttctattatcaagttaaggagctcacccttccctataatttactctgagatagtttccaccaatgtgttcttctccgtcttcagccctgtagtcagtagatcccagtggcaatgaattgccayaggggaagagaagatgtatcagaatctcccaggattgatggtgggcatagggtattgatccataccttttcttaattgagagtcatcgattcaatcagtgctcctcaaagtgtggtccctgaatgggtcacagactgtttcaggtctatagtaagatgagtatagaaatggcgagtaagcaatgctgtagcctccacacrcacacatgaacctttttctagtaattaattttcatattattttatgaaaatatcagcttgcagtgaaatggaaattaaacaaaataaagatctgattctccaccacagatatccgagaagcactctaaatgatctaacatgattctaggacatctaagagatgaatctaagacgattctaatagaatcttagatggtcctaaggtacttaaaataccaaataacctaagaatagactgagataatataatagaaagactgtacagttttagataggtgaaaggaaccagaaaataagatgagtcagacttagtgggaaaggccacaagatcctagatactctgtatgagttgttcctatgaccaaagagtacattgcaatatttcttgaggcattttattcctagatacgaatcaaggtaatgacacaacttttaagaatggtgattggcacatagaaggkttttgaatttatgatacaatttctgactttttttttttagtttggcttttgtttgaggtgagattcactgaggttagttacctccatgtctagttgaattatattctcacaataatgacggggtatgtggtgggacatgttctgtggttatgaaagtcagagaggagaaacttttcctctaacctcttagggttaattcttgggaggctgcaaattaaactggcaaaaaggtagattagcaatagaaaagacagaatttatttacacatacaatgcacatacacacagcaattctcagtgatgagtaactcaaagcagagattagaacttggggcttctataccatcttaattaataggtgaaagggaatggggaaagacacttaggagagaacaaatgacattttggaaagataaatgggcccttaggagagtaggtgggaggatgtgatagtcttgtaacactgtttatctgggaatggtgcctgttgtctcagagaagactagaggtactccttggagcagatttatgacaattgctttttattgagttcttttgggaggctctgattttagcacatcagggatttcagtaacttaaatkcctttggtccaaaataatttttttatgtcacagtggcttattctggaccccttcataagcctggctgctttttccccagaacctggggcctggcacaagacactaagacactccagtcagtattattaaaatctgtcacagaaaaaatgccttggctgccatgtgctgtgagggtggacttggatggtcagggttttcmcttggtattcaaaatgtgaggcactagggtcaccttgttaatgttcacatggtkagtgatcctgtgttattttaaaacttgtagttactattcaagaatcaattctgatttttattttcttcatttttaacctttcaagaggttgtccttcagcctgcgccagccatcacttaccgcaccattgggggcattctcgacttctatgtgttcttgggaaacactccagagcaagttgttcaagaatatctagaggtaaacttaggatgtcaagattatgactcaggaaatcctaaacagcaaatattttaaaaaagtaaaattcatgtgcaagtgtgacccacaaaatctgctgttacaaatttgagatattaaagaacagatttcatatatgcaatggaaacttgctgtatagcatttttatgttayaagaaggtgagagaatataaaggtgccccaaacatggccctaccctcaaacatttatgaaggggctggaaaaatagactaacattctaacattaatgaatcagtgcattgggaaatggactatgtttggtgctctgaaagcaatgcttcgaaaaatttttattaaaaacagagtatttgctaattttcacttcacatatttctttcagctcattgggcggccmgcccttccctcctactgggcgcttggatttcacctcagtcgttacgaatatggaaccttagacaacatgagggaagtcgtggagagaaatcgcgcagcacakctcccttatgtaagcaaggttttcaacagttctccaaaagtaaagaaattcccttgaagaaaaagaaamactgtttatattttctctccctgagtttaattgatttatttatttggtaatgaaaggmgttttagatattcagaatactagacatttttttttttgttggacyagtaattttttcaaggaaccattgttctttatagtatgaaatagattgggagaccataattrtgtgttgggaggcaatctgtttttgtctctatttttcttatyatgtattttattagtaaactttttttgtgcttactgtattgactacattttacaggtgtttttatttgagttttcaaggcatttgtctctttagcttgaattgtagcattttaatgcttctcagtatggattttcttgccttacacatgttcttggtttgctttgactcaaaagtgtcatggcagggacttaccataaaagttgtatcatattttcagaaattcctctaagattctggcataagatttcatgtctaaattcttaggttcttaggtttagtgtcaggtcaagaatgatgcagatccccaggctccctacctatgttttaacagatattttaaagaggaattgaggaagtggagtagttctagaccccatgaatttagttcaaactaattatrttgctagaacaaccatgagccatctgggttagcatcattttttttcacagatagtaaattgaggctgtcaggggaaatactatgaccaagaccacataggtaattgatgacaraacaaatactgcatgtgactacatggatgtgaaaaataatacaagtttcaggtccatgtgtttttacattgatattttgattactattaaattgggaataagcaaaatttgcctttctctttagagtggtcattttgccattgaagctgagcttcagtagacattttgtaatttgrcggaaagatagtccataaatatgatgtgtaaaagaaagtgcttaatggaattgagattcaaaaagcctaggaacactgaggagatgggggaagcagaaagtcagggcagataaagacgtttgggtggatkaattcactctcartttggctgcgagtcccactactcattctccagcatgacgtgtctttatgcatgtgggggtgggttgggggagggataacagaaaaagtggtaaaagcaggactgagccaaaggacaattaacacagccaccataataatgagtgctacaacgtggtgaactctcgtggcaggcagtgtgctacatgccttctttagttatctcagcaactccattttactattagaattccattggctgggcacagtggctcacacttgtaatcccagcacttgggaagccaaggcaggcagatcacgaggtcaggagttcgagaccagcctggccaacacagtgaaaccmcgtctctactaaaaatacaacaacaacaaaaaaattagctgggcatggtggcaggtgcctgtaatcccagctattcgggaagctgagacatgagaatcacttgaaccctggaggtggaggttgcagtgagctgagatcgtgccactgtattccagcctgggcaacagagctagactcagtcttgagggaaaaaaaaaggactccatttaagattagaaatcccatttaatattagaaaactaggggaactagttttcaagcccagatctctaacatcatagwggtcatytctttttttatgccattttccttacttatagatagacatttcctttttaagtgatccaggaaatgaaagaattggactgttactgctgcctagtggtgtgagatgtgagagggagtgtttagacagggaattgaacactattacctgagttcagtatacatgtcaaaatctgtcacatttaagtgaatgaaaggatatagtatggacatgtaataaaacatttttgtactttgaatggctaagtttgaatgtacctatgatattggatactattgggagtgaaatttaacaagagatgcaaagggaaaagctcagtagtcttctagaataatcctcttctctcccccactctattccattggaracaaacctaggttgtagagaagggtacattttattctgggcttcactgtttatacaggtaaaattgggatagcataaacaacaaagatgtggggtagaagcgaagtaacaaaataaaaygtggggtagtaaaatgagggagatgtgggagagagacagtctcttcccttctttatcttgtgaatagggtgaaatttaggtcatttcttaggtggatatgtctgattgtcttaggggtttgtcataattggtgttgcttgcttgattggtttttaatgccagagtgccaggcaaggattggatgatgcagttaacctgatggcagggagggggccaagccctagggaaccaaccagtcgtgtgtttttgaaatcaacattggaaaagaagtactcagatgccaggaactgattaagaactctatttagagcccagaacagagttgtttatcctgaataataacagtgaaaatttgatttcattttactatggaaattcctaggtgctaattgtggactttgtatattctttcaggatgttcagcatgctgatattgattatatggatgagagaagggacttcacttatgattcagtggattttaaaggcttccctgaatttgtcaacgagttacacaataatggacagaagcttgtcatcattgtggtatgtactgccctctttccaccaaattaggtatttgctcctccgtatcatacacccatctctcctgctttctcccccagttcccagtctcctttcagtgcctccggtttccagctagtttgttcattgtattcttcctatttttaggatccagccatctccaacaactcttcctcaagtaaaccctatggcccatatgacaggggttcagatatgaagatatgggtgaatagttcagatggagtgactccactcattggggaggtaacttaatgggaaggctggaggctggtggaggggctgcataggggtgtttgaatgtgtctgtgtgtgtgtgtgtgtgtgtgcatgtaattgttttattgtacattttcagtatatttatatatgctggggataaattctcctctgccctttcatgcccaagtgcaagccggccatcgtagctttttgattcccttcacagccaagtaagtccctttaaacaacagctcacacactgagtgtccactttctcacctcccacacactctgcagctgactgtggtctccttccttcccccctcacttccctgataccgctctggcaaaaagcacccgttactttctcactggtaagtccagcggaactgtttcatacctcttcttactcaattttcctgcattatttgacaagtgtacccacttctttctcaaatgtttgtttgtccttgttttttcaggaaggtgttatctgcttgttcacttctaaggcctctgatgaccttttcagagtatagtgtctgggggaaattggataggaaagaaagagagaaaagtaaatgatgttagaatccacagcttatagtggactagctgaaatttacacaatgctcttcccccatttactattcccagaattaagaacaaagaartgtagagagttaaagatgactaagttagacaatgcctttatccacgaatttattcattaaggacttaaacatttttttaaatgcatatttcttcgagtgaccctggcatttattttaagtattgtgagcaycrcaccttcttaactaaaaaggatatgttcctgggtacctcggttgctgtgatcatattaggaatttctttgcaaagtactttcctttagtctatatttgtttaatttactcttaccagtgtttttctttttctcctgaaggtctggcctggacaaactgtgtttcctgattataccaatcccaactgtgctgtttggtggacaaaggaatttgagctttttcacaatcaagtagagtttgatggaatctggattgtgagttgtttacacttggattattaggtgacaaatattcaaattgtgtatatctgtatctgtatctttgagtcacagagcatagggagaggaggaggagaagaaaggaagtataacaatcactctcaatattcactctcttactatttaaataatcttgctaaaacacatagcttagaataaaaatcaaaatgttagagctgaaaggaaactcagaattttttttcccaagtctagctctttttttttttttttttttttacgaaggaatgagctgaagtcagaataggtcatgtactccttacattgttgcaaagtatacaaattgttcaattgctagttgaagactcttccttttggacatgttgaacaaattgatcagagccaaagtactcaggtgcatgaacaaactatgcctgtggtaaagaaaaatgtctcatatgatgtcagatgaaagaaagtaacctaactgagggttagcaaaatttagggagctccagagttgaaactttttctttttctaagagaactgtagaaaattcaaacaatacagagagttaaaaagataaaagcaaaaatcctcttaaattatagcaactaaagacatttattatcgataygttggaatgcatctttctagacctttatgtgctctctctctccttttctctccacatatatgtttatatgtatttatatgtatatgtatttacagttatatttcgatatatggaaaaatgtataagttgaaacatgtcatcatataaattgaaacttttttcacctgatatgtttgggaattgttcattttcagcgattatagacatattatttgaagagaggttaagaaccttcttcatgaagccttcagtgggtagacaagacaagaacacctactctattccatttatacaaatacccctttaaaatatctggaataatttatctgattaattaaaaaaagacaccatcacgacatcataagataacatgttactttttcttaatagtttttgctctttgtcttgtaggatatgaatgaagtctccaactttgttgatggttcggtctcaggatgttccacaaacaacctaaataatcccccattcactcccagtaagtcttggtggtcagcagattaaagtagccatatgtatttcatattataaattcataaggacagatctgaaaaatctggcaagggaatttgttcataattgtgcatagaaaaagaaatatgtgggtaatatataaggaaaactaggaaggaaaataaaaacacactatgctttcctaaaacatgcacaaattcaaaaggggcaatctagtacttctacttatactcaaagctatttctagggaagatctagagaggataaagtgtagaggccagaggctagtggtaagtttatgtcattctcaggtatgcacccacaggccagggtttaccagagagacaccaggtaaccagccttggtcatcaggtaagggttatgtctgatgtgtccacagtgtgaagaactgagttacaggatgaaaagacagaactcatgacctgggaggtcaaagtcagtgaacgtgatgatactcagctttgattgaactttggacaacactatctctcagggtgtggccttggcatcatagcatcggccatagtttgaagaatgctagaggttcaaggacagattatatcttgattgagaaaggaaaaaactgctaagatgataataacttatgaaggcttcaatatggtgggaagacaggaaattggggcaggaaggttagaatcaaatgctgaggggcttggatgagaggctaaacagttcatattttactcttttggtgttagaagctacttatcttttagtaatagagaagcatggtagtcagatgattttggaaatatgaacctgacattaatatatagtgtgaactagaaatagatacataggaggtaaataagacatgacgaagctactgcaatagttaagatccacagataatgtggatctcaaacagagtggtgcaatgggagcagagaggaatagatgaatacaggagagactggaaatcattctctacaatatatgatcaggggagagaaggagtcagaaattaatttacactttcattcagtatttccattcttggaccacttaacttagctcagtttggagaattcagattgaacctcaggcctgaatgaatcttcttacttccaagtgtctgcctctaatcacgtgagagctccrgtgggaggatgtgtgtgggtcagcagaattcatttatatatcagagaaactactccaagtggatagcattctaatagtaagggagcagtgtgactgtttacaggatgcccacaaaagtgcctgcccagggggctgtcatttcggattktgatagtcaaggagcagaaaatgtgcaacttaggctctcactgattgatcctgcttttgtttcaggaatcctggatgggtacctgttctgcaagactctctgtatggatgcagtgcagcactggggcaagcagtatgacattcacaatctgtatggctactccatggcggtcgccacagcagagtaaggccactatggctatgacctgctaattattgaatataaagaatatatatatgtttttaattcttggagattatggggmtaatgcataaaatttcttaagacaaaacaaagcaaaacaaaacatttaatgatacagaatgctcccaacagggactctaattgtaccgaaagagagttggaagagaatgggttattcacttttaatgtcttttgtattgttgctgtatccccttggctgagacaagctaagatcccacattgactccttaaatctctctcccttgcagagctgccaagactgtgttccctaataagagaagcttcattctgacccgttctacctttgcgggctctggcaagtttgcagcacattggttaggagacaacactgccacctgggatgacctgagatggtccatccctggcgtgcttgagttcaacctttttggcatcccaatggtgagctgctacctcaagctctcttatgaacctgaattcccaggcaacctcattctagaaagttttcaaaccacaaagctcccctctcctgcctgccatggctggggatttaatatcttgagagcatgtgcttcatccacatcagcagggctttgataccatgacattctttcctgtactgccttatgaagacagaacgtgcaactttgatatgtgctggaatatatctttctattaaagtgtaacatactttatacagaaaagtgtatgtatccttaagaacacagctgatgaatttcaccacctgaacacatctgtgtatctagtaccaagatgaagaactataacattgccagcaccctacagtctttggcattttttaagttaaatccacacatatttatgaattggaactccctagagtgttcaaggtcttgagcagagtaggcatggtgagagggaaggaaagcataaatatagtaaagatgtaccttctctttgccccaagggtttacagtttagtaagaggagacagatgtgtaaacaaataattgtgacaaactagggtaaaaagaccaacagggacgtatgagttaaatgttatgggagatcccgagaaagggatttatctgacaaaattatgagggacaaaaggaatcaaggcagggagtcaaggacacttcatggaaaagatgacatttgagattaaccttgaaaagtgagtattttttcatctgactaatcaggggggaagttcattttaacactgagaaataaaaatgagcacaaacagtataagggggattatttgatgtatctataaggattggtgtgtgggactggaatgagaaatgatgctaaaaagatgggttggaaccaggttttaaagatctaaaaggttgaacagcaaggaagtcccggagattttttaataggtgagtgacatggtcagacttaggctttagaaaaataatgctgatagtggtgaggtcaaaataataatatcagcagtattactaggtactatgcatccaaaagctctttatgtaaagtgtattacttttattacctcattcatttacgaaatacctgtgtagtaatttagtactcactgacaaaatgaggaaattgaggcacagaagggttaggtaacttactcaaagtcatccagcattcaagagtggacacaggctatgaccaaattttgaccaccctcctagccttctcggtaggaggtttaagcaaggttcagttgggaggtccctggtggaaagcaaaggagggtggttagaaggaagtgaggtatacctgttgtctgtgtgtccttccaggtgggtcctgacatatgtggctttgctttggacacccctgaggagctctgtaggcggtggatgcagttgggtgcattttatccgttttctagaaatcacaatggccaaggctacaaggtaaggctcctaggacatagagtcagaataaatttggcatacattaggactagatctgtctgcatccttgccaagagatctgctgaaccaacctcttacctggtcttcacttactctaatttgcactatcatgtgcaattaaccagaatctgtgctgtatcatygaaatgcccaacggcctcagcctgttatttactgttgcattcaaggaaatggtgtgtctgtaaaggtctttcatcaaacttctgtacgctttatctacattgtttgcttttaaataagaagcaaacaaggaaatacttcaaaattatttaaattgcagcctcccaagagaggaatcttaaagaatgaggaaggcaggttgaatcgaaaactcaaggagagacacttggtactactcagaagcgaggtttgcaaccttggcctctgtcattcaggagggaaattcttggttgtaatgaatgaggtctggaattctgcaggtgcttctgctatcctgcagccaaaccacaactgcaaactcctatttcctcccaggaccaggatcctgcctcctttggagctgactccctgctgttgaattcctccaggcactaccttaacatccgctatactctattgccctacctatacaccctcttcttccgtgctcacagccgaggggacacggtggccaggccccttttgcatgagtaagttcacctaacctcctyaaattttattaatgcatctggaatgacattgactatatcatcaaatatcagagtgaaaactgaaacaattcaggcagttattcatatctatctgtatctatatctgtaatctagctatctatattcattaatctatctatctatctatctaactggaatacctagttggtatttgtaagcatcgcctgttcccttttggtgagagaattagactaaaagtcatgggactacaggtcttttctttgttctgccattcactaactctgtatcttagacaaatcattttttccttagtttcttcagtcttaattcaaaggatttgaaatcttgactgtgatggtctcatctgtaatgcactataatgccagaactatgttcaagctgtaggaatgagcctataatacaaatacaaatgaggatattataaaggatttgtagaatttcagaattcttatttctcaggcaatgaacatctctaatttaattctaaaacaaggcacttaagagcattttcttgtcaaaatacagtcaactcccttatgtgggtgacatatgaggccctcaggcacgtatcaggctattatatattcattattttgggaagtttttgtctgctcatgaaatttcttgttaaaaggcagatattctgaaagagaaaaaagtaaaatgttaaattatctgatattttgtatgatcagatccagtttcttgatagtcagctgaagttatgaaatgtattgattatttaagtttttaattttaaatttttgttggtacatagtagttgcatatatttatggkgtatatgagatgttttgatataagtgtgcgatgtgaaataagaacattatgggaatgaggtatccatcccctcgagcatttatcctttgagttataaagaatccaagcacactctttaagttacttttaaatgtacgattaagttattattgactatagtcaccctattttgctatcaaaaggtaggttttattcattctttctaactatttttttttgtatctgttaaccatcttgacctccctcccagccyctcactacccttcccagcctctggtaaccgtccttctactctctgtgtccataagttcttggcttttagatcccacaaataggtgaaaacatgtgatgtttgtctttatatgcctgacttatttcatgtaacgtaatgatctccagttccatccgtgttgatgcgaatgtccggatctcaacttactttttttaaaaaggagggctatggaaaatagaattacagcctgggacctgcctagcatacatactggaatagaaacatctgtttatcctgagggaagaataggagacatgagctggggaaggggaatctgtctaggggtgcagaggggcttgagtaggtgtcacagaataatttggggggtttgcctgggcagacggcctgcatgctttcaacaggttgtgtgtgagtagagctgctacaaatctcattggcagtggctcaaatctcagtgaactgtctctctggttttcaggttctacgaggacaacagcacttgggatgtgcaccaacagttcttatgggggcccggcctcctcatcactccagttctggatgaagtaagtgttcccacagagatacactagagatctctgcatctgtatctgctgccctgcaaactcctctctgcttcttattccaaactcayttctgacatctgtgactgagtcagccttgaagagagtgtgctaggttttgagaagctagacatctggtaactacacatttttctttctagaatttcttttttctcttgatcaagttcccaaccagtttagaagcatctactggaaactctagagttacaagttatgttaggttgttcttgcattgctatacagaaattcctgacactgagtgatttacaaagaaaagagatttcattggctcacagttctgaaagctttacaagaagcatgatgctggtatctgtgcagcttctagggaggcctcaggaagcttacagtcatggaggaaggtgaagaggagcagcgatgtcatatagcaaaagcaggaacaagacggggtggrgggagttgccacacacttttttttttttttttttttgagatggagtctcactctgtcacccaggctggagtgcagtggcacaatcccagctcactgcaacctccaactcccgggttcacatgattctcctgcctcagcctcctgagtagctggggttacaggcacctgccaccaagctcggctaattttgtattttttgtagagacggggtttcatgttagccaggctggtctcaaactgctgacctcagatgatccacctgcctcagcctccaaagtgctgagattacaggtgtgagtcaccgcgcttggccgccacacacttttaaacaaccaaatcttacaagaattcactcactatcaccaggacagaaccaagggaatggtgtaaaccattcatgagaaatctgccctcatcatccagtcagctccctccaggccccacctccaacactggggattacatttcaacatgagatttgggcagacaaacatccaaactatatcaagagtggtcctatttgttgttggattctcatagcagatcctgacttgctccatgacgtagaaacaggatggagcagtgacccaacactcactctaaagtcaggctgatcgggatgtgattgttgtctctgccactttgagcctgtgtgatcaggggtgactattgtgctggcttctcatctgcagaggggtaatactactactactaaaaataatggtacccaccatttgggaatgttgggaaaattaaatgaggtaatcatgtaaagctggaatgtttgtcaccacacatgttttattattattttatgattattattattcctaatgtggctacgtttgggatttctctctgggttgccaagttacagtttctattatttgtattagaggagaagcagaagaaaggcataatagcagggcattcctgccctctctgtgtatgattaagaaattccctagagaataaaaagaaatccattttatttccctcaggggacactacatttttttaatttcagggtgcagagaaagtgatggcatatgtgcctgatgctgtctggtatgactacgagactgtaagtagctttgacttttcttctactccttaagactgtagctgcagctgcatagacaagctacctttctggagagagaaacatccatctacatgctgaggagtaktttttagtgttttctgtaatttcatagcagaacctgggtaaagttaacctaaaccgttaacatcagtcatgatgaaatgtgaaaaaataccttcatatactttatttagcaataagataggctgacatagtatctcataaattaatattggaggaactgatggacaatgtgagcttggtcaggaatcagactatctgtttaaaactatcagtttatataatatatcaaatagcctcagcatggcataaattttttcacaaacccccaactggtagcagaacatgttattcttgatttttttccttctgttgtttgattgcctggctagaccgtaattcagctaattggaaaagggagagagctgtgtatcaccaggcatgtagataatcagtgaagggcaatatgctgtcatgccaatgtgtttgatttatctgcatgcatcaggggagccaagtgagatggaggaagcaaaaagtcgagatggaacttcctggagacaaaattggacttcaccttcgaggaggctacatcttccccacacagcagccaaatacaaccactctggccaggtatagcatggctggagtgtcctttcagaattcatgtccttgcttaaaccctttgaatttcttttcgaaacacactaacagccaggtggtcagcctctttggtttggccacgactgttgcagttttagcaccaaaagtctcttcccttgggaggcttttcaattctgggcaaaccaggtcagttgatccctctgtctgccttggccacactgcatccatgtttctttacccttgactcacttgttctcatttctagagaaccttgactctcctccctcctagaatttcaacttcctatttcttttctcccactaagatttctttcttgtgattcaaaaattaccttatgcaaacctcaaatctccaagtcactgaattttcctttatacgtaattgattccaaaaaaatagattccatctgtactaaagaggtgcacatttatatcttcatggctttgagagtattagcctacttgtctttaatagaccaggagctctttggaagccagaaacctgtcttttcttttgaacctctcttactgctttaattttccaagttgtagactttttatgatactaatggaaaatatccctgaatccaatgccagttggcttcctttttctaactgttcaccttcaagctgttctgcacactgataccaaattaatttttccaaaatgaaaatctcaactggttgctcccaggcttgaagtccaaagtctttcattaatagggtattcaaaaccaatcacaacctggtttcacgttactttaacaactctatctcctgccacaccttcatgtacatacagaccagtcatgccaaaagctttctctttcccagacatacgtatgtattttacaacatttgggcttttgcacttatcctttccaacattctttgcctggtgtattcttaatgatccaaatgaaactttacatttcagcagcaagaaatctttccttaatcttccagcagaggaagcactgccactttcaagtttctggtcattttatatatatattatatatatacatataatatataatatatatatatattatatatacatataatatataatatatatattatatatatacatatatataatatatatatattatatatatataatataatatatatatattatatatataatataatatatatatattatattatatacatataatatataatatatatacatataatatataacatacaatatataacatataatatatacatataatatataatatataatatatatacatataatatataacatataatatatatacatataatatataatatataacatattatatatacatataatatataacatattatatatacatataatatataacatatattatatatacatataatatataacatatattatatatacatataatatataacatatattatatatacatataatatataacatatattatatatacatataatatataacatatattatatatacatataatatataacatatattatatatacatataatatataacatatattatatatacatataatatataacatataatatataatataacatataatatataatatataatatatattatatacatatatataatatataatatatattatatatacatattatatatataatatatattatatatacatattatatataatatataatatatattatatatacatattatatataatatataatatatattatatatacatattatatataatatataatatatattatatatacatattatatataatatataatatatattatgtataatattatatataatatattacatatattatatatacatataatatctgaatataatatatatattatatatacatatatctaaatataatatatatacatataatatctaaatataatatctaaatataatatctatattatatatacatataatatctaaatataatatctacattatatatacatataatatctaaatataatatctatattatatatacatataatatctaaatataatatatatattatatatacatataatatctaaatataatatatatattatatatacatataatatctaaatataatatatataaaatataaacataatatctaaatataatatctatattatatatacatataatatctaaatataatatatatattatatatacatataatatctaaatataatatatatattatatatacatataatatctaaatataatatctatattatatatacatataatatctaaatataatatatatattatatatacatataatatctaaatataatatatatattatatatacatataatatctaaatataatatatatattatatatacatataatatctaaatataatatatatattatatatacatataatatctaaatataatatctatattatatatacatataatatctaaatataatatctatattatatatacatataatatctaaatataatatctatattatatatacatataatatctaaatataatatatatattatatatacatataatatctaaatataatatatatattatatatacatataatatctaaatataatatgaattatatagatatatctaaatatatatattatatatacatatgatatctaaatatataatatatacatataatatctaatatataatacatatattatatatacatatactatctaatatataatacatatattatatatacatatactatctaatatataatacatatattatatatcatgtaatatgtaatatataatatatacattatatacacatacgacatataatatatacattatatacacatacgacatataatatatacattatatacacatacgacgtataatatatacattatatacacatacgacgtataatatatacattatatacacatacgacgtataatatatacattatatacgcatacgacgtataatatatacattatatacgcatacgacgtataatatatacattatatacgcatacgacgtataatatatacattatatacgcatacgacgtataatatgtacattatatacgcatacgacgtataatatgtacattatatacgcatacgacgtataatacattatatacacatacgacgtataatatatacattatatacacatacgacgtataatatgtacattatatacacatacgacgtataatatgtacattatatacacatacgatatataatatataatatatacattatatacacatacgacatataatatatacattatatacacatacgacatataatatatactatatatataatatacacatacgatatataatatataatatatatataatatacacatacgagatatgatatataatgaatattatatacacatacgatatatataatgaatattatatacacatacgatatatataatgaatattatatacacatacgttatatgatatataatgtatattatatacacttacgatatatgatatataatgtatattatatacacttacgatatatgatatataatgtatattatatacacgtgtaatatatgatatataatgtatattatatacacgtgtaatatatgatatataatgaatattatatacacgtgtaatatatgatatataatgaatattatatacacgtgtaatatatgatatataatgtatattatatacacgtgtaatatatgatatataatgtatattatatacacgtgtaatatatgatatataatgtatattatatacacgtgtaatatatgatatataatgtatattatatacacgtgtaatatatgatatataatgtatattatatacacgtgtaatatatgatatataatgtatattatatacacgtgtaatatatgatatataatatgtatattatatacacgtgtaatatatgatatataatatgtatattatatatacgtgcaatatatgatatataatatgtatattatatatcatatgtgatatataatatatatattatataacatatatgatatataatatatattatatacatatatgttatataatatatatattatatatcatataatatatgatatataatatatattatatatacctataatatatgatatataatatatattatatgtacctataatatatgatatataatatatattatatgtacctataatacatgatatataatatatattatatatccctataatacatgatatataatatatattatatatccctataatacatgatatattatatatacctataatacatgatatattatatatattatatatacatacaatatatgatattatatattatatatacatataatatatgatataatatatattatatatacatacaatatatgaatatataatatatatattatatatacatacaatatatgaatatataatatatattatatacatacaatatatgaatatataatatatattatatacatacaatatatgaatatataatatatattatatacatacaatatatgaatatataatatatattatatacatacaatgtatgaatatataatatatattatatacatacaatgtatgaatatataatatatatatcgtatatacatacaatgtatgaatatataatatatatatcgtatatacatacaatgtatgaatatatgatataatttatatatacatacaatatgtaatatatatattatatatacatacaatatgtaatatatgtattatgtatacatacaatatgtaatatatattatgtatacatacaatatgtaatatatattatatatacatacaatatgtaatatatattatatatacatacaatatgtaatatatattatrtatacatataatatgtaatataatattatattacatataatatataatataatatataatatagaaatttatatgtgtaattatatatttatttttatatttatatatttattatatatttatatattatatatatatttatattatatttttgttttgttttgttttttgctccttagatgattttgtctttcttctttaatactgttagtatttcaagaacagttgtatactctgtgcttgaaaattttattatctgaaatgtttaggggagtctaagtctattgttagttaactttgytgactttctttcatgttgacttattaccttgtgtgcttggtgatcttattttttttaagctgtgataatcttataactgtgggtctcattcctccagagatgatttgccttctcctctgtgtgcaagccaagaattgcttccaactggcattatgttagcttccttcaaggatctcagcttcatgtgggaatcagaggttcacattctctaccttggatcactaggcttagtagcccaattttaaccttgctatgggaatttgccacacggagattctaggttttgcttactaagcccccttttggttttagctcagtgttttgttatcctgttattgttttcatctcttggatatatttcttactttcttgcaaatccaacaatattttaacaggaatatgtgttgtaatttaactaggatcagggaatattttactgggtaagtctccagaagaatatccggtccaccatatttctggaactgtggttctggactcctagaatatcctaacttttgtgttgttttcattgttcgccttcattttttaatgaatgtgcctattttttcctataatatttaaggtcattcagatcaggggttgtgatttatttatttttgtatctcattgacttcttagaaacgactgctactcagtacatgaatatttaatgaaagcagatgtttttgctgataataaaaactaactttcttgcatagtgaaaggctgaactgtgaaagaatacaatggagaatatgagaccagtgacagaggagaaacaagaagagcaggaaactgggaggttgcttagagcagtgatagaatgaggagagactccaaataaaaatttctctcttctccccctcttcctctctgtccatctactttaccatgtatttgagtaatgttttgtgtttcttattctaaattatagagtagattagaatgatttgtttttctttcaaaacaaactaataaccaataatcagataagttactactaaatagatggaccttattatatgttgttgctttctgagtataaatggtccttaggcaggcgaaaatgtgtcttcctcacagcactggacacttctactgagggcatcattgctaaagtgatataactgaaccagttattgcccaagatttatttctcttctcatactctgtattctaagtagtagttgcagaagcagcttttatttgagttattgcagtgcctctggtgcttaagttcttgcctctaacatagatgttattgttaatgtttggggtatttctatctcttgtgacactgttgatattaaagataggggcgcctgtcaattttgtgtttgtgcctgaagaaaagcagaaccatctgctgctagtaacttttccaatttgaaatttgatggaaatattctcagctcggctggcaaaattctctgactcctgtctttgtgtcttgaatcttgttccccacagtcgaaagaaccctcttggtcttatcattgccctagatgagaacaaagaagcaaaaggagaacttttctgggatgatggggaaacgaagggtgagcacttatacgataatgttgctgtttcccaacctgcacctgtgacttatggtccttcactcctgctggtcattcagctgtgggagaaatctcagtaggcacagtagcaagagtcacttaagtattttgtttctggttgcaccattcagaggtagtggtagatgacctacaaaggaaagaaaaatacatttctatctctggcaattctcctattggacagtgatatctataataggctatttatttatttatttatttatttatttatttattgaggtggagttttgctcttgttgcccaggctggagtgcagtggcgcgatctcggctcactgcaacctctgcctcccaggctcaagtgattcttctgtctcagcctcccgcgtaggactacaggtgcctaccaccatgcctggctaattttttgtatgtttagtagagatgaggtttcaccgtgttagccaggatgatctcgatctcctaaattcgtaatctgcccggctcggccccccaaagtgctgggattacaggcatgagccaccatgcttggccaataggctctctttttattgtcaatgggtgcttagaagagatggtttcaagactgttcccgtaacccaatgttttttttttttttttttttttttttttgagacggagtctcgctctgtcgcccaggctggagtgcagtggcgggaccgtaacccaatgttaatgtcttcctcctgaaattcttatgagcaaatgttgatgatatagaaatcatgcccctgccagtgaggcagtgagaatatactttttagcatatttgtggatccagtatactaacaattcctgtgcttcaagtttaggaaatagattcccttgaggcatatgccttggaagcccttggaagggaaactttgcaatgttccagtaggaaagagaaggaaaaacaatggcttggccttggagactcttgtccatctaatccaatgtgtagatttaaatatttattttttaattgcaaaatatttaattggcaaataaagatgaaatatattcaaagtggacaatgtgaggatttaatatatatataggcatagtataatgattaccacagctattttaaggaacagatccatcaccacccatactgtagactggatccccagaacctattcatctaataactaaaaatttgtacccttgaccatcatctccccagtttccacacctgcaggctctaagaacaacagttatactgtctgcttctaggagctcaacttttttaggtttcacatgtaagtgagaccatgcagtacttgactttctgtctctggcttatttcacttagtataacgtcctctagattcatccatgctgttgcaaatggcagaattttcttctttttatgtctgaataatattctattgtatatatataccacaatttctttattcattcatccattgatggacacttaggttattttcatatctttgctactgtgcagaagtaaaattaaaaacttaaatgtaagggttgaaattgtaaagctcctagaagaacacaggaaacaacctccttgacattagtcttggcaatgactttttggatatgataccaaaagcaaaggcaaaatagcaaataataaacaagcatgactacatcaaactaaaaggcttctgcacaggaaaataaataatcaacaaagtgaaaaggcaaactacagaatggataaaaatgtttgcaaaccatgtatctcagaagagattaatataaaaaaataaggaactcatgcaactcagtagcaaaagatcaaatgacccaattaaaaagtgggtgaaggacctgaacagatgtttttccaaggaagacatacaagtggctaactggcatgtgaaaagatgctcaacatcagtaagtgacacaggtatgcaaataaaaaattacagtgagctaccacctcacacctgttagcatggaaataataaaaaagataagagataagtgctggcgaggatgtggagaaaatggaatttttgtagactgttggtgagaatgtaaattgttacaaccgttatggaaaatagtatgcatgttcctcaaaaaattaacagaacttccwtacaatcccatgaaatcccacttctgggtgtatatccagaggacatgaaaccagtatctttaagagatacagtcactcccacgttcattacagcattatgtgcaacaaccaagatatagaaacaatctaattatacattgatgaatgaatgaataaagaaatgtgatacacatatacaattgaaaattattcatccataaggaaaaggaaaactgctatgtgtgacctcaaggcatagctgaaaggagtggtagggtgaaatctgttcttctgaggtgggcaggccagaatctgacttgtctttctctcactttcagatactgtggccaataaagtgtatcttttatgtgagttttctgtcactcaagtgagtagcatatttttatgaatcttaggtgtgggctttggactgaccattagcacatctgtgcttgtgtatattgtatatgtgtgattatatttgtaactttatatgcattattggctataggtgagtacatttctatttatgatttcatcgatgttttcaaaaggaggcattaatatagcagctagtgtttctgaacacagtttttaaatgcctgtgtgtttttatgatcgttttaaattagaggattatccaaataatgttgtacttcttcagcacacactagtagagaaagcagagaggcatttatggcagtggggggtatccggtctggaatggaatatttgagtgacttgagaatctgtgtatactcatatacctttatgcatacttggacttaattgttttgcagaaccgcttggaggtgaatatttcacaatcaacctacaaggaccccaataatttagcatttaatgagattaaaattcttgggacggaggaacctagcaatgttacagtgaaacacaatggtgtcccaagtcagacttctcctacagtcacttatgattctaacctgaaggtaaaaacccattttgttgagatggtacattgagaattctccatagcatcgtgatgttccttcttgccaagtttgcatgggtccctgaaggaccagggcacctttgaggcctgttttggggaagtgagagggctggggaaaaaaatgaggtggccagagctagaatgagttgggtatttttcttcttattcccttctctgcctatcagtgttcccrtctttctagctggtttcacttgcttttcccaaaaatagaataattatgatgagacccaggaacagcaaagttggaaagtggggaatagcctgacattattagactgtgaattttgtatgactagcacaaataagaattggtatttgaaaaaggccagtttggataggaaacttgtggtcaggttttggaggtcttagttaccaacttgawttaattctcaagcagtctcatattgatccttgaatgaaggctgtgctactgtgtgtgagcattgttgggagtgggagtgggggctggggactagtagaacagggaagtacaagatggtttagattgggaggagactaggagaaggatgataatctttagaatgtgatttttgtactccagacaagtgagaactttaacttgggaagtgttgtttaaagaagtgtcaagataagaaaactatatagaaaaatattaaatatttgaactaatggtattcaaggaaggtttcagaattggagtctttgggcttagagaaatgaacatgctgggatgttagaaatagaaagaaatataatgtttttttcaacttttcaaatttgccgttgctaaaattgaaacccaaagaaatgaaacagaatacctgacttaccctgatgtgattattatgccctgtatgcctgaatcaacatatttcatataacccataaatatgcatacctactatatacccattaaaattaaaaattaaaaaaagaaatcatttgtccaacattctacagaaatgtgggcatgataaccaggtcatatgattcttattgctgtgctctttctaccactctatgccaatgggtgatactggtttgggcattggagagcaagaggatcaactcactttaggatgacatcatgtgtcatctcacagcgagctaagaggagtcagggtagaaaagaataaggggtgatcacaacaggttttatttgacctaactgttttcattatgctatgtacaagattgtgctagaggggagacatttgacctgttgctgctaaatagattctcccaatgtgcagttctcttcttataagctaaagtcatatgttgcttggatgtttgaaagtctggtctaatttctatttttttttatcgaaaaaaaaacctcaggtcttgcaaagcctgtctcctaaagatgaatttccttatgatttccacattcctacaggttgccattatcacagatattgatcttctcctgggagaagcatacacagtggaatggagcataaagataagggatgaagaaaaaatagactgttaccctgatgagaatggtgcttctgcagaaaactgcactgcccgtggctgtatctgggaggtaaccatgctgatggggtttgtgtgcatgagaatctccacacctaatctgtagtttcttaagcatagcagtggtacttacataactacttaaaatccatagaaagaacttcctaagggacaggatctagatgtgacaggtaggtggggacatgtgcgaaacttcttaagatgaatattttgcttggagacaaggaattgaaatttatgttattgccaagtgataagtgatgggctagttttatcgtcatataaaatgactttactaaccctgtttaggttagagaactttaagaccacatgctgtgctgatctatgactttggccttacttttcaggcatccaattcttctggagtccctttttgctattttgtcaacgacctatactctgtcagtgatgttcagtataattcccatggggccacagctgacatctccttaaagtcttccgttyatgccaatgccttcccctccacacccgtgaacccccttcgcctggatgtcacttaccataagaatgaaatgctrcagttcaaggtaaacacagtacatgtatcaggtagtgattagacccttttcagttccattaccttttattggtctggatcacagaaccctaaaataagttaatcatgctacaacagactatatcattatccagagagcattgagaaatcattgagggaacaatgagacctgccctaattttcatttggaaaagattactgtggctactgttaggaaaatggttgggagagcaagagtaggtacggagagacaacttgggaggctaccagttaggcaggtcagtggagggattaggtttggactagacagtggaatgcaggtggagaacagtggacccgtctgaggttgagaaagttgggttacaggatctagtgctcrattgcaagcaggtgacaatggagatggaacatcaagaatgatgaccgtgttggtatcttgcatcttaatatggatggtgctgacattaactcaaataggaatactgaaaaagtttgtgcttgatcaatgtaagatgatatgttcagtttgggatgctgaatttgagatttctgtaaaatggccatcaatgtgcagtaatttcatttctttccagaatttaattgcatttaaggactagggatggactagctgtgatgtctatttttctattaaactaagcttctcaaggacaggaatgtgccctttcctgtttgtgcttctgaaatctacagagcctggccgatagtgctgtaatgttattgacagagtaagtgaaagtggtcaggacattgtcacattgcctgaaaggttctttacaatctgacatcaacccgaattctgagttcttgttcatcctctaatgcagggaagaatctcttgtatgtttgtaccctccttgtaacactagcatgttttaggcacctaatgggtttgaagtgaatgaacttccctggagttctagccttaaccattgcctactctacctcttgaccgtagagtaactctttccaaaatatgtgcctctttctggcccactttaattctctctgccttcgtggttgttattcttcaccagaatgacttgatctcctttctttgtttggttaatgactaccaagcttttaatattctagactgtatttctcccgtgagaccgtctcagtctcccagaaacaatgttaggcatttccttccctagaatctcacagcacttctacatagctctcccttagcacacatcacccacgtgttgtgagctgctctctttgacttcttattcgcatgtgaatttcgtaaaaccataacactgccttattgagctcacgtccctagtgtcttgtgcagtgtcaggcaggggatgtagtaggtactcatgaatcagtttagataccactttcagcaaggacattctgattattttaatcaaatagatttcattttggggagacaggtttttttttgaactcataatgattttaagttatttatatatactcatatacccacagaaaataacaagtaacatattcataaataccacactgattccagaatgattttccaagtcagcagcaatgtcccattgagtttattaaggtaatagaggccttaataatgagaaatcacagaaaaatgttaaatgtgacattgttatctgatatattaattaaatctcagatatcataaagaagatagaaacatagcatctgaactttgtgtccaaaaatcaaaaaggttctgctaagggtataggtttcaagagtagtattgttgcctaaaattgatttcctctggcctagatttatgatcccaacaagaatcggtatgaagttccagtccctctgaacatacccagcatgccatccagcacccctgagggtcaactctatgatgtgctcattaagaagaatccatttgggattgaaattcgccggaagagtacaggcactataatgtgagtggcttctagtgtgactcagagttgatggctacctgcgccttcgctgccaggtccattgtccttggatgtatcctggttcaaaacatcacattgtccacttccagatccatggatgagttgtttccttcagacctattcttacaggaaatctttagcattctggaaataaatactgaaggagttgaatgtgcctgaggattcatccaacaaatgtttatggggtgccttctctagattaggtgctgctccttatacacagctgaggtttctcttctcatgacaacaaataataagtaaatatcactttgagtgctatgtagaaaatggactgaggggtgcaaggatggaaggcagtgctggtgtggagtggtcccagctgtgatgatgaggggtgcttggatttgtattgtggaggaccactgaaaggaggcagtgacagagggaaacggaagaatgatgaataactcctgggcttttagcaaggatatctgtgatattttaatcaaattgagtttcagttttgtttgggatatgaacagcttcttggtaggaatcaagtgttctgttgtccttgaaaagtcacctgctggaaacagagataaaagctcattttctgtttcaaatctgcgtttttgtgtttcagttgggactctcagctccttggctttaccttcagtgacatgtttatccgcatctccacccgccttccctccaagtacctctatggctttggggaaactgagcacaggtcctataggagagacttggagtggcacacttgggggatgttctcccgagaccagcccccaggggtaaggacagagcatttgggatctgtgtctctgcttctctccacccacactgctcaggctttgggcttcatcttcccaaactccacttggtcatcacattctgcttttaggcaagtgggccaattctcaggctcctttgtttcatgtgtttagtttatgtgtctagtttcatggagaaaactagagccatgttagcaagcacatttttgttgagtttctttctcaggcataatgtcttttaaactcctactgcttcttcccatgactctccagtacaagaagaattcctatggtgtccacccctactacatggggctggaggaggacggcagtgcccatggagtgctcctgctgaacagcaatgccatgggtaaggccatcagcacctcccttattttggggggataccaatcatgcctgagtcaatttacaatgtgtttagcctaactgttccttgaagtcaaaatcttcattttacgggcactgctgtttattttttctttgtgtttagcctttctgtttatttcaatctaatatcatgtaataagaagatttaacccaactctcattttggtaaaaatcacataagaagggatagtaacaccacatgggtcccaaatatcctggagggcagctcgtgagagccagttatataatttgaattagggtaaaactatgggtcagagaagttagtctgggggtattgagggtgtatggtatgttggaaaattacctatcgggtactctgctcactgtctgggtgagggatccataccctaaacctcagcatcatgcaatattcccatgtaaggaacctgaacaggtatctctttatctaacataaaacttgaaatgtaaaaaataataattttataagagtagaatgataaaatatagtaaagtaccctaaagagaatcaaacccaggaatgggacctgtagacttccattgatcttcttcagttctgtgagtatgatagaaaatgcctgctgttactactctatgatagggagggtgcaggaagatggagaatgtgtggatttcaggggtgattcgtgacatggaaggtgtccgtgaggcttggcatttttctttattttcagatgtgacgttccagcccctgcctgccttgacataccgcaccacagggggagttctggacttttatgtgttcttggggccgactccagagcttgtcacccagcagtacactgaggtagggggaaatccaattgtttatcaagtacttacacagcacattctgggtgccagagtccacattgattagtataactctcagttgacaactggaaatattggtctttcttggagagagattatagaatgagaaaaaataaatacattctaattatcattaaatttatagcctctgtaagcattgcagaatagcagaagttatagtggtactagtggtggtgctggtagtgatagtagtgtgatgttggtgttatttgtggttatatggtgatgatggcagtaggggctgacggtggtgatagtgatgtgggaatggtgataatgatggtggtggtagtagtggtgttggtgatggtgatgatagtggtgggggtggtggtaatgggtgtgttggtgatgatgacggtgatagtggtggtgatggtgacaagggtggggctgacgatggtgtttgtggtagtgatggtgatgatgatggtggtgttggttatggtggtggtggtagtggtggtgacagtgaggtggtgtgaggagtgtgatgttggtgatagtggttgtggtgatagtggtgatggtggggatggtggttggggtggtggtgggggtggtagtggggggtggtggtgacggtagtgaagggtaatgataatggtaatggtggtgggggcacgatcgtggtactgggggtgatggtgaaaatagtgatgatggtggtggtgatgatggtgatgatgaccatggtggtcgtggcagcaacaacagacacttacatactaccaagtgcgcatcactgatttatcacttgctgcatgttagagcatttcacacatattaactcattcatgcatcacagaaacactatcaggcagatgctattattatccgttatttacagatgaagaaactgaagcactaagagattacttaatttttgcccaaggtcacacagctagcaggattggagcctgtatactaagccaggcatatgtctctgattctgggtttcttaaccagttatctacagtgtctctaggaatagcgtaacatcagattttccataatttttaagaaggagctcaagtctagcagaaagctttctctaagtatcctagtggctctatatcctgtcagttttggtctggatttcaattagttagttgtctagcttggggcacagaaaaatattcttattacttgatgtaaaacttcaatgtggtgcctctgttctgaagactaatattttctgtctattttctagttgattggccggcctgtgatggtaccttactggtctttggggttccagctgtgtcgctatggctaccagaatgactctgagatcgccagcttgtatgatgagatggtggctgcccagatcccttatgtacgttctcagtcatggctctggagtttcaaaactaacccaggtgcctctgtgtctgggttcatttgtctaatgtttgttggattccataaagacataaagttctttttcagacaatatcacagttagcctcaccccagcacagtaatataggtaagggcacttgtttccgtcttccagagatgacagctcaagacccagcatgactcgccagagtgggagataggctggctccagggctctttctgctctcccgtgcttccttccatttctttctcttggcttcaaaacatgtagtcaaaaaaagt

SEQ ID NO: 94061 - DNA, 215595 bp, Homo sapiens
  misc_feature (1)...(215595): n = A,T,C or G
tttataggagaaagaagaactaaagcaaagagaaaacaactaaaatcgtttaaattgtaaagaacgacagaataagtggaagcatttgtgatttaagatatttttagtcaagtttggtgcctgcatctacgatgcctcactatttactatgtgccaaattaaacaataacttttgggcttatagcagtctcagtatatgtgattattgcaatctcagctacaatcagtttgaatagtcaccttaaggaaagaagaaagccacctattttatattttaattgggcagaagtaatatatcaataagctaacacctcagctgggctgaatttgtctgattaacttgcttctacttataccctttgccagtggagcagaaggtgctcaactgtgaaaaaaaggaagccccaggcattttcattgtgatatatatatatatacacacacatatatatttactcctaacaatttaatcctcataaacttatagggaaagtagtcttaaatcatttttcagatggaaaacttgagaccagcgtcagagctagacaagggccatggagggccaaggtcatggcagagcctcaattgtctccacagggagcggttatggacaacctaaggtaataactggatccataaagatggaagaaagaatgactgagcaggtaagtaaagggttagtgaacgaaaactctaaggagggcaaggtggtacagtgaaaacgacgggtgacttcacagttggacgtaagagctgaataaccacgggtgtcctggaattcttttaagtcttggttttcttttatgtaaaaaggaataataatagctacatcagagattggttttgaagattagatgaaacaatgtatgtaaaacaggtacctatattcctttcttcttctttctcttctttccttccacttcttcgcaattttgcccagggatggtcttcattctaaccgaaggtaatgggaaatcaaagttagttacaataaaactcatgggaatgggagagaaataaacagcagtcaatctttttagttatagaggggttgtgctttgatatgattcaaaacctaaacctaacctgtattttatgtcaaaagttgataggacctttcagtgttggacactcaattctgactttacggacttcccaatactggaaaaagaatgtgtgaaattccattttggtattttccacagtggtactttcccatgtttcctaacagctgaagcctgtaatctaccctcccctccagcacatcatttgcttcccaggagctcacaagattgaggccatatgggtgcatatccttaaattcccccatggtcactccacaatcttctttgagtggcctttttactttcttttgtccaatattaatgtgtttcatccccttcatccaagctttttgaaggaagtgacatctcattctttttctttttttttgagacagagtcttgctctgttgcccaggctggagtgcagtcatgtgatcttggctcgccacaacctctgcctcccgggttcaagcgattctcctgcctcagcctcctgagtagctgggactacaggtgcgcgccaccatgcccggctaatttttggatttttagtagagacagggtttcactatgttggccaagctggtctcaaactcctgacctcatgattcgtgcctgcttcagcctcccaaagtgctgggattacatgtgtgagccaccaagcccatctcattcatttttataggtccaataggccaagtatagtgccatgaacataatttgcacttaacaaaagtcattaagtaggtagacttgaatgtttcagtccagtttattagtattttcaaaatctgggcagaattaggatgtacatgttgaaatgaaagaggaaatagtcattattcaggttttgttgacttccacagaggctcttgagaatcaaaagttaaggcatggggggaaccaaagccagagttcaagtcctaatgctagattagaacaagaacagagaaagaggctaatcactccagccacctggtagatgagggtcacttggctagtgcagtgagtcactgaagtacaatctgtcaccctctccctttctttacttcccctactctttctttctgtcaccctcttcctcccctccactcccttcccctccctccctccctgcttccctacttccttccttcgagtggcctttttactttcttttatccaatattaatgtgtttagtcccagctttttgaaggaagtgacatctcattcttttcttttctttttttttttttgagacagagtcttgctctgttgcctaggctgaagtgaagtagtgtgatctcggctcgccacaacctctgcctcccaggttcaagcgattctcctgcctcagcctcccgagtagctggaactataggtgcgtgccaccatgcccagctaatttttgtatttttagtagacagtttcactatattgcccgcctgcctgcctgcctgccttccttccttccttcttttgagagagacagggtttcttgctctgttgctcaggctggagtgtacagtagtgtactctgatgatagctcactgtggcctctaagtcctcggtgggctcaaagtgatcctcctgcttcagcctcctgattagccaagtagctgggactacaggtgtacaccaccacacccagctaactagaagtagtctttatgatggactggcatttgttcagttaaaaatggaggactctgttactgaggaggaaggggtgagcagatatggagggtcaaccggcaatctctgtcagagaggtgatggggataatggtatactttggcgttaaaactgaattgaactggattgaatataatgaggctaataatgagccaccatgaaagtaaaagaaaaataaaaggtatctttagattgttttaatctggttatagagcgaaggtcccttttaataaaagtggaaaacccaaaagaaatatatatttaagatgtattgcatatatataataaagtgtcccaagtaagccactgtgcagataacataggaatatgatacagttgcaaaccaaatctggtaaataactatgcaggcttcttccttccacttctctaaggcagggcaatcaaccatgggtttttgctgttattaatgtgataaaataatatgtttggtatggtgtctgrcaaataataaatgttcagtaagtagaatgaattcttagtattttaattatatttttaaacaaaggtcatctaggggaaaacagaagtatgaggattgagacttcttctgaaaatcagtgagtggctctctgcagtggttacagaaatgccccagcatggactccctcctgtaaactggctctgctgtcccagcagtgacggaaagcactcaatttgttttctcttggaagagacagagtggctgtcagtttactgcaatattttggactgcctggaaaattcaatgtacaacaggagaaaggagaggcaggagacagactctggaatagaagtcaaagacaaagaggctcgtaaacatcaagattctggggctaatctagccattcacagctttagaaccatggacagtaaaacttaaaatatatactatgttctaaccaccacaaggttattcactctagcaactaaaaaagcactggcctcaggatttgcaacattaaaagtcacagctcatccaccatcagatgctaactgaccctgctgttccacaagccataactacagctttgattggacaagagtctggtttcagtaactttctcctgattaagaagaccactgaccattgactggttttgccagtttacagagattacacacttacctacctttgtatgtaaaatgatcttttgatatataaagcataactgtagcacatttaaatgttaagtagccaccccaaagtgaacatgggtcatatgttacgtgcatgtttgttcaataggcatgtgtcaggaccaccttcatgaatattcatagctcctcctgtaaccagttaaatatatatgtttagccaacctcttcagcataaagctcccaccccaagccctcctttgaagggcctgtctctagttttgcctggatggccaccttgcaggctgtaaccctttggaagaaataaagtctcctctctccttttcaaaacttaaaaattgtgaatttttatttttattttatgtatttaacttttaagtttaggacacatgtgcaggtttgttatataggtaaattcacatcatgggggtttgttgtacagattatttcatcaccaagctattaagcccagtaattattagtcattttttctgatcgtctccctcctcacccactctgccctccagcaggccccagtatccgttgttcccctctatgtgtccatgtgttctcatcatttagctcccacttataagtgagaacatgctgtatttgcttttctgttgctaaggataatggcccccagctccatccatgttcctgcaaaggatatgatctcattcttttttatggctgcatagaatttcatggtgtatataccacattttctttatgcagtctaccactgatggacatttaggttgattccatgtctttgctattgtgaacagtgctgcaatgaacataagcgtgcatgtgtctttatgacagagtgatttatattcctttgggtatatacacagtaatgggattgccagatcctatggtagttctgtctttgaggaactaccacactgatttccaaaatacatgtggccaacaagcatatgaaaaaaagctcaatgacactgatcattagagaaatgcaaatcaaaactacaatggattttttaagttaataatgtgaacaggctgagtatgagggacatggtggcccaagcttgagtatatatatggaaccgttctggcgaggggagttgtacaatgaagacaatttgtgcagggcttctcattgcaggtggaggatatgacttcgtcacaaagacaaccattaagagttttgaacagagtaaaagctggagaggtctgtgttttagggaggtggaaatggggatgatggactggaagggtaaaaaaccagagattggttttgaagctgctgtacccattccagagaagtgttgcattgacagagcacacaagtcctcgaataggaccgtggttagaacggccgatatttatcagtgggaatggtaaacatttatcaagtgagcaaccaagttcagttacttaatctgagtctcattatgtcttctataaaatacacattaaaaatagaaagtaaaaacgtgggtaaagtacccagtggatggtcattactcagaaaaaggtattttaaaagtttctcccttattctttctgagtacaacctgtagtacttgaaccacttctctttcgtcccctaccacgctgttctgcaatctctttttacctgtctcactctcttcctgtactgtgtgcctcatcgggacttctaaaggcttacggcctaagtctttgtattccgtgtctctggcacgcgcctctgcacacagcaggcctgaaccaaaacttgtgagcaaataggatgtaagggggtgaaggaggtgggcgcgaaacgggttcgaggtcgcgcactccgccggtttctgccgccagcccaaccccgctgggtcgtacctaagagatcgccggtgtcagagcgcagcgggcaccttcacaagcatcttgagggacaagcagagtcgctcctcccgcagggcgcgggctaagaagtgaggaacccaaggggctcccgtccaactaagaagcgaaatcccccacctccaggccttcagggctggttcttgggaaatcctaactctttcccttctaaccccttccttggcccttcttcctgcccgggaggatcaagggcgctgttttccagaagctgccgggtcggaaacggtgggggaacggggcggtacgcgtgggtggaggataggcggggagggggcagtccacgaacttttgtcattcagcctgggagaccacggtgacattcctgtctgcgctgcgggcaggccagcctctccggccctggactagggggcgccgccgagagaagccgccgcaggctgcagagtcgccgaccgcgctgttcgcaggcagaccccgggctgcccaccgcggcctagcgcgcgccggatggcaggagaagtgtccgcggccacgggccgcttttcgctggagcggttgggcctcccgggcctggccctcgccgcggccctgctgctcctggccctctgcttgcttgtccggcgcaccaggtaagcgcctcggccgccwggccacgcatgcgccctgggccccgcgggccgcgcgcgacccagatggcgaggggagtccccctccatgatttccagtgcagacagtcagaacttgctgcggggtactggcttcctttgggactttgtaataacaaaggcttcttctgtctttttcccacacatacgcgtacatattaaagctttgggaccgaattccatttgctgctccagcgtaagttgtaataagccctaggttggcggtatgcattatgcatcacagacacattgtgtgccttgccactgcgagttgatattttatggcctagaattcatagagcatttcaggaggggaatattcttaaatttcatcagttaaaagagaactgtttcaagaaaatgccagtgcatggtgtgaacaataactctgagtgcctctcttcctcagtttacctcactgtacctcatttggaaagctgaaataatagtacatgcctcgtgagatttttgtgagtactaaatgagttaatggagagtattttatgcagttgtcctatcatttttataaggacaaaacaaaacacacaataatgacaaaatctagacgtgtgtcactttaatttgaattgtggaagtagaaatagagaagttcagataaaatcattcactttgagtttaatctgtttttcctttctttctgggtcctattttcatactgctctggtgttcatcgcttttgagaaccaagcggatgcattttgttggatgataattgatatatgtatgtatatttgcatacatatgtatcaatgtatagatatctatgtgtgtgtgatacaggttgtttctcaatagttttgggggaagtgacacctttgtactgcatacaaatatctatggacatttctagaatgcctggagatgagtactctaggagtatttgcctttcttcccatgtcagttttcagagatgttcctggaatgtgcgcttccaggttgccttttccaatggctgtacttttgctttagagcccaagatgaggactcaggacacttgaacttcagtggtatgtgattctatgtaggttccaccttctctatttgcagggtctctatttgcatttgcaagccagttaagatgcacccctaggtatgcctttaaagagaggtggtaaaagaaggctgttggttctattcccactttacatgcagggtagaaacagacaagctgactagggcagtttagatcagtgaaggtgattggtgtgagaatgtggaacttgagggacaggaaggcaaaagggcaaggtaggctttctcttctagcattctgagaataggctgatctttctctatatcatgaaaaattattttactgagatattcatgccatcaactgccaattccttcataccaggaagaccgtttaatgccccaaatctataggacactactttgattatactgcatttcagtgtatagaagatagcttcatttgtcccagtacagagtcatgttccttatttctaatgtttggatagtttaccctaatgctctaygaaaatgatttttcagatatcayctctaagaacagaaacatggttaagagtccctgatatattcttacagattttttaaagcttatgctaatatgcatgaatatatgttaataaaaatcgtggggaaatataccctgtgttgcaccttatattttccactttgcaatacattttagatcccttcctatgtcagtttatagaagtcattatttgtaatgattatataaatatacaccatagatacacaaaaacacacacacaaaacatagatatctttgagcttttgtggaaatatttatgtaagatggtggagttgttatcaaaatgtatgtgtgctttatgttttaatagatgttgccaaactactctaagtctcaatttatgttactactaatgtagtgcaagtgccaatttctccacattctgccaatactggtattataaatcattttaattttgccaatctgatacataaagaaaatgcagcttcatttttatcccaaattttcatgtatttacttttaaaggaatttgtatacttttaaagaaaataattgtctgtttcttcaataatttatttttctattgggttctttttctatataatcakcaaagactcttatgtaatgggaattttcatactctttcataccagctgcaattatttttactattgtaatttgcatttgtttaagagtttctggatatatgtccttgcttagaaagcccttcttgttcctaacatgataaaaatattcagcacagttttccattatcacattgagagatttttatacatacatagattacatttttattctcattccattttcatcttttgaacaattatggctgaaaagtttgtaatattgcatagtataggaatgccagatgttccaaagtaaaaatttaaatattacctataaaaatggtaaaaaaatttttaacaatcggtaaaaatcaattcagaggtcatttgttgccttcagacacttaccaattccacctcttttggctacagtactttgatttccttttgtgaaattgtcttttcccttgttggatattatctggtgagactgtcaatcacagatgccattgcagtacttgtcaggagagatgacagtggcttagcctagggttgtgactgtggggttgatggaaggtggttagaatcaggatacatttttgacagcagagtcaacataatttactaatggactgaacatgatgtgtgagrgagatgggaatcaacaatgaagcttagaagttttgtttcccttttttttggttttgggttttttgtctgattatttagtgaacggtaatatcatttccttagatagggaaggtttgggagaattgaggaaatcaataattctctttgggttatgttaaataggcagtgagcaccaaaagctcaggggagaggtccaggcaggatacatatttgtgaaagccataaatgtgaagtgggaattaaagcaagaacaagttgagatcgcctgatgaaagggtttgatggagaagaggagggcctgggccactctccttatggaaactgagcctggcggagaaagaggaaaatattttacactcctttctagtcagttcctacccgagttctgagtcagttttgctcattctcaaacttcatataaatgggattatacagtatccttttttgcgtataacttatttctctcaacataatgattttaagattcactcatgttgttgtatctatcattagttcattcattctatttaattgtggtttgtaatatatataacatattgattgagagaagattgaggggcatagaatatagagttttctatccacaaccatttcggaaaattgacacttttcgaagtaattgttgcttttttttttctgaacacttccgccagtaatacatgagggtttacgttgctccacatccttgccagtatttaataatgccagtctattgattggaagcactatctttctggattttggattttgtttttttcctatgaagtgttgatttttgttttagcacgcagatacatttctggctaattattctgaactcatggaagcttagttttactctttgtcaaggtgaatctatgaaaagcttgagatatttacagattctctcttctttggtgatgctatggtttgaacgtttgcttcccctctaaaattcatatgttgaaatcctaactcccaaggtgatggtattaagcagtggggtctttgggttataattagatcattagggcaatgccttcatagatgagattagtgtccttataaaagagatcccaaagggctcccttgcccctttgtccatgtgaggacacagcaagaagatggccatttatgaaccaggaagtgggccctcatcagatactgaatgtgcttgtgccttgatcttggacttcccaggctccagaactgtgagagataaatctctgctgtttataagtcattaagtttatggtattttgcaatagcagtctgaattgactaaggcagatgaaattcaaaccctaaactctgtcaccccagtggtgggcagtggctgaagcctctgtgcagacttccagcagatcccttccgctgggctttttggggtcttccctgaagatgcacatgtccagggttggccaagaatttgaggggtgtatatatagagatttctgaagtgcctccttcttttctagatttttctccttgattgccagccacttcagtagccccaaactctgacaccccatgctgataatattgtggctttttccttgagttccagctgccctcaggggcaatcctgtccacccctggacctcactcaatattggtctgttctttaagggttgcctcccttctgatatctgccttcttttgcctattcttcagcaagtataaattggttgattgttttttttttttgtttcgtattttgttttctgtggaaatgctaggttggttcaagcaactttgccatttctggaatccaaattctatgtaagacatttaccagtggttatatctaggtgacatatttctatgggatggtttttcttttctttgttatgcttatatgtatctttaagttgatatcaataaatatgtattcttttacaaacagaaagaataatacatttaaaattttattttaatattttatttaaaataaactttgagaaaaatgtttaaagtgttttaaattatcatttccattggaaggaccagccttatgggtagtccttcccatagaagacttcttacttagaactggatgtgttacgaaatgcagttcatctacagcaagtcattaataacatgtttttgtccaataatgagatatatttttaaatcactgtgtatcataatagacttaggtacagatacccacttcccaaattrttgttgaagataacatataaaaataatctacattgcaaaagacaaacatgaaaacaaagatgtctccattctttccttacttgctcaatccctacaaaaatgaaaaaaaatagtttttctgaaacaattaaaataaatataagatgtttaaattctttaaataaatgaaaaatggattaaataaaatctttttaaaataagacacttaaaccagaattaaaagatttataatgaagaggggaaagtatttacagaaaatatgatggagagggggtgataacagattttatttttaacttacarttctggatgtgagacccaaaatagaccttagtgagctaaatgcagggtgctgtcaaggctgtattccttctggaccgtctaggagagaatacatttccttgcctctctcagtttctaggtgccacttaaattcaaatctcttgcttctactctgacacccttcctctctcttatgaggacagttgtgattacaccaggcccacataggtagtttaggataatatcctcttgtcacgatccttaacttaatcacatattctgccttacaaagtcttccctctgagcccccaaaattcatgtccatcctacattaaaaaaaatgcattcactccatcccaaatagacccaaaattcttaacccgtttacagtatcagctcaaagtccaaaatctcatctgtttaagagttccagatctcatcatctaaatcatcacaatcacgtatttgcgaggatctgtgtatgatccatcttgggggtaaaattccaaagaactctgtgggcctcccctgtgtgtcacagagattcactcctgagagatttgtttctccagatcttttctggataatcccatctctaatcctggcttctgctgacatggttgagggcaactattagtcattgaaaagattattccctaatcttttcaacaattgattaaatactcagtacaaatgaatgagtatgtatgatgggttgaactgggtttctgattcttcccaccgctagcaaaagttgtccagctatgcccttagctgtctatgcagagcactgtttcctcgcagtaatattagtgcytttaatattagtaatctcctaatattagtgccttctgcaatctggataggtggacgatttcccaaatcatcaattcctggttcctttttgcctaacagttcttctcttaatctctctctttcctttcacattttattataaatagtgagaaaaaaatttaagctaacctttcaacactttgcttggaaatctcctcagctaaatatctaagttcatcatttacaagttttgttttccacataactctaggacacaatagagctatgagttctgcaactttatataargatcccttttactccattttccaataacacattccttagttcttcatttcatgtgagccttcaccagcagtgcctttaacatttcctatttctactgtttatttttgatgatttaactattttttaagatatgttctttaccataccccttacttaattctttctgacctctcaccaagggggttgttgacgtccagatttctactaaccatttgttccagtaaatagttttctaccattctcctcagaattcttttagcatttgcccattacccaactccaaagccaattctacatttttaggtatttgttacagcagcacactacttccaggtaccacaaatctatattagttttctaatgttactataacaaattaccactaatttagtggcttaaaacaacagagaatttcttctcttacagttctggaggttagaagtcctcctgggctaatgtcaaagcatgagcaagggctgtatcccttttgggggctctcacaaagaattcatttctttgacttttccagcgtctggaggccaccaagacctaggtcatgggcccttcccccgttttcaaaaccagcaacatggcatctctaaatctctctcctacgctgacatttccactcccctcttataaggactcttgtgattacctcgggcccgtgctgataatccaggacaatgttctcatctcaagatccttaatttaaatcacatctgtaaagtcccttttgacatgtatagcaccaaattcataggcttcaagaattaggacatggacatttgagggccattattctccctaccataccttttgatatcaataatgaccttattaaagcttttgcttgatagtcacctgtaatagtttgttagggctgctctaacaaaataccacacacaaactgagtggtctaaacaatagaaatttattgtctcatatcctagaggctagaagtctaagatcaaggtgtttactgggttgctttcttctgtgggttgagagagagattctgttccatgcctcttgcccagtttttggtgattttctggactctatgttatatcatggcttgtggaagcttaaccctgaactctgcttttatcttcacacagaattctccctgtgtttgtgtctgtgtctacatttcccctctttgtatggatactagttatattgttttaggggcccaccctactgcagtaggaccacatcttaactaattatatctgtaatgatgctatttccaattacaataacattctgaggtactagaggttaggatttcaacatatgagttttgaggggtcatgattcaacccataacagcatcatttgaaaaaatagattcttcttatgtgagtctaagatttttatttctactaatcagatattgtaaacactcttgggcacattggaggaataggagtgatggttagttaaacgttttgattaattcatgatttaggcaggcattgtgaccttatggaaagttgaaaatagataacttatggcttaaagaataaaaagcatattgtatttcaaagcacccctctctcatacagctaagcatgtccttcctttagctttaggctttgattcctactaaaacacattgatcttggggcaaggagctttcgacttttctcactggacactcacaccacagagtaaatgagtttcagattttttccttttagtattttaaatgtaatctcctagggtcctttggctgccttattcctatggattttcaagcttgcctttaggtggaagtgaactttccttattattttgctcaagtgataatgataaggaaagaacactgatcctgaatgtggggtatggtgttggcccagaagatcaaacattggaaattagaaatgacaggatttggggtcttctagccttaatgttattcagagaagatttggttattgcttgtttgtgtaaataggacctyacacttttcaaaatgtgttcacatttctcacgtgctttgattcttacatctatctagtaactgtcatttccattttgtagttgacaaatgtgactcagctaggttccgtagactgctcagtggtcaccacagttcatggatcctttgaatcatgttgaaggaaggattctctctgagataatctgagaaatgtcaggtgctgaggcttcctcttctgagttcagtctttgacatctttttcttgttgaaacttttcttatgcattgcaggttcatttgtgtccccagatggagatgtggatttatttaaacatctggagtggcgattcaccacctgcacaagcagtgggtcatcttggcactgtgtgttacattgaagtagggtttctcaacctggaaatttggggctggatgattctttgtagtgggtgctgtcctttgcagtagaatatttagcagcattccttgcttctatctattggatgcttgttgcacaccctccccttccatgaaaataatgaatgtcctcagatattgtcaaatatcctcwgggtgagggtagagaaccrctgcattgaagaagtggagggcatgcccacagtcatcttctgagtgcaaaggcttgcttgtagttagagggaaattcccagtttggagtaggtatgaattataagtcagatagtaaaacactgggactcttactgccttatcaagatcctagatatggatgagtggctttttacttatacagtggaatattctcaaaatttctcatgattgacatgaaaagtagtcatgagcacagaaaaattttgagatgtatggttatgaatcatatacatttttgttttaaaataaactttttttcttagagcagtttaggcttaaaaaaaaactgagtgtatggccaggcacagtggctcatgcctgtaatcccagcactttgggagaccaaggtgggtggatcacttgaggtcagcagtttgagacaagcctggccaacctggtgaaaccctgtctctactgaaaataaaaataaaaaacattagctgggcatgatggtgcgtgcctgtaatcccagctactcgggaggctgaggcaggagaatcatttgaacccaggaggcagaggttgcagtgagccgagatcacaccactgcactccaggctgggcgacagagtgagactrcatctgaaaataagaaaaaagagtgcgaagtacaaaaagctaccctatacagtaagtcctcacttaacatcatctggattcttgggtggaaactgcaactttaagcaagacactgtatattctacagtaggctaattgatataaacaagagttaagttcctatagcatatttctggtcacaaaacctcacaaaatttctaaataaggaccaaaaacacttgtaattttaaacattgaaataaatgtgatatatacatacatttaagaaagatgaataaaaacaagtaagattattatttacccaattattccagttcagggtctcaggtggccagaccctctcctggcaactgtgggtgcatggcaggagccagcccttgacaggacagcacccatcacasgggccactcacagaaacccacagtcccctagatggagaccatttaggcacagcaacgaacctcaggtgcacagctctgggatgtgagaaaaatatcagagtacctggagaacacccatgcagacctggggtgaatgaacaaactccacacagatattgccccctggttgaagtgatatttttttctcatcaagttatcacaaaatgacattgaatgaaaaacaatggtatctggggacctgctgtactcccttcacccctacctctcgctgcccactccttcaattcccttactattaacaccttgtgttagtgtggtccatctattacaattgagaagtcaatattgatacatcattgttaactaaagttcatgctttacattagggttctttctgtgttttacattctgtgggttttgacaaatgtctaatgatggtttggttgtgccccaacccaaatctcatcttgaattgtagttcccataatccccatgtgtcatgagaagaacccagtgggaagtgattggatcttggggctggtttccctcatgctattctcttgatagtgagtactcatgagatctgatagttttctaagcatctgatatttctcctgctggcacttctctctcttgccgccacataaagaaggacatatttgcttccccttcagccatgtgtgtaagtttcctgaggccccccagccatgcagaactgttagtcaattaaacctattttttaaataaattagccagtcttgggtatgtcttaatagcagtgtgaaaatggactaatacagtagattggctccaagggagtggggcactgctatacagattcccaaaaatatggaagcaactttggaactgggtaacagatagagggtggaacagtttggaaggctcagaaaaatacaggaaaatgtgggaaagtttggaacttcytagagacttggagggctttgaagacaggaagatgtgggaaagtttggaactttctagagacttgctgaatgtctttgaycaaaatgctsatagtgatatgaacaataaagtccaggctgatgtggtctcagatggagatgaggaacttgttgggaactggagtaaaggtcatgcttgctatgcagagagtctggtggcattttgccccggccccagagatctgtggaactttgaacttggaagagatgatctagggtatctggtggaagaaatttctaagtggcaatgtgttcaagaggaagcagagcataaaagtttggaaagtttgcagcctgacaatgtgatagaaaagaaaaaaccattttagagaaactcaagcctgccacagaaatttgcataagtaaggaggagctgaatgttaatcaccaacacagtggggaaaatgtctgcagggcgttggagaccttcatggcagcccctcccatcacaggcccagaggcctaggagggaaaaacggtttcatagtccaggcctaacccctgccccactgctctgtgcagcctaggacatcatgccctgtgtcccagatgcctcagctccagctgtagctaaaaggggccaaagcacagctagggccattgcttcagagggtgcaagcctcaagttttggcagcttccatgtggtgttgagcctgtgggtgcacagaagtcaagaattgagatttgggaatctctgcctagattacagaggatgtatgtaaacacctggatgtccaggaagaagtgtgttacaggggtggagccctcatggagaacctttgctagggcagtgcagaagggaaatgtggggttggattccccacacagagtcactcctggggcattgcctattggaattgtgagaaggaggccaccatcctccagaccccataatggtagatccactgacagcttgcactgagcacctggaaaagccagacactcaatgccagcccatgaaagcaactgggaggggggctgtaccctgcaaagccacaggagtggagctgcccaaggccatggaaggccatcttggatcagaatgacctggatgtgagacatggagtcaacagagattattttggaactttaatgtttaatgactgccctattggtttttggacttgcatggggcccatagctcctttgttttggccagtttctcccatttggaatgggtgtatttacccaattcctgtagcttcattgtatctaggaagtaactaacttgcttttaattttacaggctcataggcagaagggacttgccttgtctcagatgagactttggacttggacttttgggttaatactggaatgagctaagactttgggggactgttgaaaaggcatgattgtgttttggaatgtgagaaagatgagatttgggaggggccagcagaagaatgatatggtttggctgttcccccacccaaatctcatcttgaattgtggttcccataatccccccatgtggtgggagggacctggtgggaagtgattggatcatgggggttatttccctcatgatgttctcatgatagtgtgtgagttcctcatgagatatgatggttttataannnnnnnnnnnnnnnnnnnntccctttccatcatgatagtcagttttcctgaggcctccccagctatgtggaactgtgcgtcaattaaacctcttttctttataaattacccagtctcgggtatgtcttcatagcagcatgaaaatgaactaatacagttacagtatcatacagaatagttccatggccctaaaaatcctggcctctgctattcatccctccctcttacctacctaacctttggcaaccactgatttttttttttaccgtctccctagttttaccttctttaaaatgtcatatggttggagtcatgttgtgtgctgccttttcacattggcttatttcactcagcaatatgcctttaaggtttttccatgtcttttcaaggcttgatagctcttctttttaatcactcaattattctaaattacatagatgtaccacagtttgttcactgacagacatgaaagacattttgatggcttccaagttttggcagttatgaataaaggtgctaaaaatatttatgtgcaggatgttatgtggacttcagttttgaactcgtttgggtaagtatgcatgggcaacattgctggatcacatggtaagtgtatgtttagttttgtaaaagtactgtcaaactgtcttccaaaatgactgtaccattttgcagtcctaccagcgatgaatgagacttgcttttttctcacatgcttgaaaacatttggtggtgtcagtgttttggattttagccatactaataggtgtgaagtgatacttattgttttaattttcagttccctgataacatagaatgttgtgtatcttttcatatgcttatttgccatttatatatcttctttggttaggtttctgttaagatattttgcctatttaaaaaaattaggttgttttcttatcattgaattgtaagagttctttgtatattttggatattttgaaaatactgtctcttagcttttgccttgtatctttagtcttttaacagtgtcnnnnnnnnnnnnnnnnnnnnnnnnnnnnnnnnnnnnnnnnnnnnnnnnnnnnnnnnnnnnnnnnnnnnnnnnnnnnnnnnnnnnnnnnnnnnnnnnnnnnnnnnnnnnnnnnnnnnnnnnnnnnnnnnnnnnnnnnnnnnnnnnnnnnnnnnnnnnnnnnnnnnnnnnnnnnnnnnnnnnnnnnnnnnnnnnnnnnnnnnnnnnnnnnnnnnnnnnnnnnnnnnnnnnnnnnnnnnnnnnnnnnnnnnnnnnnnnnnnnnnnnnnnnnnnnnnnnnnnnnnnnnnnnnnnnnnnnnnnnnnnnnnnnnnnnnnnnnnnnnnnnnnnnnnnnnnnnnnnnnnnnnnnnnnnnnnnnnnnnnnnnnnnnnnnnnnnnnnnnnnnnnnnnnnnnnnnnnnnnnnnnnnnnnnnnnnnnnnnnnnnnnnnnnnnnnnnnnnnnnnnnnnnnnnnnnnnnnnnnnnnnnnnnnnnnnnnnnnnnnnnnnnnnnnnnnnnnnnnnnnnnnnnnnnnnnnnnnnnnnnnnnnnnnnnnnnnnnnnnnnntactgttgagttgttacctaaaggccattgaggctctagtcaacagttcactataaatattaaatggcaaaaaggatactgaaaaatatatcagtagttctcaactagtgaaaatgctatcatggtggaatatagtggcagactattagtctgtaagcacagaatttataaaggacttattaagtatttgttctttttcaatttttgtgtttacttgcttttgttctaagtcctgctgtctctacttagctgcattatcagttacctattcagcatgataaaagtaatctgtgatcacagtaaattatttctgccagcaagtacctttgaggcactactctttgcctattctatttgtgagggatgttttattgtgatgcttctcaaactagctgtgatgaaagactggttttcttgatatttgttttaatttgcatctgtcaaggactgataccttggtaaattaagaaaaatgattcataaaataaaattttaaaaatgatacaaacctaaaggatttttcttaattattaaattgaacagacttaaaattgttctgtaaaattaactgtaccattttgcagtcctaccagtaatgaatgagacttcctaaaattggtctaaaactttctaaatgtttactctcaggctttgcatttgtctctttgtgacttatactagttagycctgcactttgagtaacactgatctttttaactattgtcaagtccccatttctctgagcaaagctttgtctggaagcaggaatgatcttgtcatttgtaattgaggacatgaggtaaagctcagaataccagattatcatgggttatcttatttgaaagcttagaggacagtcagcttgcacattgggtttccttggcactaaccagaaactctttcctcttagttgctatttggaccaaaaaaaaaaaaaaagtagtatggaattttttctctctttcagccctctcacccgacatacatatcattatacycccctctccaatgctgtaattggtaagaaataagattaaaatgctgttaagataagttttagtcaaagtaaaaatttaatgatttttttgagttctgagatgttaaggttatgtagataatgagttgttttgaaatgttgatttgttgacatcactgtatcacataagtcaattatttctgtttctaattacttaattactctcaagcaagatccttcgtgctctagatccctcacattgttaccactgcccagggaatgggaagaaccaggctgccatcattagtggatgtttttcttgtttcttccccttttcttataataaaatataggaaaaggatgtggacagctgagagtaaagttattttctattcaagagtatgctgaacttaacaggtggatttttgtgtttttcaaaggaagtgacagggagatctgcaggcacctctgtggctcttgattaatagagaatcacttagtgcatcatgttatgcttttccttataaagcccagaggttagattgtttcttgttaccatttgagacagatttctggcttgcttcactgttacacattgtctttaaaaaatggtcctaagatagagaacattctcattgtgtaataaaaacatgatgaccctaaaataaaacattttrttgtttattttgtatttcattcaaaataaccatttaatgattcatgggacctgcaggagtgctaattggatcaacattggagattgctcaattctgtaatcacattttaatggtaaatcctggttattccttttaaacacttcatctgttttgtcataacagaaaatcaattcaaaagttatgttggattagcataaatctcttatctctatcagaagaatatcttagagtgctcacctaataatgtggggcactgtcttggtctgtttgggtgctctaataaaaatatcatagactgggaggattagaaagatcgaagttatttttcatagttctggaggctgggaagtcctagatgaaggttccagcagttgctgtgtctgatgaaggcccattcctcatagatggtggctgttcactgtgccctcatgtggaggaaggggcaaaggacctgttgggcttcttttataagggcactaatcccatttgtgagagctccaccttcatgacttaaacacctcccaaggccccaccttctgttaccatcaccttatagattaggtttcaacatatgaatcttggggtgatgcagaaaggcagatcatagctggcaatttgtgtatgtgaagtcgtctgcagctcagtctttccctacactgggaccttcttgcagaaagtggtgtcatggtgggcaaagagcatggctataaagctaaaatgaacatggatccaaaattcagctctactctaatacaaatggtgacttttgagaggatggtaagggaagatggaaatgaacatcatcgaggtcctcctaggtgccagcctctgtgcctagatattttgcatctattgtctcattttatcctcactcatgttcaagaggttaactattattaagcaattttcaaaagaaaagactaaaataataaaagattaaggtgctgtgctacttgggaatagacctgggtttttggttgtagatccattagactgtgataggcagaataaagccttctcagctccagagatagccatattctaaccttcagaacctatgaatatgttcggttacatggcaaaggggaattaaggttgcagaaggaatgaaggttgctaatcagctgaccttaaaataggggattatcttgcagtttttgagagggctcagtggaatcaggattattaaaactggaaacaggaggcagagaaaggaggtcagagttatatgatttgagaaatacttgacttttgctggcttggaagatggatggtggatgaagtatttcctgagccaaagaatgcaggcagcctttagaagctggaaaaggcaaagaaacagatttttccctggagcctccagaaaggaattcagccatacctgccctgccaatactgtgatttttagcccagtgaggcccatgtcttctggcccacagaaatgtaaaaaaaatgaacttttgttatttaagcccctaaatttgtggtaatttgttataacattcttagaaaactagtgtaatggccatattccccatgttctttgccttaaactacactgcctcttgcaaggaggttcaaagggtgaaaaagattgggagattggaccttggtggactttgctggttacttatgaggagcaggatggaaagtgaacattctgtaataaatactcagtgcctttgccactgtgctaatacatcatcatttgagaatttttggtctcagattttacagattatcatggggtcacagattagcattgatttctgtgttccttacccatagattcacaagtaagtcttgaatgtttgttatgcatctagcaactccatgaattttaaaaatcgttttgaaaataagtcagacattgaaggtattgagactcagatatgatttggttaggagattttttcttgcccaaacccggtgcatacctacttatggttgcctgcagcctggaggagaaaactgagcttgactctgagaatttgaagggatctaagggaatgggagttgtacttcaccgatttcccaaaaataatagagagagccacatccgcagaagaaaaattaacaacttcttgtaggaggtttttgtgctttatacaaagtaaaatcccattgaaactactccaggttactgttctgtgaaaggcaaaggacaaaattatagaaagttactttgttgaataagagaaggtgacatctattatatcatgcatttttatagctgaattgctcatttttatgggtttggcatttttttcaatgtagaagtatttgggatgggatcttttttttatataggaaagtggaaaggattaattaagtctataattgcttaatataaaaaataatagaaagcctaacaaaagtacacccataacaggatttaaattcattgtcatttctcctcataacttcatcctaaatagttgacattaataaagaagaaactttagaagctttactttagttttagcacctagcatagtatctggcactgagtagattctcagtgaatatttgttagaagaatgaagggtgaatgaatgaataaatagtttggtacagtaattgttatctttttccaatatgaatattttagagttctagatattgatatcaaaaatacaaactgcatacaaattgaaacctaatgtcataaaaccacattttctgcagttccattaaaaactgaagatttcattagcaaatgcttacctaattgtgaatattttataaatggagaacatattagtgtaacgacttgttttgcataaacctaactgcacacagtaactgaagtacagatgacctctaacattcctgcatctgaaaattcagtttaaaaatatgtataacagtacatatttaggtttaggtactggactttcatgtttaggtactggatttgtataactgtgcttaagattctgcttcctggcataggtagatagtgctgtttaacaaatgggaactcctttgtgaaagggctgcgcctgtttttggtaatcacatagaattacacacatttggtcgttagtacacttgaaacaaataatagtaggatgagagctcataaaccatttaaaagactagttttctgtttgaaaaaccaaagttgtcctggtgaaagcagtgctttttattagctgtatcttagaactatgaatactcaaatcatcttatcccaggaaggcaagaggcttactgttgggtcactggcatggagaacttagtgttgtagtattgtatttcagtagtgctgtcctttagggctagaatgtaaaggaattaacttctctggataataagtagatgtcactttagcactggctactccaatattgttggttcctttttatattttttacagtaagtatatagtattatagaattgattttgacttgtaatagggatggccaacacttttgagaattgtctatgagcctattatacatagaggaaagtgtcttatattcactattgtattgaattttattgaatcctcttatgataactttcctcattttatagaggttgaaagtcagttttatttaaataatgtttctaatgtgatgcagttcaaactcacaatgtttgacttcaaacttaacttcttaagttttttccttttttgtattctttttaaatctctcttaaaacaatgttctkacatttgcactccccctttactaaaaatgaaaatattaagagctagtacattttaagcattgctagaagaaatgtaagtatgatatgaatacacacatttacacacatttggactttttaaaaagaatatattaagcttaagaacaaagcaggcaaaaatggtctgctgtctccttcttgcactagattgtgtgaaagccamacttgacggtcaacattggcaaatgccttttttgctctatcccatttactggctattgcatccacttgcttactggcttagtagaggtttggggtctactgtgtgcctagactgccctatgtcagatgcaatggaaagcaggagagaagatgcaggaagttgccttgtgacataagggtagtagccaggcaagagtcacatctcagtctttctgaaaacttgtaaaatttgattcaagatttgttttcaaaagtaaaaccagattgaaggaacctggaatcaaaggggaaggatattttcaccccctgggaattaattatagacagtttagtgtgtttctcatcttaacaatccttcctaaatggattatgcaagctgttgcatgtgtcatcgctgcagttactattgcacttagagtagcagcattaaatattgaatgagaaagtgttacagacagttcaaatattactttatgtaccaaaacatagtggttcctgatatgtctcttgttgctttcaggtctatagcaaacttttaatcttgttttggattttgaatgacctttttcacatgggcaaagaatcttagcactgaatacagaatgcaaaactttgtccttatatttctttgcagtcatgcatgcagattctttcacttacatgcatgtatatgtgtgtatatgtagtatatgtatatacatacactacatatacacacacatgtataaatatatgtgtgtatacatatatatatatatatatatatatatatttcaaactagttctaccctttttgcttctcagtgtgttgtaccatatggtgtagagcatcatgccaaaagataaaaatattcctagaacatatgaaatcaccagtcaactgaagaagggtaaggacttttgaccaaagcatttatgactctgatgtacttgcaggcaatagtatatggcataatacccacaattttaaaaagaagacatattttaaagttaaactgactcttactttttaagggaaagaatccaaaaataaagtctttgaaaattttatttttttacagaaattgattcaaatcagtgttttttttttcctatactgaaattctccatatccatttatggaatttgccctgattattttaatctctagagttaccatacaatttggctctttaagttttcagaagcagagacttggagatgaaacccgctgcaggtggatggagtctttgggttatagataacatggccattatatagttttctaacttattccatgggtaacacgttttaactagtaaagtgcagaagataagatttaacaacattcctagggtctatgtaataaagttgtaatgacaatgtgattcgggctgtttcttttgcatcaataaataataaatagtcggcacgtggtccatgatatgccatattttgctactcagattttattcattttagggctcaaattgacctgcattcctttatgctacattgaatattgttttcaacttcttaattagacaaaaatggggaaaaaacttaagtggttaatttcctagctgaggcttgagcatattttttactagagaaataaactattgcattaaatagcgtaagtgctattgctatgaaatttctgggtagcagctctgtaaatagtgctcatgttatatgccaaaaatcccatcttacccttcatgtctttgctaattatgcttactcaccttttgtatttaatcacctctaattttttttttttttttttttttacaaaatgaccctacctgggtttactttttacatgatggatctataatagagaagatgtctttcctcacctattgctaagctcatggctgagatcccaataacaaaagatatattaacaagaaaaaagcatgcacatttatttagtataagtttgatatgacacaggacccttcagaaataaagacccaaaggaacaggaaattctatgtatttttctgacaagtttgatgaagagtagacaattgtgcaaaagtatgattgaaccaaggaggtattatctaaactgaagggcactttgcaagtcctgttcagattcttcttggcatctctgtgtctttgaggataaggttgttcctttcctctgggtgtagggagggtatctctggaattaaagtcttatgacctcctttagaggaagggcagctaggtcttacgacctgctttggggagaagaaaggaggggaagatgagagtgactttgctgcttctgctgttttctcaaatgccatgctgccatattgtgggggagcatatgctaaaccccaccccttgctaaagcacatctgagtaatgcctctcctcatttcatgtttattagtttcttataaaaaggaacacgattgaattgtctcaagtrctgtgtttatatgatagggcaagagggtttaaaagtattttaggataatcaaatttgtgggacatctcatgccctgtgtgtgacaaattgataataatgctagattatttaatcctgaaaaattggttgttctttatttgtcagcaacttaaagttttctaattgtatttaggatatgcatagatgcatttgcaaactgacctccttctttagaacagataattatcaacaaaaggaaaaacaagcaagaaacatgcagagacggcatttctgtcaaaggatgactttagaaaaggaccagaatttgggctctgtccagagcatactttttgcagggtctgtgaaacattggtaagatcaagtaaagaagcatcaatggcagtaagcactttcctcttcgaactactgtttccaggtcttcactggaatgctacagttacaaccaggtctataaaataactaagaatacatctccttattgaaagagaaaaagtaggaccatgctgtttatgaagtaagcattaatggagcacccacagcagaggaaatggcatgacaacatttgtcactaactttctctaaggctcagttttctcatctgtaaatgaagaagctgaaccagataatcatttgggaatgatatgattccacaaggacattactattctcacatttaccacccccccaaatcacatacatttctgctatgtgaaatgtgcctgtcctcaaacacaccatgcctttttctgacttcatgatggtacccttcttttcagcataaatgctctacctctgtggaattttcccagctctctcccagacaaagttcactgtctcttcccctaggttcccacagcacgtcagaattcacatcacaatgtattataattatcagttaatatatattatctcctctggccagtatgtcagcaactaatatgataatcaaggtctattttttactcatctctctgtcctcagcacctagaaaaatgtctggcacattgtaggtcatcaacaagtaatacattagtaactaaggaaagaactatccttaaataaaatcaatgcccaatcataacatggaaaacaaagcctgtggactrttttctttatagtcattattagttcccaaaatgccgagaaacctgagaatacacagtttactataaggaatataactcattggctccactttagttggagctaaggtggttatttggaattcctcttagactgcctgtcaaacaagaacaatagtttcaagactcactgtataaggatcacaagatgctgaatcctagagtgagttcaggccatgaaaaacatctcatatctgaagactggagcaatgctatttcagagaattagagtgtttttttttatggaatttatttactaaggatatttggagatctaaatcagagacaagaactcagatcagattggaactcagttcagagacaagaaaaccatttgtaaaaacaatttggatgaaactcttgttacagaaaggaaacagagaaggtaagatatttgaccatctatatttatacttgtttggaatgtgtcaggtcaagatatggcagagtgctaaagagcagggctttagaatcagagttaaggaggtgtttgaatactagctcccttacttacttgaggtgagacttctcacaagttattttacctctgaggatagaagaagttttggaggcaaacagttgattttggaaatgttttattgcccagacccttgaaggaaagcagatatgcactattcagtaaatacttattgaactcctgcaatgggaaaccgtgaggcaagtagaaatgataataagctccgatttctgccactaagggggttatagccgagttacaaagactagtataaatatgggacctgtttatacccctctcccaatgttcacacttatgtgttctattaattcaaggttgcttaacaaattcaagatttgtcagtgtttttatatgtagtttttttttacttgatcccctgaagttgtgacttgcacaaggaggagagttaaggctactagtaacaactgttcctattgacatgacttttccaacaatcactaaggcaaaagaaagggactgttgataccccaatatccagcttcctaatctattagtctttccatttgtgtcttcctttcagttcaagtcaacaagtatttattggctacctactatatacatgctttgttagctactggttacatagagatgaaagtcagtttctgtcctcaaagaaccctaaatctatagaggtacgtaaataatccagaaattccattacatgatatgctaggtaatcaggatagtgataagccacagaaaaacaattgctgataatttagctagatgggagaaattgttaggagtcagacttactggacttggtgttggactggatgtgggaaaaaggtgggagagagggaaggtataaggatgaactaggcttctgatatgaaggaccgtactaggtgctatggtttgaatgtatcccccaaaggtcatgtgttagaaayttaatcccacttcccttacgtatgacttaatgttgcatctgtcctcatgaatggactgatggattaatgagggctctggcctcgtgaatggataaatgtcactgccatgggagtgggttatttattgtgagagtggatttgttataaaagtgagctctctctggctttcttgctcttgccttcttgccatgtgatgccctccaccatgttatgacagagctagaaggcccttaccagataccattgccatgctgatagaattctcagcctccagaactgtgagattaataaacttcttttctttgtaagtaacccagtctgtggtattctgttatagcaacagaaaatggactgaggcactgggttattcaacaagacagagacagtataagaagatgaggtttggggctaacagaataagcctactttgttgaacattttgaatgtacagtgtctatgggatmccctgttgtactgttattttttgcaattgtaaacatgcacattggaaagctgaagagtaggcgtgtgacctaaaaatattttactttggattttttcaaactgcaattgatagggaakatcccatttatctgcgatcctgaagctgtaaagatatgagcctgggaatagtttgcagctatttgccctatctaaagagaaacaagtgtacattagaagaaattaaagctgatgagcagaaaaaacaaagaggatatagctgaaaaccatcatcattcattctgagtttcaaatatataccaggcattgttttagatgcttggaaaataccagagaacaaaacagacaaaaaatatctgcacttatggagctcacattataagcagatattaattttaaagcacaataaatacatagattatcatataggcagtgatatgcacagggaaaaaatatagcagggtaagannnnnnnnnnnnnnnnnnnnnnnnnnnnnnnnnnnnnnnnnnnnnnnnnnnnnnnnnnnnnnnnnnnnnntggtagtaagaattagctctcactgagaaaagtaatatttgagcaaataattggacaaagtgagaaggaggagatgggatatcagtggagaaagcattccagtcagagggtacagccagtgcaaggacagtaaggtgggttgcttgatgtccctgacaaatggtaaggaggccagtgttgtgggagtgaagtgagggaactacatatttactgaaaatcagaccattgtgaggcttgatttttattcctaatgaaatggggatccattgaaggaataggaaaagaggagtcaggtaatttgatttttgttctgaaatggtgtgcagtagacagggtagaagccagacacctgtaagtaggttccagagaaacagaaccaacaggatgtgtgtgtgcgtgtgcgcctgtgtgtgcrtaagaaaactgtaagaaattggctcacatgattactgaggctggcaagtccaaaatctgcagggtgaggcagagcactggagactcagagaagagttagtgcggcagttcaagtctcaaggccattggctgcaggattcttttctgctcctggaacttctttctgttctattcaggttttcaactgattggatgtggctggctcacactctagaggacaatctgtcctactcaaagtccatggagctaaaagttgatttcatccaaaacacccttgcagaaatatccagactaatgtttaaccaaatatctgggcaatgtgacccagacaaatggatgaatatatgccaagccatcagagatgggatcttgcatatgagaggagggttgggtttaggcagaggcatggattatttccttcatagaaaaagatagtaaaggaaggcatggtgtgcaaagctagttggtggatgatggtggtgctgagagtctgtaaaaattctcttcagattgcttcaattttcttatcaaataggaagcaaggtcatcttatgagagtgacatgtgggatgaggtcttaggagtttggggaaagaagggaaggtgtacattacttgtccaggaaagtggatgagtgaatggagtagggaatatggtatgattgctggacaggatgcagggtcaccccaggtttgtggtcattaattttaagtgacaccagcaagattgtatgtttttctctgtccatgttcagctgcatgggcaaagtatggagcaggcagaggattgtgctaatggagttatagttttgtctataagcttcatgtagaatgagaaggagaacrcagttgagagagagagccagggaatgattatgatgattggccatggaatttaagctgggaaacaagcaagagactacagcacatgggagagggactcagaataggtggagggatcaaaagacccctgagggcattgacccctgcacctgaggccagttttagttttactcctgaccttagttatgtaagcacattcttctttgtgtgtaaattagtgtaggttgagtttctgttatttgaagctgaagaattctatcaatttggcagaaaatataaagaaaaaaagaagtgagaacctaactgacaaaacgtgtagactccaaacaactcaatgttcacagtgtatcagaaatattattaaagcatgtacatttttaaaaagaatgaggctgggcatggtggctcacgactgtaatcccagcactttgagaggccgaggcgggcggatcatgaggtcaggagatcgagaccatcctggctaacatggtgaaaccccgtctctactaaaaatacaaaagattagctgggcatggtgrcatgcacctgtagtcccagctacttgggaggctgaggcaggagaatcacttgaacccaggaggcggaggttgcagtgagctgagattgtgccactgcactccagcctggcgacagagcaagaccctgtctaannnnnnnnnnnnnnnnnnnnnnnnnnnnnnnnnnnnnnnnnatgctgatatcccactcttgagattctgattcaattagtgaagattgaggaagttgttttcaaaactccccatatgtttagaactatagctctaaaccatgtcaactaagttcttaagtgacagcttcaaatttttagatgctgcaaattaatctttgaactaaatgatcaactaatgtttggattatctctgcatgctactgggatatttatggggaagggaaagcgtgtttagatttcccctggatagattttatagctctagcaactagccatggggagagcctaaggaggctggcacatggactgtgggttcatccacccaatgtgtgtaactctggtgtgccaggcactcttgagcaccaaggaatggctggctgccactctcaaggagctcatccttgggtttttatttgtgttgtttgtttaatgtttattatggtgagtatattggttttagatttattgttcaatagttttatttttatggtagatgaatactttattgcatattaagtgtccttaaataatcagtgtgtaaagtatgccccttttaataggtatttataacagggcagagaatatactggaaagagctttggtctgcctgtcaacagagctgtgcttgagttccatttccatcatatctcagctctgagattgaagacaagttcttcaccctctttatgtcttaaagtccccatctgtaaaatcaggggcttttctgggaactctaagatctattccaactctgaaactttatggcttaactatagtttaatttttttccaaatttttttttgagatttagaggttttctattgtttggttttatggcacacggttggtctcatctatgatttatatatccctccatgttcttagagtagtgcatggtgccaggtggaaaacataaatgggcttgatgacaatctgcttcccaatatggcttttagggatgcattgtggtgaaactgaggacattcacacacatgcgtccacacacgcacacacacacaaatgtaattgagactattaacaataaagatgagataaagaaggatggtaagaactttgggacttgctggacttcagaaaggaaggagttgtcctaccgttgtccccgtattgttctgtgaagacttgaaggtggtggtacttggcccactgtttggagaatgaggtggatgtcagtcttcaggaagaatagacttttgggtgtatgctcagtaggatggggggaatgaaggtggaggtgtgggttaaggcacggagacagggaagtgaagattacatttgagggaggagaaagcgatcaatttgccttggaagaacaaaaggaaagtctggaaatgcagaaagtatggatgctgaaccacataacagcagatggcattgctgtgaagtatactggatggaatacattcaagcgttaatatttaattctttttgtggaaggtcacacaattaaaatttaattgggcatggaggcttaggacggggtaaaaaagtctttagaaaaaaatggaatacaaaattgggtttatgctgccctgggaggatacacagaggatagggtgaaggtaatcaggttttgggctctcaacttttatagactttattttttttctaacattgttagcacaaaaacatgctcgtgtgccaaggagtctttcctacttcatctttcacaatattccaactctcattgaatcttactattgtctcaaggtataaaaatctcttggctggrgagaaaaaagtagagattcaaatatttgtgtttgttatgatgttttcatcaaggcatggtgccatcccgttccatagatcttattatgagattaaattactataaattttactttttaggtttaagagtaatatatcacaatgtgtaatgcatttatttggttttactcaattgtttgcaactaatgattgtgataatttaacaataatctgtctcagaaaaacatttttaagartgtgatgtcatgagcattaaaaacaatattttaaaatttagtatgtataatatttgttgcaaaaatgtatgatggggtgggtgatccataaaaaaactgatgtgtagataagaatcctgtgcaacaaactcatagagtttgcagtttatgttggaaagcccaccaggaagttagagccactcaaaggtaggtgattcttttattgagggctttgttttgttttagtttgctgtggtttggcttagtttttttaatggtgaagtcagacatttgtttgttgcctaaaattgggaaaacctttgaattaaagcttagccacataccaccatataatcttagataagctactttgctgctatgggtcacataagtaaattggacacaataagacttatctcatagtttgacatgaggcataaatgagacagaagatgttaagtgcttagtagagtttcatgtgcacagagagctctaagtgaacgatctctttctttttctctcatatgtgaataactcgatgattgtttatcaattattaagtgaaatgtgactttaaaaagcagcctctcagaacattattacaggaaaagacttaaaacatcaattttttaaacaaactaaatattgaaaatgcatcagaagagcaaattactaaagaattgctctctgaaatgtaaataacacttttttttttttttggagttgcacgatttaatagagtgaaaacagagatcccatacaatgggaagggacccagagggggttgcccctccttgcttgaatgcctgggtttatatcccgatcattgtccctccccctgtgctctcaggtgatatatgatttgagtatttctttacctcctgctttagcctaatttgtattttagtgaaccctctttgctacctgattggtcgggtatgagctgagttacaagccccgtgtttaaaggtagatgcggtcaccttccccagctaggcttaggaattcttagtcgacttaggaaatccagctagtcccatcwcttagtcacccctctcaacaggaaaacccaagtgctgttggggaggttggccaacgactgctcttaactgcttcctgctgaactggggcgtagtaggggtygtacagttgagatttcctcgggagggatgccttcaatgtcattaacattggagcatgggctagcaggctggtccaggggtctgcggtagatcttactcatggactgcatctagggtttcatttgaagaacgatttgtagttttacagctttgattctggaagagacaagcttaaacaaggaggttaaagatacagggattgaaatgtatgacctgaattgcaggggattatttctttggcatacttcacaggccctgactatctgcttgatagttttgaaaaggccttgtccagtacataatgatttggccatctgatgggtgctatcaatgcctaagtgaaacgtttggtgaagggttttaaaatttccattggttagctgcaggcaaaagtatttttccttcttcggggctagccatcctgaggggaggaaactatgtcctcgtgaggttccccgttctttcttctgctgagtactggggcttggtttcctggaggggattaccccatactaggggtccttctataagcatttctaatggagggtcccgccttgcggctcttttggcttcaatatccgcttggcagttcccttctatttccctttcctttccgatgaacctggcagtgtaagactgccacttctttaggtttctgtactgccaataataatctcctaatggcttcctgatgtttgacaggtgttccctcggaagttaggaattccctttctctccatattgctgcatgggcatggaggattaggtaagcatacttagagtctgtatatgtatttaccctttttccttctcctaattctagtgtataatggcctctgcttttgctaggatgtctctccctaacaaaggagtgaggctttcaggcataattagaaaggcatgtgaaaagagtaaagttccccagtcacaacttagtggctgggagaagtatctagtgactgcctgtcctaggacccctcggatagtgagatatctggaggacagttgtctgggacaggagagtaagactgagaaggctgtaccagtgtccaggagacagtttacctcctggctgtcaatggtcaagcatacctggggctccgtgaaggtgatggcatgggctggcgcttgccctgggcaccctcagtcctgctgctggatcatctggttagtggcttctgactcagaggaccttcgttccctggggcagtgggccttccagtgattcccttgacataaggggcaaggacgagggggtggcttatttctattcggacaatcttttttaaagtgtccttgtagaccgcactggaagcaagccctattaggcattcgagttgcccagcctttccctgttccagagcctccaaagtccacttgcctgaaggccatgactaaagcagtggcctttttttttttttaatcccgtttgtcccgttccrcctgctcctcctgatctctattataaaaaaccaaggttgccaagttcattagggtttctaagttttgctctgggcctaaggcagacttttgaagttttttctaatgtcggcaactgactgagtgataaagttaccctttaagattagttggccttcaatagaatcaggtgacagagaggtttggttcctcaatgcctccctttgtctctccagaaaggcagtaggattttcttcctttccctatgttatagtggacatcattgaataatttataggcttcttcctagttttccttagtccttctagcacgcaagttagcaaatgtctgtggcaccaatctccatgttctgattctgcgtcccagtgagggtctayactgggaactgcttggtggcctgtggggaattgttctttttcctcttttgtcatcctatcattgacctgactgagataccagaaatcgccaaactctcaggctgcagttatggcagcacttctctcatttggggctagtgtctaatctagcagtaacaatatatggctccaagtcagataaaaggattgtcctaacccttgtaaaacatcaatatagccatcagggttatctgataatttacctaggtctattttaatttgcttcaagtctgagagggaaagaggtacatgcactctgggccgaattctccagaatacatcttaggggcgtttttgccttggggggaacatttcccatctggaaaaagaacatagggatgccagcacccctagtcattttctgacgagcattagtccaagagcgtcttctatggtcctaatgcttactcctttccagggtgcgtaaccacccatggacctctgcttatcggattagttaacgctcactgatgtagcagtcctgcaccccttttcttgcctttgttgaccacagaaaaaggggtccgggctgctggattctagcagtcctttaccagtgtgcccaacattgcctttgtgctcaggggtgagtcctagagctgggctgggttcctgagtatttcataacagcccagttgccccatcaagatgcattcccataaacaacagttcttatgcaaattcatttcatagagggtgtaagcaaccttttgagccaggattgagatagagatttttaaagatgataaccatttttttccaatgygaacttcctttatgtctgtggactagactgtctaaggccgcaagattaggataatgcaggttacactgttaacttttagcaaactttacttttgttgaaaaccttgtagatttaggatttcaattatcctttgctattaataagaccttgtttagtccaaattgacttagaattggtatagatttttttttttcatcctgcaaatactttaagtcttggctgagtacaaacaactttcaggtttcagcagaccaattattaggcaattttcctaactctgcttctacaagagtttccctatcaattactgaatatccattgtgtttttttttttttttcctcaatcacctgggaggaaccatctatcgtcctgtctaggtctggtcggaactttgtgtggtaattgagatttaaatcccctgttaggaaatctgcagggtttagggaatttttcagtggttaatgttaaatcacctttttctaacagaatagcactatccttttagattttttagttagtaagctacctttttgctttttgacttaggatagtctgaactggtgaggtatgctcacaatgagttttcctctaaaggttatttttctactttcttctgttagcaaagcagttgccactacagtttgaatgcatttgggccatctgtgggttactgggttaagaatttttgataagaaggctacgggttgtctcagtgttttcagggtatgcccttgtttacactgacaacaaggtagtattggagtgttacagggtcacggagaaggccttcaattatcaattataggttttaaatttaccccagcttttaaaggaatagggcacattgttttttctttactacttctatctttctcttcctttctgtctttctctctgcctctctttcccttctttctgtctctgtgcctctgacttactcaattcacttttatcctgatctattatgttgttgtagacccagttccagttgttaaagtactgggttatcagttctaaggccctgaccaaggagccaaggcttggagattgtattgcagggggcgggggaagggggtgggggggggcagcgtggaagctgggtagaaattcggggaggagagcatcttacacaatgggagagcaatcttcctagccatttacaaacttggggccctggcaagagtggtggggaacgggtcccacataactgcctatgttgagagctgtatacctaaattgggagggacaccagggacaggactccctgggttcatagcctagatgcctaaggacacagtgtagagcttccttagatctctttggagatacaacttgctagaggaaatgaaagtctgaaccattagtacctaggaggcagggatcggaggaagtagattcagagctaaggagaattttggggctacactttcaagaaagtcatggtcgggacccaggaggtatgggtcagaaggaaaggtaggggcacacgcatgggcgactgttgggtagagacttctggctatgccatgatctcagctggctaatgctgggagttcgggatgacagctttctgcctctagtcggcctcggcttccccaggaaaactgaaagtggaatttggttccaggcagaccagtgctcccaacccaaaagagttgggggttgttagaaagcccttccccagacagcctcacacctaagtcttaagtccggcagccatgctaattgtttttaaccggccaacaggtgcccagtattttcctccaattctaaggaaggacaggacagaatagcaagcgaaartggtcggatattactcaccgctttagagaatccctgtatgaggccaccaaatgttaccagtgggtctttgttgttagagttcccaagacggtggcgggctgctcccaagatggtggcatcccttttgttctctgacctggggttcttggcctcatggattccaaggaatggaaccttaggccatgaggtgagtgttayagctctattagaagctgtgggtcacagaagagaaccgtggaacccagcaactagtgttcagctcgattaggacgaacccaggcacttagctgtacaggaacaatggcgagcctttagcccgatcaggagcagcaatgggcgccttgctggatcaggagcacagtggacaccctgctggatccggaggggtggaagtcagtggcgggtctgcaacagtggcaaacagcagtggtggacggccagcgaaagctcagctcgagccataacaaacacggagcaggagagtgtgcagttgcaagatttactagagtgaaaacacagctcccatacagtgggaggggacccaaagggggttgcccataaataacacttttttattcaccttctctgtcttagatttttgtgcactatgtgtacctatttatctactgattagaaacatctgaaaaaacatatactattcacccagtagttttacaatgaataataaaataggtagagaagatatgctggaaggaaaactactacagggtcttttggttaattttgttcctaagataaatccataaaactgttatataaaagctgattggagagatttgaacttttatgtgaataatggccatgaaaaatgattttctttcaagaaggatgtgagctattgaaatatatgcccataatactgtttagatttgtgctattacaaacagttggtagccccaggtcattgcattatgaaaccacgttttcaaatgcattatgaaaacttagtgaagtaacctattttttttacctatttgcattttagtttctcamactgattcaacccaagtattgataactcattgtcttaatttccttgcatataaattatcagcactacagaaattttaaaatgggtgctagttgttaatataagtaatattggctattacacctgtaactggagacaagtcagaagagaaaatcaataccatcattcatgaacaggtatttttatcctgatatcaaaaataattgtaatacatcctcagtattaaacttctgtagctttacagataatcattttagataagacttatgtagctttacaaataatcattttacctaacataaaattacagctataatgttattattagtgcactaaaaaaagctactatagtaggtttttgggctctaattaggataattactatattctgtggctttccataagctgagtgtgtatgttctgtgctatcatttataacagttttagcaaactaaagacatttttacatttgaaaatttggaaagcagttcagaacttcaactttggaacatgcctgtttcctgcttctctcataaaccttgcatttctactcaccatggaatatgcataggagcgaacagtttgaagacagtactgtacacagttcacacaaggtcttgttaagaatatgggactacatcttcaaccatatggagtgctgaaattttggggaacaaacccaaatggtaatctgaagtcttatttaggaaacaaaacttgtgtgactagaaatagaccaactcctaaatatattctggtttatgtgcattctggtgtaaaacacatgccactaagtaggtctttaggtggtcagcagagagcaggcatattttctacccaaagaatgtgtccggcactctgggaactgactagactcgtttctagtttgataatttccagtcatttctttcctagtgacaaatctgtacttacatatatatacattttaaaaatattattaatccctttgaggaaatgagtgttcattttaagacattcccctccccccaagctttaytgacacataattggtaaataaaaattatatatatttaaagtgtttaacatggtgttttatatgagtatatcttatgtaattattctcacaaccaagctaattaacatatacatcagttcacgttaacaattttttgcagtgagagcatttaagatctagtcatttagcaaatttcaaatatacaatatattattattaattttagctaccaagctgtacatttgatctctaaaacttagtcaccttacagctgaatgtttgtaccctttgactaacatctacccatttccctcaccttctaatccttagcaactaccattctactctctgtttctctaggttcaacctttttagattccacgtgtaagtgatatcatctaatgcttgctttattgtgtctggcttatttaatttagcataatgtcctccaagttcattcatgttcttgtaagtgacaacatttgcgtctttttaaaggctgaataatattctattgtaatttctttatctgttcatccattgacagacacttaggttatttccatatcttgtctgttgtgaataatgctacaatgaacactggagtgcagatatcttttgaagatactaatattatttcctttggatatatacacagtattgggatggctggatcatatggtagctctatttttaatttttttaggaacctccatactgttttacgtaatgggtataccaatttacattctcaccaacagtgtacaagaattccctcttcttcacaccctcatcaatacttgttatttcttatattttgataatagtcatcctatcaagtgtgaggtgatatctcattatggttttgatttgcatttctcagatgattggtgatgtcaaccaccttttcatgtacctggtggccatttttgtgtccttgatataaatgtctgttaaagtcctttgcccaatttttaattgggttattttaattttgctattgggtggtatgaattccttatatattttagatattaaccttttatcaaatatgttttgcaaatattttcttccattcgatggtccttttattttattatggttcctttgttgtgcagaagctttttagtttgatgtagtctcacttttttatttttgcttttattgcctatgcttttggtgtcataaccaaaaaatcattgctgagaccaatgtcaaggagcttttcaggccttatgtttgagtctgtaatctattttgagttaatttttgtgtatggtgtaagataaggctttaatttcttttgcacagagatatacaggtttaccaacactgtttattgaggagactatcctttccccattgtgtgtccttggcaatattgttgaagattagctgatcatatatgcatgagtttacttctggggtttttattctattggcctgtgattctatttttatgttaaaacaattttgattatgaattattacttcaaaaatcttatatctacattttaattataaaaattctataacatattctctgaaatattgatcctctcttgggcttaaaaaactgaaaataaaatggtgaacttctgttttaacttttgtatatttttttctaaaacaatccatgttacccatgatgtgcagctatgattgagtggaaagaatattttaaaataaatttggagagctggattcaaatctctggactttcaagcagcaatatctttctcactaattagctgcctgatcttcatgtaaatagcttaaccactctgagcttcagtgttcttatctgtaaaataaagaattttgtattccatgatctcaatgacccattctaggtctgaattttcattttcataaaagtctaacagttcatattcatatcatagtttgatcattctccatattaaaaaaaataatttatcgggttctttgtttgctggttcttgtaatttgacatattactcttctttcttgctgaccattcttttgattttcagttcatttcttgtgcagtcaacagaggggaacacatgggaatttattattgcaaaatagtatgagaagtatagatatttagagatttaagtaatcataaacatcagcaagtctatccattaaaagcgacaaaagtgatgacagaattgtttcagggactagacttttgtgtagagggaggatttattaactcagaaattagcagactgatgacctcttgcattttgtcctgtatgcctccttgtagctctgccatcagccgtaatgtttctaccctgatgtaatcactagtttgccacatttaagaatacatctttcatcctggcgagctacagcagattcagatttctatagctagttcctcaatcattgatttagagctgatcagagtaggaagcccatcttaagagttatttaccttcttcctccttccttttctcacagtacagcaggactccatggtgtttggtgaacttcttggtcatcaacacaatcactttgagtttgtcatgctgtagatggtggttaaaattgtctgaatgtcccagatgggaagcagtctgacataaggagcagggactaaggatttggccttttttagctgggcaataccgatcttgtagcctcagtagtccttagaatttttcatttgaaatacaacaataatcctagtattactattgaaacagtactctggttcatgcattattccatctgatccttaccacagtgaagaatcgaggtatgaattacatcctttttacagatgtaacatcttaagatagaggttgacctgcccagtttatgcagtgagttactgtgtctgttctttgcctgctccttgcattttaaaatgaaaaagggagactaaaattacatttattatttcctatatgccaaagatctggctaggtgctttagtatattgtgttattaaatattaaataaatttaaataatattaaatattcttaataacaatgtgaaacaaattattatctctgtttgatagatgagaaaaccgaagctcagaaaagttaggagagatgtttcaaagctacatagctagtaactatttgagacttgaatccaatctcttggacccaagatagcaaatgaattttatcttaaggattaactttagtcagttgatggagattgtctgcagcagtggagagaagggttctgaggctgtgtctgggctttctgggaaagaacatctcattcagccagtgacatttgttacaggagcgaggagaggagacagcactccagccatttatttttcctycataaaggggcagtggactctctactgcccctttattctctgcaagccttttgttctaggtaaccataggaataggtggtatcttagcctgcattcccctgaaagcagagcctgagcctgaagcagaggcttgtgcataggtagtttaattgggaatgcgaccctagggaacaggagcaaaggatggggaaggaaggaaagaaaccagtccaaaggtgtgttatggagatggcccctacttgtacttagtatctggtgtgactttctgagaagcttcatgaaatgtgtctgagaactgtccccatgggaggatcaaaggggcaagaagcatgcatgcacagattcccatcccatattggatgaaggcagttctgtgggtgttaactcctccaygctctccagagtcacatgtgtgagtattcagggttttattggaatgtcccacactgtagtatcaaagaagcccagaggcagaaagcaagaagccagcaatgcagatcagaggtgaggtactgccaagttgcacctgagtgaagctggtaaaagcctgtgctgaacttggttaatgcaatggtggctgatgtaagaactgggcctgagatgatcttgaagtggtgccacataggacactgaccattgttgatctctgtagctactgtaggcctgggagtctccatgaaccttataaaggctgtatacatgctagggaaatactaatgcctttagacttaactaatttctgaactttccctctcactatcctttttctatgagaaatttgggcatataatatcaatgtataaaagcataagcatgttgggcattaataatcctattttatggaatacctattatgtcccagtttctgtgatagactctaagttcatgatctcattcaatcctagccacatgactgtagttggtattagtcctctgccttgcacagaggaaactgagtgtaggaagccaaactgaattgtctgagactactgctacagagcagttgagctgaaactcaaacatgcctgcagctgattcctaagcccatattctttcactctgctggttggttgactggcaaaaccagaagggcttcctcttgtttggccaatgcttgagctctcaccctaggactctacaaaatgaactcacttttgggactcaggcttgtcaacatcctccaagtgagtcaactggagacctggctggtctccacaataagtgctggaaatccccactgtacgtctgactcagagatgnnnnnnnnnnnnnnnnnnnnnnnnnnnnnnnnnnnnnnnnnnnnnnnnnnnnnnnnnnnnnnnnnnnnnnnnnnnnnnnnnnnnnnnnnnnnnnnnnnnnnnnnnnnnnnnnnnnnnnnnnnnnnnnnnnnnnnnnnnnnnnnnnnnnnnnnnnnnnnnnnnnnnnnnnnnnnnnnnnnnnnnnnnnnnnnnnnnnnnnatgtccaaagttacaaagaaaattagtgtcaacttctctgagtctcagttttctcatttatgaaataaagatgtggattttatgatccctaaggtcccttccaagctaaattttatgatgcagaggctacactgaagcagattgtgagatgctagcgggcaggggcatggtttcaacatttctgttttctcagcatttagcagaatcttctcgccgtgccttgttctttctgtggtttgccacatgacagcagtatggaaagctggcaagcccccattctggttcctttcctctactctttgatagttcttcctatcctggcacctagaaattccgcttccaaaacaaaccctgagcttagaaaatgtttggatgtttatttctaccttaatgtgaaggatcttgtcaacatattctctttctggatgtatttgcatgttgacatgcttgtctaactgtgaaattaaaatatgtacccaattaaagacatttcattagtcagtcaacttcatttttgaaggacagggctcttctgaaactccaaaatcatctcattggacataaaacccaaactgcctccacattaaagaccaagaaagagttcattccattaaggactagagggggggaaatgagggaaaagagttaaaagttggacatgaagtcgaattacagacattgggcactannnnnnnnnnnnnnnnnnnnnnnnnnnnnnnnnnnnnnnnnnnnnnnnnnnnnnnnnnnnnnnnnnnnnnnnnnnnnnnnnnnnnnnnnnnnnnnnnnnnnnnnnnnnnnnnnnnnnnnnnnnnnnnnnnnnnnnnnnnnnnnnnnnnnnnnnnnnnnnnnnnnnnnnnnnnnnnnnnnnnnnnnnnnnnnnnnnnnnnnnnnnnnnnnnnnnnnnnnnnnnnnnnnnnnnnnnnnnnnccaccacctgtacctctttttctatggtgtactagctaggaattattttacaggtaaatatttgcaactgatttgatgattgagaacactaacttagaattccaattaagtgaaatgttgactccccctaaaataatttcattctttccattagtagacctatattaccaaaaaaattgtactaaattattcttatattttaaatttcatcaatgagaaatatgtggaaattttgtccccctcttgttgtataaatacctacataatatgattgattttgcctcttggtccacaagtttaraacatttactatccagctttgtacagaaaaaaatttgccggtctccagcctgaccaacatggtgaaaccccgtctctactaaaaatataaaaattagctgggtgtggtggcgggcacctgtaatcccagctactgtggaggctgaggcaggagaatcactagaacctgggaggcggaggttgcagtgagccgagatcgtgccattgccctgcagcctggggatcagggcaagattccatctcaaaaaaataaataaataaaaaataaaaataaattgccggactctggttaacaggaaaagaaaccagacagacaatggatgggataacagtgctatgggagagactgaggaaagtgaagtgctgttacaaataaaatggaagaagcagaacgtcctttcactaatcatatgaagcacttacatggaatctttgaggactggctggtttcccctgacctctgcaaaagtttatcacccgtgttaaaacacacacatgcacgcacacacacatatgcacacacctggcagtcagcctgcggtgaggcaaacgtgaccctaagcacaaatctcaggtctgccatgaacttaccatgatttgccaatttatttcccctctggcctcaccataggcctcaatgactctccattccccaaagttgctggtggaacttgcaatcgttaaagccagtgtgttttccacttcttggtctccttgaaaacttcacctctggttcccaccatactgctcttaagatcttcaagatctttcactgactcatttcttgatctgaaattccctatagaaatataggccttacccaaggctcaatcctcagctctctgctttcctttcttcacactttccctcaaagatattactcctccttaattctcaacatatcactcctctgcttaaaaactctgcaggggcttttcatcaccatggcaaagttcagactactgtcaaggcctttgtagctgcacctccatccccaggatcctaatggtcaaactcaccttgccttcttcccatggcctagccttgctcaagggcttgaatcccctaactccaggcctccctccctccctactgcttgcctgcattgtctctctgctcacctttgttggacttacttcctctagtccttccagtctctgacttgacccctacttgttaaattatcttaaacatttaaagattgttttaaatgtaatagattatctttgtgagcacttcaacttactgttagggcaarcacagttccaatgataaaacattcccaagccctgagacctcctgcagatcttaaaaattaaatttattaatgtaatgcaccaagttggcctcaaatatttcaatactaaaaatatattcaagataccctgcattttttgggcagggctttcgtgatgtaatcatatcatgcgtaccactctcctgtttcagactcttcccgacttcccattcctctgagaatagaacgagcatcctatttagagccacagggcccacacagaagcctcctcacaccctctgtcccctctgtgtacaggcaccaatcacactggcctctttgttgcatggacatggttgtgtatggggaccaaccacactggcatctttgttgcatggacatggttgtgtacgagcaccaaccacactggcctctttgttgcatggacatggttgtgtatgggaccaaccacactggcatctttgttgcatggacatggttgtgtatgagcaccaaccacactggcctctttgttgcatggacatggtgagctggctctgctatgcccccttcctcttctgactggagctcagccctcacattcttacagtggggtcaagattgtcacccaaagtgcagctcaagtgtcacctcctcagagaggcctctcctcgccatcctttctaaagcagtcctctcaccctgtgaaatgatttcatttcgtttctttatagatttatctggtttgaaacttactggcttaatgtatttgtgtactggttcttgcctgttcccagtgactacaatgtaggcctcatgagggcgagagtcttgtctatttcaccactgccctggcccctgagttgtcctgtcacgtattccttccttttgcgtgaatgggcatacctcaatcccagtggtctgactcattctctgcagagtggtttgcttttcctcaaactggacattagtccttggtgtgacaaggttacatgcttggacttcgaagaamgtctacatatacttgcttagtatatagaagaaaccaagttggattgcaaagcaaggagarctgatgtgatgctaaatgttaacataaagcttcagatctcaacaaagaagacagacattttagatgctatcaataaattggaaatcaagaacaaacccagatagtaggtatttggcatttgtttttggctttgaaaaaaatgctattaatatttttaatgaggaattcttttcagtctttccaaatataagtctattgtttatttttaaaagagtgttaaccatttagagagaaccattgtattcttgtactttataaataaaagtcttctctttaaatcttcagtggaaaataacatttcaaacacaggaaaatcttcatatttgacctttaatttttgcacactctttaaactttttcagattgttaattgtgtgtgtgtgtgtatgctatctgtgtgttcycycaactttcttctgatctctttaatatgtagcagaagtagtatatgaatagtaaattaccaaagctttcatcatctctaagtggaaaacctaagccagggtattcagagacaagacattgatggctgccattaaagtgcagaagtttctcagattgcactttctttatgaattgcaagagaaattataataaacatttcatatatataaaatttgaccctatatttgtacataggatcaaggtttcaggcatacatgtatagacttacatatgtagaaaaggacataagattttgcagtttctcttcaaatactgtagtgtgtaatttcacacagagaacattagaaaaatatattctctccttgagtcccattctgtatctcttaccacctacctcagctctacataatatcccatatgtctttcctcattactagcatattttaaagtcattagaactccgtgggtggcagagatacatcggagagcagctcataattaatataaacctctcagaggaactttggagtttaacttgatttatacacacacacacacacacacacacacgcacatgcacatacacacacacaatttatttaacagaaagttggacaagacatttcattatgaaaatatattccaaaatatgtagacctgtttgtaagtaaacttctttatatagttttttacataatttcaggtgtgtatcactcatgatctagctagatcactgacttgcttacagcacctggaaccttatacagtactgttaagattttttttttttttctggagtacatacatcatggatcaggtagtggcatctgctggcaatgagtgatattgctttctaattctataggtggcctggcatttcatcacagtacatccctggaaagtggatcatggtgttgcttttctagaacaaacatattcataagaatataaataacaaaattgagtggcaatgataatttacatgttggctggtgtatgacataagaaaggaaaaawaataaacttttattgtgaattattgggtgcctatgtggtgctatgttctttcacatgctattagagagattaaaaggtcagagaggttaggaaccatgcccaggtttacggtctgttgaaggcagtattcaaagcaaaatctgatcttatgatcctgggtaaatagttaagatgtcctagtttttgaggcagaaaagaaaaggctattcagacaagggtaagcactcccatatactgtcagttgcatagtatattgcttcagtttttctgaaagacaattttcccatatgcatcaaaaggctgaaatgcatgcatgccgtttgactaagcaattgtaattctagtaatttgtccctgggaaataatcatagaggtgcttgaagatgattaatatatgtacttattgcatccttatatgaatgctatatattatagcatttattatagtagtaaaaataaattaaatagcaaccaataacaaagggtggttaatatagattatgttatatccctaaaatggaattatattcatatattaaaaatacatcgtataggagtacttaatggcatgaaaatgtttataccatattatgagataaagagaaaaacaggtttacaattccatgtgatgtcattttgtggataagactctgtatgtctgtatgcgaattgtgtgggtttataagggacatatacctaaataccagcagtggttatctttgagagatatgatgacaggtcacatttattttcttcttttcctcatctctcttttaaaaattgtctccaatgaaagcacattacttttaaaatttaaaacagtttacattttaagaaaataatttagaatattgtcacaggaagcaaccagggacccagtataaaggcacatctactgaaaatggaactggacagggaactatccctgcagcaggaaattcatgggaagttgatgttaaacagcaagaagatccagcagttggcgtgaggatggtgtcctggcatgatgtaaagggaaggtcaagaagcgtacagcgggacaggtagcatcagtgatgcctagagggcagggtaccaagccgtggtgcctggaaagtagtcttagtataggaatcacctttgttctggagaaattgggagaacctaaagagaacaaaacacaagaattaagattggtgctgggaagtggtttaaacccagggtagagggagaagcaagttcaacwcagtattaagttactgatcagcagtcccagggactcttcacatttccccttgataacactccagaaaagcttggttccctctcctgctaccacactaaggatttggagaatcacttgtttgcagatgttcaaagcacaatatctactgtacttaaaggttgcttagggatatttatgtgcttggatcaagttgggaaacagacaaatgaaaaataaaccaacagatggaaccaatatcttctttgcaacttaatttttccctaagaagcaaaggtgattaaattcattcctttgacttcaaacatgcccttaaattgagatcctttgcaacatctagatgttttaagcctgtgaaaggtttgggttgtaaggttttggagagaaaaagaccactggatttgggtcagtagatctagatcctgttggttgccatgcctcacttccgtactctttaaagtgaggtaaaggtggagaatcatttcatccctgaaacttcatgactctggacctgaaactttactcttattttcatgttcatatcctctgtctcatctacccacccctaacctgcaaataaaaaagccttgaaaggaaaatcaatcatagaaagttagacagaggggagagcttgttcttttttcctggagtatcattacagattgtatggctaaatgtctaggagcattttagcatgcatttattcatttagttattcattcaagaaacagtgtgcacctggttttgtgccagacattgtgctaggtttcaggtaaacacaataaaaagatacctcacctgctgtcaagaaactttttatgtagttagtggaggatttccaactcccgtatcatattttcccctagagatattgagcttcctttctcttctccttccccttccacccaccctgtttttaataagaaatagttcaatggaagttgattaaatatatggatagtatggaggtagaaaagtactgaaaaccactgctctggtgcaggaaacaaactcgtatacagggaattacaaagtgccattataagaactataacaaggtgatattctttggaccatagaaatatagccacatgaacataactgaccccatgtgtcctatcccgtttcccagagtttcttacgtatctagctttaggattcaataagtcttcaaatctacttttagatagctctaaaatccactatttctttctgtccccactgctctccctcagtccagcttgccatcatcatttacctggattactatggtaccttttctctctacccccttctaatctattttctacatttagtcagactgatctttctaaaatacaaatctgggctgggcttggtggctcacacctgtaatcccagcactttggaaagccgaggcgagtggatcacctgagatcacaagttcgagaccagcctggccaacatggtgaaaccccgtctctactaaaaatacaaaaatcagccaggtgtggcagtgtgcacctgtaatcccagctactcgggaggctgaggcaggagaatttcttgaatccaggaggcagaggttgcagtgagccaagatcacaccactgcactccagcttgggagacagagcaagactccgtctcaaaaaaaagagaaaaaagaaaaaaaagaaaataaaaaagaaaaccaaatgtgatgatgtctctcccctgcttttatacatgtagaatgaaatctaaatcctttctgcatattaggttaacctttgtgctttcatctctggagtcatttagtgttgtaatcatctgcatagttatctttctctagctgtagactacagctctatgaagatggagactgtagtttactaatctgcacatggatgagcctagcactctgcctggcacaatgctcaacactatttgttgagtgaatgaaggatgtgagtttggaggtcatttttagttgaagtcatgggtgcagataaaatttggatgtaggagatgttcagtaagggttttgttgtatgaatggatagaaaatgagggtgtgtagactgagaacaggcgtagtcaatagaaccctgaagaatactaacatttcactggatggtaggggaaagtaaatctgtgagagtgattgtgaaagtcagaggaaagctaagggagagtgtgggaggcaggctaagcagcagagaattttaatagtgtttccttggatctccaagacccagcacaggggcaggtaaatgaatagcagaatgaatgatcagcagattcaaattctgcagcaaagtcaagtaccaaaaggactgagaagtacttactggatttgaattacagttgtagtgaagtgtttggggcagaagaccagggagggattgtaggggaggaaggagaaatggtgaagatagaccactcttagaaggaaaaggaaggagaatagacgggggagtgtctgtctgtgtgcatttaaagatggtagacaccccaagggtgaagagctccaccttctgctttgctgctcacccaacatcagagcttctcagcaggtgcttcagtcctgggcaaagatgactgaatagtggatgaactgatctttctagaatacaaatctgatgatgtctctcatcagacatcatcactgcttcaacactggccatggctggcaagctcaaaaatcttctcgttgtccccagaagaggagtttgggtgggaaggacagcaacaaatcctgaagttgtgaagtatggcttccaggtgctgcaatgggtcatgggctaggccatgaccttagttcctcccctgcaagtttttagccttacccattgggtgacttcatactttcttctgctctatgttgtctttatactttctctagaaacaatatgacaatggtgatgataataataataataatgaatagccaggtgctgggttaagtgctttyatgtgataatctaatttattccagccaagagcccaatgaaatacataaaattatccccattttacgtatcggtaaagttagttgaatattatatttatatatataaataacatatatagtttgcccttgaacaacatggatttgaactgcacggttccacttatacatggattttcttctacttctgccactcctgaaacaaggtcaacccctcctcttcctcatcctcctccttatggttttttcaatagcatttgcttttctctagcttactttattgtaggaatatagcatataacacatatacaaatgtgtgttaattaactttttatgttattggtaaggcttttggtcaacagtatgctattagttaagtttttggggagttaaaagttgtatgtgaatttctgactgtgcaggggtggaggtcagtgccccaacctctaccttgttcaaaggtcagctatacactttatatattatgaatatagtatattatattaatattatattcaaatatactatatracttatactacgtttaatactatattattatgtttatatataaatactatatttaatatataaatatatagtatgtataaatataatgcttatgtaatatacaatatatacttatgtatgcttatatgtaagtatagatctataaataacaataaatatatttaaaattaatttgtaattcacaatgaatttataatttatgttaatttatcaattcaaattcatattgacatagcttatattactccrtaatagtaacttacaataaagtcaataacatagaatttatttttataatcatactttgtatttagattttaggaataaaatattctataaagtgagggtatatacaattttatggatttataaatgcagattgggattaaatacattccacagaaggtagttactaataagagtatgtcaaatgttcttttaatctcctttgtatctttagagagttatgatataaatgaggggtattcagaaaaatatgtaacattgggtttggttatcttccaaaattttaaatggtaaataatagtaacaaaaaagtctattataacaattataacacgtttactttcctgtttctaataatttgtttttgaaattaaaatatttctctgggctaacaggtaacaattgtcttgctgtcagtgcttactataaaaatgcaaagyaaaatagtattgggatcatagacacatataacagttactacttcttttaaatcaccaaaatacaaatgcatttggatcaatacttgagtcttcacagtcattgcaactaactgaatgcaaaatatattttaatatattctgtaaatgagtgatgagagcatgcaggaatgacagtgcctcttgcgttattctcattgcaattccctggactgatttttcttgtggtaaaacaaaaccaggagaaaaatgctttccttttaaagtaaccttaaggcttgcctttaaatagacaacagaagcttgggagatcaatgcttggggacttaagctatattattatttttactgtttagtattgcagaattactacccataccatacatgaaagtctatacagttttaacaaaagacctggctatattgacttaagaaagggattttttttttcttacctctgaaaatacctacttttttctttttaattcaacttagatccagctagagagtttaaatatatttaaaatttttagtggaaaaaattatcctttaatatcaaatagattaaaaaacatgcattgaatggttgactcaggggctttcactaaactggccatgaatgctgaaaccatctgtttttctggacgttgtcagggtgagtatggcagaggcagctgtttgcaaagggacgctttagatgatgaaccagcccattgtttctaagcaattcacttgcattcagaggctctacccaagcgtactatagagcaatcaaaatcaaactatygtttgtaccaatcatattgatctgaaaagattgtggtgggatgaccccattgtagatgcaaatagttgttctgagcagctgtatgctggccaatatgtacctcagtaggaaacaggcttggaagctagagggctctctgcaccctactgggggaggaaaaatgattatacccgattgaactgcagtttaaggggactggggggaatgaagacacaggtctgttagtattagtggtaattttccttcatgaaaaaattaactctggtggcaaagctatttttatattaaagctttctgcacactataaatgtagaatctccaaaagattagataatggcttaaaactatagcacaaaaagtcattagctttggttttaaatgttgagtcctggttagctctcccaattagaaaatgcacaatcatattttatctggaattattcatacactgtttaaagttttataatttatttacaactcagaaatatgtagaaacaatcttgatattgcaatatttgcataaatattaaaaaggacattttcgtctatgcagagagcaaatggaagcatacaaaatgaacattatactgctgcattctttaaataaccggaatgctgtatcttacccattaacatttaagctttttggttgtccttgccacttcattgcatgcatgctaatatcttctcatataaaatttaatctgttgaactaaatgaaggaattagtatctgaaagacatctttcattaagcaattaacgaatctctccaacaaatctacaaaagcatatgtgtttatatttaataattatttgtatgatcagccagttataacacatgcatacatttagttttagtcatagtattactatacctcaactcactgtcattacgctataaagccctagtaaaaatgtggtttaaatgggttatttgctaaggaatacatacatgtatagtttattgacttttgaaagtcctctgaggtccagtatagaacaaagaaaattcccacaaatagagatatttggttgtggatcaaatcttgctttatattgcagtgaaaaccagaagtattataacagggcaaaattaagacaattcatgggtttgcagagtacatctcaaagaagggtcagcatcatatgtgccagttaacttttactgtcaaatgtaaggggccaggataagactttggtgtttcttaagaaaataaaagaaaaaaatcctatcttagttatccacaatttccattgcttaaataattatttctgagctgcactttaattagtagcctaccttcctttacttgaatatgttaaattgtcttggtgttactgggattgtggaatggggttgagctgatggagcattctaccgtggcaaattctgtccatcactaggttggcaggcctatgtaatgagaaaaggaaaaaaaaaagagattctttttcattaaatctcttgattttttcttgaattaactggtagatgaggatgatttgatatcttatggaacggctatgatatatctataaaataactccatcatttcaaacttcttaaatattttatgcagaaaattaataaacagacaatatttcattcttctaacactcagttgactatattttccctctccttttaggagaataaatccaatcataatttctaaaaaagccaatataaaggatttatttcaagaagtaatttctgggttattttcctagaatgaataaacatttggccaaaattctcatgcttatctttagaaatagccatagttttagtaagtgatattttgaatgatgacctgaggtgccacaatgacatgtgagccaccaaagaataattaagaatgctcataacactttatttattattggattctactgtgtgctcatggggatgttaaatttctttatatggaaagaaacaatattctgttccaaacaaataaattaaaaatatattagtatgtattaggggctgtattttgtccccccaaaattaatatattgagccccaaatatgagtagctcagaatgtgactgcatttggagatagggtctttaaagaagtaattgaagttaaatgaggtcatactcatgggccctaatccaatcagactggtgtcataataaaaggaggtacacacagaagcacaagggatgcgtgcctgtggaggaaaggtcaggtgaagactcagtgagaagacaagccaaggagccagttcttggaagaagtcaaccctgttgacaccttgatcttggactaaccctgtggacaccttgatcttggacttttagcttccagaactgcgagaaaataaatttttcttgtttaagccacccagagtgtagtgttttgttacggcagccctaacaaattaatatggtatgctaaggccatgttgtaatttactttgcttttcttgatttggtaattcttttcttgcagctcacaactaattagtgttgaatcaattaacagatatagagcctactaagtaagcctaattatttctagcatcccttttttcttttaataaggtgaatgaacagatctttgtgaatgtccaggagccctctgggaaaccccagagatagtttaaatattaaaaaaatggaaaatgttttgtttgtttttttgtttatttgttttttggctaatctgacttctgatcttaggaaggcaaaatctagagttgtcggtgaaaattcgattatttcattaagagggtatcataggtaccttggaagaaagattggcgttggcttggctgcctgttagtcaaagtagcaatacaaaatttgtaaataaacatagaagaaggaaatgaaattataatgaaccctagcatttagaaatgaaaaactttttataacaatcaaakacatgataaagtatgcaaaragtaggaaattattctgatgacatatggagggttacaaaggaaaaaactttttgctacctctgataaagaatagactaaattctccaagaccaatctgactggtgtcataataaaaggaggtacacacggaagcacaagggatgygtgcctctggaggaaaggtcaggtgaggactcagtgagaagacaagccaaggagccaggtcttggaagaagtcaaccctgttgacaccttgatcttggactaaccctgtggacaccttgatcttggacttttagcttccagaactgcgagaaaataaatttttcttgtttaagccacccagagtgtagtgttttgttatggcagccctaacaaattaaaattatattttaacagagaatataaaattctaatataacattttacagtaaagcattcatggtcttttttttcttattaataaatccatcaaaacagaaagttttgcaaaattttaacacatttctctaccactactgtttctactctcttaaaactactccgcaaatataaaaataggaggccaaaatgcatacattaaaacgatgtttgggactaatggcttagcattctattacacttggaaatatacaaatattcaaagattatctattgatcaactcagtgtaatattttttcagtatttacattaactaaagatcttaaaaattatatttaaattgacagtacagatcataatttctgtggttatgaaatatttgtcagaattataattccatttgtttgaacagatacataattttctatttttcataatcatagattttatatgagaacagtgttaatctatctgatcagtaaatcagtataagaagttaaggaagtttatactaactagcctctgttgatatctacaaaaaagcttgctgggatttgattgagattctgttgaatttatagatcatgttggaaagaattgacatcttaacaatattgagccttccaattaacgaacatagtttatctctaccatatatttatatctttaatttcttttattagagttttgtagttttctgcatatatatcctgtacacattttgttaagcttataacaagcatttcattcattttggtgctactgtaaatggtattgtgcttttcaattcaaactccaattttactgctggtatgtatgagagtaatttcctgttatatattaaccttgtatcctataaccttgctataattgattatktgtttaagaatttttgggggctgggcacgatggctcatgcctgtaatcccagcgctatgggaggccaaggtgggggatcacctgaggtcaggagttcgagaccagcctgaccaacatggagaaacctcgtctctactaaaaatgcaaaattagctgggcatggtggtgcatgcctgtaatcccagctactcgggaggctgaggcaggagaatcacttgaattcgggaggtgaaggttgcagtgagccgagatcgcgccattacactccaacctgggcaacaagagcaaaactgtctcaaaaaaaaaaatgttcaaatctctgtgatttccacatagaagaatcatgttatgcgcaaagaaaattttatttcttcctccttcactgtatcttccagtctgtacaccttttattttattttctggtttttctttattttataaagctagctagaattttcagtaaggtgttgtatgggagtagtgaaggggacattctttccttaatctctaacttagggaaagagcatccagtttttcactattaaatattatgttaaattttgtttgcatcctcaataaaaccacattggtctgtcactctctcttgtaatggctttatctggttttgctattagagtgatgctggcctcatacgatgagttaggaagtgttctggaagaaatgatacagaattggtattattttgtccttaaatgattgaaaaaatttgccatttatatcatctggtcctggtgctttctttttgggagattattagttaggaactggattttttttgatagatataggcctattcaaaagatatattcctccttttatgagttttggtagttcatgtcttttaaggaattggcccgtttcaactaagttgtsaaatttgtgggcatagagtttttcataatattcctatatgaatcttttaacattcattggatctatagtgattacccctctttcatttctaatattggcaagttatatcttctctgttttttttttcttttcttgttagcctggctagagatttatcaaatttattgatattttcaaacagtcacctttggttttgttgattttctctatttttttcctaattgtaattttatttgtcttttataaggtatactatttcatttcttctgcttgctttatgcttaagttgctcatttctataatttcttgagttgaatgctaaattattgattatagatcttcttttataatttatgcagttatatcataaacataatatgtaaatatatatattattgactgatgtacttccttgacccatgttttatttaggaatttgttgtttaattcgcaaatatgtggagatttttcagcttttattcaatttttgatttctagcttaatttgactgtggtctgagaaaacacctttgtataatctcttaaatttgttaaggtgtgacttacagcccaggatgtggtctgtcttgttaagtgttctctgtaagcttgagaggaatgtttattttacgggtttttcttctccagtgttcttcctctctatatagatccatgttttgttttgtttaatctatatcatttttcttctccctaaagaagttcttttaacatttcttgcagggtaggttgtctagtgatgaattccctgtttttgtctgaaaaaggtctctatatatctctttcagttttgaaggataattttggtggatatcaaattttaagttgatttttttcctttcaacactttaaatatttcaatccactcttctttcttgaatgaaaagaagtctaccataattcttatcctcttctggtttctttcaagattttctctaatctatttgttttttagtttgaatatgatatgtcaagatgtgaatattcaggagaaccacttggtgctctttgaattttctgtgtatgttatttcatgtctgtcattaatttggaaaattcgaaggcattattacatcaaatatttcttccattttgatctctcttttcttctagtattctaatgatacatctgttacacattttgaaattgtcccacaattctttcatggcctattctgttttcttcattctttgaggtaaacagacattttagttagagaatttattgaagtcttgctaggtgttaggctgtgtttaatgtttgatgtagtggtaggtgccaggggcctcaacttcctctagtgttctcgtttttgtctccacttttgtccttgagcttcgctaggaattcttccttaaatagagtctatgtgttttctactcttcccagtaaactaccattataccagagtcctgctaatatagtggtaaggcatgggagaggaaaagcattccataatcttatgattaaatctcagtcttttagggggcctgtattcctgggctgtgaccttcaccaatgtttcttagcttccctcaattcccttaggtgagacagaaaagctagagaaagtccactaggagaaatgccctgtgcctggggcgggggtaaggctctggtaaaatctttcccctggagactaagcctttgttatagaaaatgctctgaatatttcacaaatactctttccctctgcctgccagagacagaagggaatctgttttagctcttctctgtgagaacatggcagggttcctggaggtaaaacccataaaagtgttggggagcccaagactatggctcccaggagtttctcactgttaatactagtccacactcaccccccaggaatttgtcaaaattaccatttaagtgtttcctaccagtttatgactccagtggcttctgtttcaggtaaactgatcttggctgtcaactctttggattagcctggttctccagattttggggtggcagtttgccctgcaagctcagttctctgaagcttccaagaaaaattgttgatttttagttcatttagcttttctttttgtacagacataagtgatgacttcccagctctttacatattggagctgaaaccagaagtttagttagtatcttgattagaaaaggaacccaaattatgttttatatgcgtgtgtgtgtgtgtgtgcgtgtgtgtgtgttttcttgtattatattctatcctgataaaattagggagaaaacagtttcttttaaatcagtgatcaaacactgaaaagagaacaatgatctgatttgccaacgattctgtgaacatagcttcttataggaaaatgctgctgagctagtagtttctttgagaagatttttttttctttcttaatagagtagcacatttaaagtgttagaaattcagtttttgaaaaaacttttctgggatttttaagaatgctaaatatatggagtgcttattggtatctataaaccaatcacaatcttttttatttctagagacttcacaatataaatttttaattactccagagttagaaaagtatttttacaattacacatgagaagtaaattcttttctcagtagaggtatgcagatactcagagaacttacagctttacttttacatattcagctctaggtcagaataaacctagaatataaaaattcatatctgaaagagagtctccttttcaatggaaggtaagacatacatttgcacagacagacaggaaagcaaaaagactaacaaaccagtatctctgttgtctctcatctgaaaaagggtaattcctgtctctacacaaaagagatcaccaaataagtagaacrtaaaaccaaattcccagttactgctgccaccaatcgggaataacctgttggctatgcacaagcaagaataagaacaacattggccaagaacaaaaaccaaacaaacaaaaacacaagtcagaagaaaaaaaatagaaaaatttagtcagcaaacctgaaattctgttgcctcttggaatcctttcattccaggatccaagaaaagatggactgagaagaggagcctaggaggtatattttcaggcaatgcagtttaattgacttctcaggcatcttggtacttacaaggcataatttttgaaaagttaaaaatatgattcttatacaaatatggaaagaacatgcattaacatttatttaactctttaatgagggaactagcaggatgaaaaagctggattatgctttacagattttaatgccaagctgagagtactggatttgagctagtgcactttatcacttttagttttgctatttgagattttacatggccaaagtggtccaaatctaacagacttgccaatgtagctgtttcttttgttctcttttttcattaaaaagaaaaacaaaacaagaattatgtacattttttctttatattgagggataatctttaaatggagccaggcatggtggcccatgcctgtagttccaattactcgggaggctgagaccagaggattgattgagtccaggagttcaaggttgcagtgagctatgatcatatcattgcactctgtctagcctgggtgacaaagtgagacaatatcacacacacaaaatagatttttaaaaatggactgatttaggatatttttcattcactatataatcactgtacacagagagctctagaaaatgttttctgtctcattaatttatttgttaaaacatacttattgagagtcaggtattgtgccaagaatataagggtagaaaagatagacatgcctctgtccttagagattttacagttcagcctcaagtattactaggtaaaaatttaaaataacatatctgttatagacagtagacagaattagattagatttgagatatggatttggtaaaatgaaaagtaactaaaagagagcaagaaaataaaatttttgaaactcccaggaattaaaaaaaaattcagcccaggtgtggtggctcacacctgtaatcccagcactttgggaggctgaggcgggaggatcacgaggtcaggagttcgagaccagcctgaccaacatggtgaaaccccatctctactaaaaatacaaaaattagctgggtgtggtggcaggcacctgtagtcccagctacttgggaggctaaggcaggagaattgcttgaatccaggaggcggaggttgcagtgagccaagatcatgccactgcactccagcctgggcaacagagcaaaagtctgtctcaaaaaaataaaataaataaaaattcaggttgggttagtttttgactaaagcgaagatatttgtttgtattttcttgcattttttgtttctcttgcccagccttctttttccatttgatccattcgtgtgtcatctgaacattccataagagatggatggagcactaagggaagagaagcatatgtcagatgattgcaatgatttgaatctaatattggtagaagaagttgaagaagtgactgatttgggatttatatgggtgtttttctcgtggaaatggcaaaatcaagatctatatttttagtgacacattcaaggtgtgtgtttatttccataatagggatgtaaacacaaagacttcctgataaattaatttatttttctagataccttgattctgtagtgataattattgtttgatgttgtcagaagataaaaggcatttactcaccaggaagtatataatacttagggcatgggtgaaaacattaaaaatttatttttattttttaattatgcctttaaaaatttcttcttttaagcatgctttacaacttatattagtattgtaggggaagaaacataattttacctttctctctcgatcaggcactgtggagacagatacactagagtccctctgtgagaattcttacccttttccagttttcccaggatcccatctgcaggctccacagcaaatgggatgtcccacagatcccattctcattgccagaattgtaggggaagaattataattttctctctactttttgtgagttatttgctgggacctcccccttccccgtaacaaaagacagattaataagataaaaacaaatagaggcttattaacatgtatacctcatgtatacatgaaaataaatctcaaggaaggggttttgagttcagatttaaatatcaccgtcagctgaaacaaagaaacattttggaaaggttagttatggaaaggtgaccaggaaaagcacacctaacaaaggtaagttttgttatccagatataaatagacaccttctcttgtgattagtcatccttctcttcctggtacagagagtggagacacccttagaaatggagatttcctttatagatataaatttttcttacaaaagggtaacttctactctgtttttgaccctctcctgtgtctgtgatttctcaaaatcagctcaaaataattcttatgccaaagcgacatattttgcagtgcatattttttctagtatagtatatccattttagaaaaaatattgtatatccatttttaaataaatatatagatattgagggaacatgcagtttttatagatcaggaactcactgagacaagtttagagagcagtggtctagaccaggggtcctcagtctccaggccatagacccagtactggtccatggtccacctccttagctccacctcctccaggtcagtggcagaattagattctcataggagtgaccaatccctggtgccaaaaagtttggggatgctggtctagggagcctattgtcctaaaatattttccccattcctttttcttggtaaaaaccaaatgagttataatagtgaccaacctaattttcaggcaaccagtatacttatgcttttgtttaaaaaaaagtttgtaaagaaaagtgtttatgctttctgtagttaaaagttatgttagcaaataaaggggtgtctttacccagtagaacagtctagagatgcttagaacaatcttcacatgatatataggactacaaataaacatttgttgacctagtaggttttagatactaggactaggcactggggatctgctatggcttgcatgtttatgtccccttcaaaattcatgttgaaacttataatcaccaatgcaacagcattaagtggtgtggccattgggaggtgattaagtcatgaggattatgccatcatgaatggattaatgccttatgaaagggcttgagaaccaggtaggcctggtttccctttttgcccttccatcttttctaccatgtgaagactcaatattcaaggtgccttttagaagcagagataccagacactgaacctgctgtcaccttgattttggactttccagcttctagaactgtgagaaaattaatttctgtactttataaattacccagtctcaggtattttgttagagcagcactagtggactaaggatccagaggtaaaaaaggcagatgtgatctctgtccttttggggcacacagtctaatttgtttatcatactcataagtttatgattattagttataagaattgaatgtgttattatttgtaaagcacttactacaatacctgagtaaaaagtaagcacataaatacatatacactataaarcaaaagtactgaatatgaacagaatgtatagtgggatggtgttcacctagccttagtttccctgaggaagtgacttttatttttatttttttaattttaattttaatatattttttgagatggggtctggctctgttgcccacactgaagtgcaggggcacaatcatagctcactgcagcctcaaactcctgggctcaagcaatcctccttccttagcctccaaaatagctgggactgtaggcatgtaccacaatgcctggctaactaaaaaaaaattgtagagatggagtctccctaggtttcccaggctggtctccaacttctggcctcaagtgatccccctgcctcagcctcccaggcagctgggattgcaagcatgggtcatagcacatggcagaagtgatttttaacttgagacctcaaagctgagtagaaatttccaagtaccttccaaaaatgccaagcctgtgtcagccttcacacaaaggctggctttctaggtgtgacttcgcaagcagtastagcgtatggtagagaagagctgtcctgtgcatgtggaactgattggcgatcaaattcttctttgtaaatactgctcactactgctgggcagttgtgaggagataggagataatgcccataaagcactagttggtcctcagatggtgggtgagaaatgttatctcatcctgttttacctgcattggcatcaaaagccgctgtgtatccactggagaggggaggcctggaatgtagccttgaggaattccaagctctctttagtctctagcgcatcagatcattgttcatccttcaatatagtagggggacccatctcttaaagtggtcagatttcacttacattttctttttagcacatggttactgtgcccctgaaaaaactcatcagagttctctatatatgtgtgtgtgtgtgcatacatattgtattagtgcattctcatgctgctaataaagacatacctgagactgggtagtttatgacaaaaatatgactcttatacaaatatggaaagaacatgccatcatgaatggattaatgccttatgaaagggtgggagaaccaggtaggcctggtttctctttttgcccttccaaagagatttaattgactcacagtttagcacaactggggagacctcagaaaacttaacaatcatggtggaaggggaagcaaacacatccttcatcacagggcagcaggaaggagaagtgcagagcaaaggtcggaaaagccccttaaaaagccattagatctcctgagaactcactcagtattatttgaacagcatgaggggactgcccccatgatctaatcacctcccacaagtttccttccacaactcgttgggattacaaatcaagatgagatttggattggggacacagagccagaccatatcattctgtccccggcccctcacaaatctcatctttctcacatttcaaaacacaatatgccatcctaacagttccccaacatcgtaacttatttcagcattaacccaaaagtgcaagtccatggtctcatctgaaacaaggcaaatcccttccgcctatgagcctgtgaagtcaaaagcaaattagttacttcctagatacaatgggggtacaggcattgggtaaatacacccatttcagatgggagaaattggccaaaacaaagagactacaggccacatgctgtccagaatccaataaagcagccattaaaccttaaagttccaaaatgatctccttggacttcatatctcacatccaggtcacactgctgcaagaggtgggcttccatggctttgggcagctctgcctctgtggctttgcagggtacagctcccctcccagctgctttcacaggcttgccttgactgggtgtggcttttccaggtgcacagtacaagctgtaagtggatctacaatgctaggttctcgaggacagtaaccctcttctcacagctccactaggcagtgccccagtggagactctgtgtgtgggctcctactccacatttcccttctgcactgccctagcagaggttctccatgagggctctgcccctgtagcacacttctgcctggacatccaagtgtttccacacatcctctgaaatctaggtggaggttccccaacctcagttcttgactttggtacaccacaggccaaacaccacgtggaagccaccaaggcttggggcttacaccctctgaattcatggcctgagctgtaacttggctccttttagcagctggagctgaagcatctgggacaccggacaccatgtcacaaggacaccatgtcaccaaatctaaagacatggtgaatgaaaccattttttcctcctaggcctctgggcctatgatgagaggggctgctgtgaaggtctccgacatgccctggagacattttccccactgtctttgtgattaacattcagctccttggtacttacgcaaatttctgcagcaggcttgaatttctccctaagaaatgagtttttattttatatctcatcattaggctgcagagtttccaaacttttatgccctgctttctcttgaacgttttgctgcttagaaatttcttctgccagataccctaaatcatctctctcaaattcaaatttccatagatctcgagggcaggggcaaaatgctgccagtctctttgctaaaacatagcaagaatcacctttgttacagttcccaacaagtttctccatctgagacctccatacagttcccaacaagttctccatctgagaccaggaagttccaaactttcccacaactttctgtcttctgaaccgtccaaattgttccagcttctgcctgttacccagttccaaagttgcttccacatttttgggtatctgcagcatcaccccactcctggtaccagtttactatactccattctcccgctgctaataaagacataccggagactgggtgatttataaagaaaagaggtttaattaactcacagttcagaatggctggagaggcctcagaaaacactgtgatggcagaaggggcagcagactcatcgttcttcacagggcagcaggaaggagaagtgcagagtgaggagggaaaaagccccttataaaaccatcagatcttgtgagaactcactcagtatcatgagaccagcatgaggggaccgcttccatgatctaatcacctcccacaagatccctcccctagtatgtggggattacaattcatgatgaaatttgggtggggaaacagagccagaccatttcatatatacagagtgtgtgtgtgtgtgtgtgtgtgtgtgtgtgtgtgtgtgtgtgtgcacacagtccttgcttcacagggttccaatttccatgaatttagtaaccatggtttagttatataataccagtactccaacaacacagttcaaattttagttaccacattgtgttaactgagtaattgcataacatatacatttaactgccagatctttagctcacaaatcattaggtagataacaggtactcatctcaatcaatgaccaatcatgtcatgtttttcaaagtctgtcatgatgggtcactgcacatctgctattcagttcatgcacagatcacaaagcatgtacctttgttgccttcttgtctctcagtgataaacctatgggatattttacaaaaattgaagcttaaaagagggaattggacaacaaagatgactgggcacagtggctcatgcctgtaatcctagcactctgggagcctgaggagggtggatcacttgaggtcaggagtttgagaccaacctggccaacatggtgaaacaccatctccactaaaaatacaaaaaaaaaaaaattagccggacatggtggcatgtgcctgtagtcccatctacttgggaggctgaggcaggagaactgcttgaacccaggaggcggaggttgcagtgagctgagatggtaccactgcattccagcctgggtgacagagcgagactctgtctcaatcaatcaatcaatcaataaaataaaatgcagcaaagaaacaaaaagtgataaaactgtaggtgaaattagaatcaaacatatatagaagacatagctgactaggaatgttgacagcatagccattcaaaagactagattcacagccagaggaacttagtgaaggtgaacaatttaccaacataaatgagaaaactatttgtgacaaaaaggacaaagatgtcccagaggaagtgacactgacaagaaactttacattaaaagaatgcttcaaaatatttcataacattcagagcacacaggacaaaatgttagaatcggatccaaatttagaaaggaatgtgatgattcatcaggacataggcaagatgcttaccccatttcttgtaagtttcatgacgagaaattcaagctattcttggttaagatttttatgaagggaaaaaatctcacgcttaaaatgtcttctggtgttttaaattacactatgctggataaatattagttatattaattttttatttctctaacatttataactaacataagagtttttaacgcctcgacaaacaattttaaaggtcaaagaacaatcataaatttttgcatttattattaacactgctttgcacagttcagcataaatggtcatgtttatggctctgcaccatcttgcaagtcaaggactgccttcgtgtgtgtctgaatgtgtctctgtaagattgtgtgygcatgaatgtgtgtatgtgtgcatgtgtgaatatgtttgtgtatgttctgatcaagtaatgaaggatagaaagtcctagattaatacttttcactttgttttgatgtgtcaagtatcataagatcatctgaaatacatatttacattagctgttatcttagagcttctctgattttcttacagtttttctgagacagggtatcgatctgttgcccaggcgggagtgcagtggcactctcacagttgtctgcagcctcaacttcccaggctcaagtgatccttagacctcagcctccctgatagctgggactacaggagtacaccaccaygcccagctaacttttctatttttttatagagatggggttttgccatgttcctcaggctgttcttgaactcctggactcaaaagattcacctgccatggcctccaaaagtgctgggattataggtgtgagccactgaacctggtctaaggtagaatttcttgggtaggatattctctcttaacagtcttttttcactcattgcattataaacaatttaagaaatggcagaaatttcttgaacattttgaaactgaatttcagttgttttcctgattttttctagaagtgtttgataattctcttgagtttttcttaaygataataatcattctaataaacacaataatagcaaccaacatttactgaacatttagtatgtgtcagcttctttgcagaacatttaatatatattatgaggaaatgcaatgcttttcttttactcaacaattataataacttaaaatttgaatacatccggaaggagaagtcttttacacatcaattatggttggtgtaactgacaccttaagagtttttcacatctgagataaggggctaacagtgtggggaaggatctgttgctgatctctgcacttttgctcactgcatgtgaccaagtggctttagtggcctgagacttgctctctagagagaagcagtaagatatgaccactgaaaccagcacaaggatctaaaatgtgcttttaccttgtatttggtaacaatatacttggtaacttggtggtatgatacatggaaaaagaaccagtctagtaagtgcctagagatactggcagtgcatgataattaaactctccaaatcctcccatagaaaactcaatgagctgtatttacttctttctggcattataaaaaattatgtatccttttatgtgcagagacagttccttagggatgaagagttatgcatgctcattaacagaagaatgtgtaccacagcaggtactgcatgctaaacccacgacttatgaccctattgtccaaatgagtggcaagcataacttctccattgtggtggtgaatgagaggatgaagagataatgatggtaatgaaagaggttaatttaaatgttcttgatccatacttttgttgaatattcaggtatatttcaaattaaccatgcttcttaaaaggttggaatccaagtgtagattttttttgcttcatttcctgtgttttgaaatagaagataccattggagttctgtgttagaattgtccaagcacattgccctggctgtgaaccttgagtattggttttaagtctgtcagtctaaaaaaactttagattgttctygttgggctttctagactgactttccctgactctgtgggcatgtgtattagcataatctttgcctaaagatttctacttggtcaactgttccctatagtccttttcagtttagaagaatgcagtactgggacagatgcggtggctttgatgttggaatcttcatgataattcttcttttcaaaaacttaggtcctttgtgtcatttactattatgatcaatgtacatattgtgtgaatacctaattcatgagaattatcatgaaaattggctcattgactatatatacattaaaagatctcaagtgaacaaaaagtaatttgtgaggaaagataattgaatgaaagcaacaaatgctagggaattatgtcatttggaaacctagtcagcaaagagaaatggtgaattattatactttttgctaaaagaaataagaaggataaaaatttaggctctcaaatgaaggaaaatgaattgagagcctttataatactgtattgtctcagattgggttcctcagaagtagaactcccaggggaaacccttaagtgggcagggaaagcacagcagggaagggagaaagtggaggaagggtttgacttagcttggacagaatctcccagagtgtgacttcattcagtctaaccctatagcactctggagtatgaattagacctatttgtgttgcaggttcaygctccttcatcccatactcattggatgatagtctcagggtgtgcaaaggatcataggccctcaggcacttcccactttctgcccttgtcacaaagtggctccatcagcctgagagttgtcctccaaagagctacaggaattgggggtgggggactgaaagcaccagaccacaaaatcggggtggggtgcatgcaaaagtggcaagaaggaatgggaaggagattcaacattgtctgctatacagatgatcctaagttaacttcagaatcgtttccaaaagaaattctcccaaataatagtgatggttatctgtatttgtacaggccacacaagcttctcacatttattatcccatttaatctttgccttaacacagcgaggtagaacactcaaatcttgcaaatcaggcagctactgttcagagaagctaggtaacttgcttaaagatgcagcgccaaaaaatggaagggcaaagccacagccagcaaccctgacttcaatctagtgcccgttccaataggaggttgcttttattatgtacttttttaacctggttagtttccctgtgagattcaaactactttttgtaactgggttcattactgggccattagtcaatgcatattttctaagctgatttctattaaattgaatttaaaaggcagactttcttatcccccaacgtacatcatcagtctctgcaatttctcagatacttgtagatttatggggctagcctatgggccattttaagtcacttctgaaacaactttgttaataaaaagaagaaaacgtttgggaataaaagaaacaattgagggcatttttttttaaagatcagaggggtagaagaaggtttcttatcctacatgtttgttccataaaagggatctatatttctttagtttcatctcaagaagacaacaccttaattaaactccagtgggccagtttaattaaaaaatgtcagtcagatcctcacaggagaacaagatatccatgaaacagacggtctgcttcctttgtgattactcagaaatctctggccctgcagccacacgacagcggattgttgtggtgagcagagcttgtgcatatccactgagaagggtgggcttttggtggaccaatgagtgaggtcagggcatgatgaaggagaagagatactaggcagctgatcagaatctagattatcaacagtcagagatgcttttctctatcactgtgtgttactaatggattcatagtcatattttctgttttcatcaccaaaagatatctaagaagtgtgtcagtcttccctccctgctcctcctcctaacctaccttcctctcccactctctgcattcccttctgtgatctgacaggcccaagccttgcagttatgtgtgtatatgagagccttttagtagctacttcagcctgaatccagctcccactgtcagcaaggaagccaccttctgaaaccctagggcaagagtcagggagaaggatttaagaatcacaatgtattgagggcttagagtagtcattcctgcttctaggtgttttaaatgcatgatttcacataatgctgactttaacattacctaacttgacacagggggaaagtggagagagacgttcagtgattctccaaaagtataaagcaagtgtagaagtggacagggtgtgacacctttctttctcacaataagggtcatggctgatactttgataacaaaacacagcttaacaagagaaaagcatagcatctttatttaaataatcaacattttatgtgacttgggagccttcacaatgaagacccaaagactcagagaacactgcctatttttatgtgtaggtttggtgaaaaatggacagctatgtagaaatgtgattggaccaaagggggtgatctaatggttacggattgatggggaaacccaacaaggcctcccatctgttcagattcttcttggcttctctgttgtagtatttcttctcactggaatgggcaggaaacctctggaatgagggtcttatgacgtactatcggacaaggttaggtcagagaatttctttacagccagctgacagacagaaagacaggggaaggttagagtaatatttctaggttttatgtctgtctttggggaaaaggggaactgccttggggaagaggaattctgtttattctgactcaccttaagagagagccagggaagagaaacaggagggcaggagggcagagagatcttcgttctgaggctrcttctgagccctacatcttttagttcaaagtactcagcacaccaaagcatcatactttggagtatcattttcagagccccaatacaagcaaatgaagaaactaggaattaacctgcaaagctgcctgttaacctgaaaagcttccagccagacttgcttctcagacatctcttctttatttgtgaaaatgactttattgttttaatctgattatttaactattacaggctcattgtaaaaatcagatatatcagaataatatgctgttgtcattgaggacttttggaaaaaaaattcattcttttggctgggcgcggtggctcacacctgtaatcccagcactttgggaggctgaggcgggtggatcacgcgaggccaggagttagagacaagcctggccaacatggtgaaaccccgtctgtactaaaaatacaaaaattagctgggcgtggtggcacatgcctgtagtcccagctacttcggaggctaaggcagaagttaggagaatctcttgaacccaggaggcagaggttgcagtgtatcgagattgcgccactgcactccatctagcctgggtgacagatcgagactccatctcaaaaaaaaaaaaattattcttttggttactagccaaccctccacccctacctcccccaaccccgttcctttctatgcttatatcaacaacctgtacatagcctttcagaccgttctctgtgggcatatgatctgttcagaactttgtttatacacccatgtatgtggagggattttgccagttagttttttaaagatgtgttctctgcatcttattttttatttaagagtatatcatgaaaaattgtcctggtcaactggtgtagctttaacagactcttttaacgttctataatattccatactatgaatggccgacagtttttctactttgtttttgtttttttttcttttttagctccaagaaacaattctacagcaaatatctttgattatatatgattttacactggtgcttttatttctttgagattggtttcttaaaggtgaggttttagggttgaaaaatgtttgcatgtcttattttaacagatatctttagattgcctaagcagtttctagaacatgattatactttataacaaaaatccatcagacataactatggacatrtgttcccaactaaaatccgacttttacaaatcttgactgtcttagtcaaatgtgttaataaagatttcaaccctggattaggtacagactggaatggtagtatgcttacttgtgaatttccctgctgaacttctgggttacttaaaattcacaaaagttctaaaaattttacttattgggcatttggataaaaaattgtggcatagcacatctattttggcatttattgatagaaacttgatgttgtgtcattatagaatgataggagtttggagggggaagtgttacattgactgctactgattttatcttgtgtatggttcctccatatactgtagaaagcaccataaactgtagaattactgtgaatcatgtcttgatggaatgtgtcactggagcatgctgcagagttatctcatgtagtgnnnnnnnnnnnnnnnnnnnnttttcaaaatgttcaagtttttagaaagaagtagacatttatttaaatttactttaaagactactgattcagggctaatgattgtatagtttattaatcaaatgtatttagcagaaaaaaaagccagctacgattcacttacaattgagattttactctattttaacgttattttaatgagctacagatttgaatgtgggctttgttcatctgttgcttccgctcaattgcagtttcaccctaagaagacacaagacagattgatcaggcttccagtcattgtgaggcttaaatgaagtgaacagggccttatgtttctaaaccaaatgagaggattaaggcaaaataataataataaaaaaaaacctcccgccccccccccccccgccgcaaaaaatcattctactccctttaagtcatttgtttgattttcttaaattttatactacgagatcccagttttcctaggtaagcatcaggagttgaaaccataaaagtgaaaattgcaaatatcccacagaactattaacatgtgtccatgtaagcaaaaaactactgtgttatctcattttttgacacacactaatttcaatgcaaaagtaaaagcattaaaattatgttagattttttctagtagctaatgtccttatgtctaaagttagaaaggtatttatcatctaatgctttgttgaaattatttcatgtttatttgatttctttacattaaaatgaatttgtttgaattaaaacatgatttttatggctaatattcatagccatattttcaacactgagtttgtcttggggaacttctctgatgggccacataaggtctgggaagcacatactggacagcttaggctgctctgttttccatttgcaagtacagtctagagaggccagggccttccaacatagagttttccattgtaattataaactagttttgctgcgtaagatgcaaaaggaacttcactttcaggaagcaacttacagcatgatgtatggcagctttggccaatttcattaaacaagaaattaattatagtttctgaacttccatggctcaacctcctgataacaagaaaagcattgtgtgctcctgttatgctaatttttaaaattataaattgtttatagttaattcgaggtttataagttaaatttttaagcaagaacaggccctgattaacaataatcaaatttctataaactgacattcttggtggaataatacagattcttttgacttatttgaataattcaataaatgaaacatttacagtagataatgttatctatatcatatgtgtcataattatataggctrtgtatcttgctatctatcataaagatatagtgttatttactgcaaatgttttcatagatatgaaatatatatctgtaaatattttcatctatacaaagtattattttgtatatattagatagaatccaggatggctrtaagtcatacacatttttaagacggtaaatttcaagaggagagcttgctgttgcgaaaaagtcctatcgctaatactgtgcatcacaaatattaatcttttaatcatccttcacctacatttatacattggttttgcttaaagtgcgacagacctattttagttttccctgagagattgttggttattttaatttggctttttacagattgatatatttagacccctaaatgatgaatagatgtggtaagaccaaaataataccaaataaaatacagaagctatgatttttttaaattagtgggaaaaaatgatatctatatgatcctgtttgagcaaagccaggaattcacttaacgctttctagcagtcagggcagatgtttattttgtactggagctagtataagttggtgaatgacagaattgtttgtaatttcgacaaagataggtgttgtttttctgtttactttttgattaatttcaaatattgaatacattcacctttaaagcaaaaacaaagcaaaaaatagcaagaaagtttagattgactttataggtaaaaaaaaaaaccaggtaagaatcagttttctatactttgtcatttgtgatgatgtttgattttgtaacattttttattttgatcttttgttttggttttaaataatagatttttgtttaaaaatatcttatttatatattcaatttctgataggtttttgcataaagaaaaaaagcctttgttagtaatttacaaatagattaaatcaaaaagataattgagaagcttttggcaacccctgctgagaaagtatatagcaytttcattacccagagaccattatgctagttattaattttgataaaatttaaaatgcatctacatatagtttcacaattacataatttaagggaacatttttgacacaagaaatttatatttcttgaactaatgtgtcttttaaagtatgcacatggtatatacatttaggtctcaaacaaagatgtatgaattaaagttatataataacatatagccaaccttaaagagctwaatttcctcttaatggcatgcatatacagccattagtggatgtttttgcattgctttgagtattaacaatatctctgaatagtctgtgtatctaagtaaccatgattgtggttcatttcacttaatggtcattcatataaaattaaagctcagagtattattatttgcttcagctaataccagttatattactcttttataggtcagctgatattttcacataacagattttcccagtctcttgactttttcattttattgtgttgtttctttcattgatattgccctcataagttcaaggtgaagttttcaacttcaaagttataagtcagttttcatgtaaacaattggcaacaaccatcttcgacatcgtctttttttaattcagctttgcattctgttatgtaaatgaccatacctgtgtgtctctaaaaaatctctatttataatgggcacattaaaaaatccttagctattcagtgtttttctacaaataaatgtaaagtgggttcattgtgccttagattaaaggctagtaaggcagacaaaagggacaccattgcgaattaaaccataaaggtctgaagtattattaagaggttcacagatactatgttccaatcaggctcaataagggttgaattcctattctgtttctaaagcctccaaaaagacatgggaagggacccagagttaaagtcgtcaaatagaaagcacttaggccaagagcacatgaatgtatggctgggtaatgtgcctttcatctttgaaataaaaacagttcagttcaattggaagtgaagtttctaccctttgagaaagtttattttaatgagttttcattttatgcgtgggctgttctttaatcgaggctgtcccattgaagtcttacccaatgaagacgcaagacagattgtccaagcttgcggctattgttagaggttgatgaagtgtatgggcccttatggttgataacagaagtaratggtcaaagccaataaataaaaccttaactctgattgttggatgctttatgctgaaaaggtttccattagcatggatttttggttttgaaggacttgtgaacccaaaggcagcgtgtagctctgtcacacaaactaagtcacttagacaagcagcaatctgtcctagctgataaactcagtttcgcttttaaaattttagacttcttttcagaagtcaacattgttaatatcttgacagacaattaacttaataatacatgaatcgctgcactcactactgatttatcatgaaagtgtagtttaaggaggtcatgtatgttttgctttgtggggatcttaatgatgtaaattttagaaatataaatttaatatattttaagtggttgatatctgagtgtgcggaggggagaaagagaccttatggttttagtcatggaatgaactcaattgtcataaatgtaggttggtcattgaaatgacctttatatgctctcttcaaatttttattattctaaatgccatttaatctaatttcttggcaatggatatggtcagttgtgtatccactgttgtcttaaaatttaccaaaactgtgtgttatgagctgaaattccttaaaaatctgttccagtgacctcacaactatatatgttagaagccactacatcccatgatttcagtcgtgattgttgtagtagaacagatggagccttgatgactttgagggggtaaccctgcccataattgccttgccactggaatgctgggacttccgggaatctactttatatttaccttccagttaccctaaggaaaatccacctctgacaattgtgggacacagatgcaaatgtgacccttagcccatatcttgcacctgccattctacggggacctagtctgcctggaatggaccactctgcccacaggaagctccatcaaactttcaccccaaacaacagccatcggctaacctcagacctggaggtgaacataatggctgcatgtttggcttttgggggatagacccaagaaggaagcccatgtatgccccagaaggggacttcttactgttgaacagggaatcccaatttctgagcagctggaccatgagcacaaagatggaggggctagggcagcatgtccccttgggtgctggattccttgcctttggagagaggtgtaagcctaggaagattcagggcagaaaccctggtgcttagtcctgacgagcagtactgggattacaggtgtgagccaccacacttggccaaaaagccaactcttacagatgtgcatcagaatggacatggtggcttgttatggctccaaatatgttattttatactactgagtgaccctggaatgtgttgttaataccattgactcttgggctaatgatgaacgaagrggtagttaataactctcactttgaatattcaatagggatgcaactacctgaagtcagtgatttatactttatttagrcctttgaaatgccatatactagatataccaacatatattacataaatagcttgagttgttcctttaatgctcttatacaaccatgatcattaagggtggaatatatgaactcgtgactgtatagcaatttgcagtaataaatatagtaatttatttttaattgtttcatgtctatattataattataatgatttgctagatataatagtcttatattacaatattacaatgatttgctagaaaaatgttatttacattttttttccaaaaaaaaaaaaacttattttttggaggcagggtctggttctgttgcccaggctggagtgcagtggtgcaatctcaccttatcgtaccctccactttctgggctcaagtgatcttcccacctcaggctcctgagtagctagaggcatgcactaccacgccctgctaatttttgtattttttgtagagacagagttacgccatgttgctgaggttgatctcaaactcytgggctcaagcaatcctcctgcgctggcctcccaaagtgctgggattacaggtgtgagccaccacactaggccaaaaaaataactcttagagatgtgcatccgaatggacatggtgggctgttatggctccaaatgtgttattttatactttcagactacctaaaggtagaatagatacatgatttaggggaattatactattttgtttcattaaacaattacatctgaatggcactcatgaatggtaaagagctagcaagtcaataaacagtcgtacaattttcacaacattctgaaatgttcaaccaaaatgattggaaaattagcagtgacaacatggaatctctttgatactgttttatctcccttccctctgcagttaaaaaatagaatgtaacwaacctgcacgttgtgcacatgtaccctagaacttaaaagtataaaaaaaagagtaaaagaatggaaaaaaagatgtaccatgtaaacattaatcataaaaagctggaaaaggctatattaatatcagacatagtatcccacttcagaacaaggcatattaccagcactaaagagacattttattttgatgaaacagttaatacattaagaagctataaccatgctgaaagtgtacacactttatgatagaactttaaaataaatgaagcaacaactggcaaaagtcatagaaaaatagacaaacctataattgtggttggatagtgtagcactcctccctcagtaattgtttgaagtataaaagacaaacaatagtaagyatgttgatttggaccatactatcaaccaccttagtctaactgacattaagagaacactgcaaccaacacctgagccatacactggttcataaaacaaagtttaataaattttaaagaattggagtattacagagtattttattttattttatttttgaaatggagtctctctctgttgcccgagctggagtgcagtggcgtgatcttggctcactgcaacctccacctcccgggttcaagcgagtctcaggccccaggctcctgagtagctgtgattacaggtgcctaccaccacgcctggctaatttttgtatttttagtagagatggggtttcaccatgttggccaggctggtctcgacctcttgacctcaggtgatctgcccgcctcggcctcccaaagtgctgagattacaggtgtgagccaccgtgcccggctctgaagtgggatactatgtctgatatagtattttccataaatgtttagggataaatttaacaaaagatatgataacttcttggataaaaactatgaaacattgctgagagaagtgaaagatcttttaaaacagagatattaaaaagcatgctatctgactaacatggaattaaattaaaagtaaatgaaaaatatatcacaaagaagttcttacatgtttaggacttaagcaaccacttctaaatactataattttaagtaagagaattcagaaaagaagattagaaaataatttgagagacagctaaaaacagtgcttaacgcaaaacataagctttaaatgcttatgttagaacataagaaaagatttaaaatgcatgttttatgttttcacttagagaagataaaaaacaggcataaactaaactgaaattaagttgaaagaataaaatatttgttaatttaaaaaaatagaaataatggaataggtatcaattgttgaatattaccagtagcctgaactcacagagtgtttctcccttttcttcatttggggaacaaatcatagggaacttagtggtttcccctgcaactgtaattacaggctgtgtccgtgttaagaactaaaagattcagatgcttaaatttatgttcatgttactatgctgtagaggtctttctcctttctctacgtttccctcttttgggtgtagaaagaagcagtgggagttaggcagtgagttctcctctcacattttcccattttccctctgttgccagtgattttgctaaaatcaaagtgatgttatgaggatttttgtaggggtgtgaggaacggaaaaaaaatagaggtaagatcttggaagtgtagcaaaatgggatgttctttcctcttctctatattttgtagtaaaatctataaggaggaataaagtgactagcaaggataacaatgagagaagtcaggacagtgaggaaatgaggagccaagtgaacagaagcccaaaagtgttgtgtgctaatttatataaactgttcagtggaggcccttttatgtccctttcccttctaagcaatactatgcatactttagacccctgttcacagtgattttccacctcttcgcccaaaagattagttattctttttacagtctcataatatatttcagtggtgtcagatattttaaaagattataaaaaatttctagcatttttcttttctagaaggggcaatttacgtagtaagatgcccactttaacaaacatcttaacaaacaaattgaagtgtaacacaaatcttaatttctatcaaatttcaaagtagacaccttggaaagcaacaaagatacttccaaatttctggcctgtaattcatgggttgggtgccttgggagccatcagggtctcaggccatttacagaagtgccctgccctgtttccttattcctagatttggttggtttggttgttggatggtttaaattcccaaataaggaacacggtcagttttattcatacattgggagaaaggagtatacatctttttataagacatcctgtctctctgcaacattagattaaatatttgcttaaaaaaataaatgttgagtttatcctgttgattttctttacctttaaaaaaaaatctcaccatcattgtgtgcagtcatttatcctgagagtagatgatggggacatcagttttcatacgttacatgacacagaaccagaaatgggatgttgtcgtgtccagacctgtccatcactgaggattgaccttagacttcctgatcaattctgacaagtcactgacagtttgcaggggaagcacatatgtgacaaaggacaagcagggctacatgtgtcagcaagaaccctctgattgcaactagaaggagtcaagttgctgacaactgtagtgtctggatgttcttagttttcttttaaaatatggcttcagaaaatcacaagtacccattcctccagatacacagttttcctgctgatttagtccatggttaaatggcgggtcacaatggtttgaatgctaacatgttcttcatctttttgccagtttgttcatgcatttgcacacatttattgatattattctggatcctggaagataaagtgtaaattcatattctttataaaaaccacactgaattgttttaagatttagaagtgtttagcataaaaatggacacatctggctcaagtttgagtcttaaagtgttaatgtttgtccattgcacagaaggtacagaggccatatagcatggttaagagcatgaatgctgaagccagaaacacaggtttgagtctttgctccactcagaaaagctgggcgacattgascatgccaacacctaatctttctgggagtcagtgccctgatctataaaacagagatacaagaratcttatcaccttgtgttttgggattatatgagttactacctgcaaagcatttaaagcagcacttgacataagatagatgtttacaattattaaattctgtcactgattcttaatatatttaaaatgcagtcactatgagatagcataatgtaaaaagagaaracccatgagtgtataattttgatcaaatttgggaaaatttgggctcttatctcttgaagatttttttttgactccctgtctcttcccttctgggattccaattacttgcattgctttatattaccctactggtcattactactttttaatttctttagagttttatctttttttctttcagatagtttctgttgctatttcttcaagttgactgatctcttcttctacagtatctaatctaatctgctgtcaattttacataattttttgttacagacatttcatttttcatctcttaatattttcattttttgtatcttccatttctttcttttcaagttcatgtttttttctctattcttgaacaaatggagaacatttaatcacatgatattttaacttccctgtctgcaaattccattctctctcattttgggagcctgcttttattgatagattgattttttttttcctctatgttttcctgcttctttgcttgcctgataactttttattgcatcctggacattgagaattttatggtttgggatgatggattttgtcatattctttttgttgtgctttgttctagcatgcagttaagctttttgatatcaggttgatttattggaaatttgcatttaagggtgggtctggaaacagatcatttgacaagtctcatatactacacatataccaacaatttttgtttgatgatgctacttattaacttttcaatcagctctctatccattcatccaaataatgttttattcaatttctcttatataatagaataaagataaataagaatcctcaaggagcttacagttcaagagagaagatcatttaggtgtaaagcattatcaggcagtaattatgcactaataggattatatgcaaagtgctgtagcatctgtcgacatcttacttttaccatgtgtatatatggatattcaaccaaagtataatcatacaacattttcttctctctttcggcctcacagtgttttaagaaaattaattatacaaatttctgcactgtaagactatatatataatatataaaatatacatacacataacacacacatatataatgagacatatacatataaaatgagaaaatgtatatatgtatacatataaaatgaggagaaaatatataagtatgcatatatacatatatataatgatatatataaatgaggagaaaaatatatccacatttataaaaattcaagagtgtatttaacaaatatatgttggttgactataatgtgccagtttcacaactggagctacaaccatgaaaaaaaaaatcctttccacatgcaaatttaaaatgcaagatcaagtggtgatgatatatgatgtcttataaaatgatgactctgtgtttatcttcccactctcaagtgacatgatggttctagcattgagttaatggtagaaagttgtccctaggcagggcagcctgttttctgttctgagatccagaatgcaagtgctgctgctgctgatggccagttccagtaaagtgttttgttttaaaaaaaaaaaaaaggattgctgatggatctataattttgtctgtgaaggtgctatttttgtagctacaaattgacttccttttttaggattttagagtatgattttcaagaagattcttaattgcaaaagaaaagtcaggctatgagctacaactacaaatgttactactattgttgttcctgcctctgctactgtagctctgattttcttaattgtcaacatgtgccagtgctgtgttaggcactctgttctttgctgactttatctcttttaatccttgaaagaactgtgtgaggtgaaggataataatagtgcagaagagaaaggattggccataaaatcatttttaaagtatttatgaaaaatgagacatagtcaccaagacagaaataatttttgatttgctatattgaaagtgctataataagactattaacacatgctacactgcacattgtaaattgcaattagcattgttgatttgatgactgagtagatatctttctgagcaagacttatttggaaaattcatttcaatttctatattgttttatagaaggaaggcgtattataagaatattcagaatttaaaataacccccacaagggtgcctccttagtattatggcttgctgaagggtaaattccccacttaactagctttctgaagaactacctgaaagttgagtcagacacagatcagaagggtcaatgtagatgcacatagggaattcttttctgtaaaccttgacttccctctttaaggcagggactcatttcagagagtgacagatgacaaaaccaacactgggcagatggccttcccttggcacctcaccctctttgtagcgccaccatttgtcccttcccaggaagcagcggtggtgggcttctctgcagtgactggtcccaggcagtgaggccaccaagcaggagagacgccaggaggtttaccatgcagctgtgaaatcatttccactcagctgtgagttgtatacaaatagagaactggtttgctgtgattctgctagtctagaagttgtagcaacagatctctctgtgctgagctgacagcagatatgaccactatcattagagttaagggctcctagtgcctctactcttgtcttcttctggtgtattaaactttgagagatttgaaaaccttttactccctccctccctctcatgcccacatctctcttcccccttctaaaaatatagaacagaaatgggcaaactgcaatgtgcttgtttctataaatgcagtttgttataatggtagataaagtattcttaaggtgagaagtatgtgtggttttattctttaagatcttgcaggagttttcctattttaaactactacaaagtaggtatctccttttaaaattgggctgcttgaatattttatgtattttcaaatatgaagcttagtttgaaaggtatttatttttataaggkgctttatgtttatatattatatataagaatataaataaaatatatttatatgtactttttatacaatttatattttacaaggtgttttgtattcatctgttgctcaaccatggatttatccattcatgaaatttattgatgtactaccatgttctgggtactgttggcctacagtgatatacaaaggaggtttctgaatctaaaaatggcaagtatcctaactgagatgttagcagaattcagagaaaagaaagattatttccaaggttggaggaattggggatgtaagaaaagtctaagagagaaggtgtcaaatatggtacctggtatatataggagctacttaaacagtatttactccatgaatgaatgatgaaggaacaaatgaaagagaagtatcctttggccttgcaaagtgagtaggttggcaatgccagaccaaaggcaaccatgtgaacaaaggaagacagaaaattcaaggcaaagttagggaatggagagcaactcagtctaactggatcagggatgggtgttttaaaaatagagggcatcaaactctaaagaatttgaatcttatttgtgtcataggaagccattgagagtttcagagaggatggggtgacctggtcagatctgtgctttacgaagacttggctggcaacaactggtaggctaggagggatggatagattccagaatcacaggggctggtactgagactaatggaatcagcgagcctgaatctgctgtgactctctactgcttgaacaatatcctcagaaaaatgagccgagtgccattgtttttatctgatagaactgttctcgatatggcctgtagaaaatgtcaaccaaatactgtggcaggacaaaatcagtcatgaaatcagactacaaaaaattgctctcaaacagtaaagtttgaggtgaagtagctcatgaggaaaaaaaatcaatgtagtaaaaattaacacagaaatcaaatcctctgcaatctattgtgcttaattttcaacaatcttaagtgtttctgggagagtactttgtaagttgatgttttctttttctttttcctcctttgaaaagctatacactgtgtatgccgtttatcctttttctggcgcttgtaacacaaattatgattccatccagattagccctaaggtatttcactttcacttcctttgagaactatttctttctttgtaaaatatacaattaaaataatgataatagaaaacagtccagatttttatgaacagtcttataaatcccaggattctgactttttaataattttcaccattgactaatacatttacatatgttcttagtaatgaaagcactacttgaatgactatatatacatacatatttaattcttcttaacacacaaatacacaaatatccatatcattaaagtttttatgcagtggggagaattaaatgcataacactcttttcttctccctctacactttatattcagaaatagctcataaataagatmcaagaaagaaagatagaaatcaaaagatcaaatttattgttgatcaagctttttggaaaatgaagcttggcatttgcagctaaacaggcttgattatattttggttcttcctcactatacaaggaagtgatggtccacccaaggaaatgattgtgtcttcagagcacacaccccttcccaggaggatcagtgttgcctctggtgcagagctgatagagaagagaatcctgcactgcggcccctttctcaagattagtccaccaattggagtaacacagctcagtgcctgtcagatcactgttgcccacagttagataagttaacatttcttctttgtggagaggcaaaggaggaggtgagcatgaggttgagggagaactaatggtgttatctatggaaagtactttcatctagatacacaaaaccagtggaaaggaggttcccctctaacatgcttatacgaacacacacacaaatgtcttcaagcctatgtaaatatttctgactatgattttgctatatgtaactgattttaataactagtactttcagtgttgaacattggatataatcaaatgcgtgtattatatacactcaagaatgcagatatctaagccatatttcaaaaaattattaatttctaacaaaacattaattcagaaaagcaatacatttagtttaaaagtcctcatgaccatattaaatgtgaaaacatggaattatttctgaaattctactggagctgatatcatagcacataaagcaacaaactgaaacgcctaggttcactagcataatcctgatactgacattatatttaaaaaaatttgtactcatatctttgtggatgttcttggatgacttctttccttaaggattttgtttacaacaaaatagtgattattaagttttgcaaagtgtcaaagaaaggtggtgacatattggctgattgtgaaaatgtgataaagatgtcgtgctgagtaggtgaactggtggcctcagtgaggacagagtagagagcagaaggggatgtcattgaacttccaaactcagtaaatttcagtgattttcactgaaaccatcctaaaatttcttttgaatcttttatagttttaagcaaaatatttagattaagtcagattcacacttaaatccaataatctgttatccaacatcaattactcaatacagatgactgggcagtgaagcaaacttacataacaccaggcaaggaagaaaagaacataatatcctttgcctctttctgctgatagtccatgctcccaagggcattgtacatatcctgatattgcaaaagatacaacagcaagcctgaggggattagaattatatgattagcacttctaattctcagggtagttctctatcttcctccctccccagtactgcccatcatatgccagtgtatatatctctatttccagagagtatactttgatagtgaattattttaaaaaacacatcttatttcctatgtataatttccaataaaatctttagaaatccagagtttgtgattggtcatagcagagagaattttgtttgattttggattttaagtctttagaaaaacaaattggagtgcaagaaaagtgaaaaaaaaaactaattgaataaaatgtaaatgtttggatgaaatggcttactagtctaatttggtgataactgactacccaagatagcctgccatgttagtaattggggagggaaacttttcatttcaaatgacaggtgaataccattttcagtggttagcttttgattacatgtcatgtttgtagtggtctattgaatttttaaactgctgtagtctgattgtgtttgtgaagtctctgttcactcaaaagaaaggaagtgcctactataacctcttcaatgccaaataaamccccctagataagcttggcccatactatgactatgaaagaacttctacctggagatgatgtcacaaattagagagctggttgcctggccacttatcaggggatatggccttgaattacacaggcatgttgaaatagatattagactctggaatttgggaaatgacattgtctccaatattcattttcttggcctctaggtaccttcaaactaaatggactccattaaggatgaaagtattgccttagtagaactctcagatttccattttctctctggaaggcttgttttgcatacgcatatgttgcacaacatatggatttttgagttgttggagtataaattctaaatgtatataaatttattattgtttaaagctgaatcattcaaggtttctaatataaagtctgattttgtgttctactggatggtattaagtggatgaattgctcaattgttacgactgcttggcaatcctgtttccctttctgatattggataccttcttttaagaaagtattttttaagctgatgataatcttttctcctacttattgagggcttagtatgtgccaataaaatgtcactattattgtaccacattggagatgaaattcaaagaggaaagacatgtgcttgatgtaagcagcttagcaaggtccaactcaggtcttcctgctctcagtggtgattcaggacagcctctttatcaagcaacatccttttttattattgtgattagtttactatttttaataagggatgaaatggacctaattaaatccaatcgataagataagagcccttacttaggacaagaacttctattttcctgatgcaaccaggatttcttgctgcaactttcatatgaaaaatcagagaaatgtagagaacttttataattgtgaagcttttaacaggtatttctgtttcattagaattaagatcctgattaatgaagagagatgagaaagtatgtgcttaaatgatgaacactctcttaggtagtctatggaaagaatgattgtttcaggaacaaccatcctcctagtttaagagtataaaaagaacgcctacattttaaatgttttcccttatactcattattggcacactttactcaggacttagtagtcagttttaccatgtattctaacttcaccttcacctttgtactctaaaatttccttgcattaggatcaagtttagaggtatccttttatctcaaagtcaattctaccaactatgttttcagagagaaatgttatcataagcctgaaatcttatgccagataattagaggggctcttaatgctgttttctttttccagcaaagtactttaaataaatgcttcataaaagtagttcttatgtaaataaaaaaaaattaaggctcagtttagaccttcttggttaaaataacccgttggagttcagagggcttatacaccacaatgttaaatgctctaaataccaaagtgccatctttctgaattttattgttctcactgaatcactgtattatcttgatactttctagcattttcagtgcaattattaaaacagttatggccgctctaaaggaatgtaattggaaaagaaagatgrcctgtactggatgaaatttttaattaatctttcactgttaaattgttcaaaattaatcaagtatattgcctataagaaggcaactrcactttacatacttcagtattatcatcaccaagccatatattaaaagttaatttctgatttaaaagtgtaccttaactgcaaaaccgtcaattctaagtaattctattactcccctcacccccaaaaatcttataaaaaccaaaggacatgataaagagagtgctttgtgcttaatgttttgagattttttttttttggcatggactttgcaacatcaaattaggatatatgatttcataaaataactaatctgaattggagaataccattcattcactcattgattcagtcattcattcatttatttaacacatctatgttgaaaaaagtgatgttttagacaatgagaataatgactgaaatgcaatagcaattttctgacatattatgagacaataaacaacttaaattctaatcacggctgtagataaatatccttggggatatttgagaaaattatgaaaaggtggtgattccccccccccacctttttgaattatgcagattatattctccactggttcttgctttttaccgccctaacatatcagagtgataagatacaacccacctgatacacttggccccgaggaagtgcttctcagataaaaggaggaggtgacttatccctttgccagagctgggaatgactgaaagagttccttggctgtctgcccattcctaggttgagaattatcagtaaatgggatcataggtaattactgagtaggccacagagataatgtctaaacacatctaacgcaaggtccttatgatcctaatagagtcagtggaactaagtaagtgyagttgattttttcccccaataagtcaactggttgttgatttaattgattaagtagatattttcatgccacacagacatactctagatgtcagcataaaataaatatattattttgttggatattttttaagatgtgatagttgtgatcaagaccattttaagataaatgtgtaacagatatttctcaaagccagaacagcatgaaatgttatatatccctgaatgcaaaagtcaagaggtatgtctaagacttttctgctttgatgttagagcagtcttgatcttaccacctggctttcagagactataagaagctatttcaaagaggcaaagatgtaaaaaacaaatgtgctactgttcttagaatcaatgaaataaggttataccttttcctgacaattttctatgttctgatacatattatatttttaaacctgcatgcaaaacacatataatgctacacattgagatgttacttaggaaagtcatattatatgaattaaatggggaacccactgagatgattaagatatatctgtggaatttatagacattattcatctaccagatattgcctctttagaaagagtatcctgraatgccaggtttgattgaatgacttgaaattgggtaaaaatcttttctgtactgggctagccatacaatgaagtcagctgacacatgggtaaaatagacaagctatttaatgtcatgatctgaggaagttaaaaaaagagtttttatttcttcctgccatggattatctctgcctttcctctttttaaaaatagaaatgcttctttgagagttaacacatcatacttctaacaacttatcatgggttagttttttattgctttctgtcctgactaggcatatagaaagaaaagtgcagcaaacaaaaggataaccctgaagaaaaacttgagctgtttctctgctttgtctaatctcctgtcaggacatcatttattacccacaatattcacttgagaaaacaactttgagaaaccagcaaagaaaaagccaaaggatgaagatgaagtccttctatagttcaaatcgctcatgtctgtgatcttcaaaatgtgacattggacaatcaatttaaatgctcttttttaaaagatagactgttgtattgattattatttcatgctatctaaaagtttccaaaatattttgtcttgttgtaaagagagaaccagattaaaacaatcacgtgtcagtttgttttctaaatattcatatattctcctccctttctgaatgacagagccgttgaccaacagctgtttctattatgtagtttgggatatgcttctttcgtttgtttaccctattaatgtgaggatttctaatgtttcatccttcagacaaggaactggtcctgatggcctagctgctacctatattttcctggcttcttttgtatggtattaaatatgatttagaggtttcttcaaattgtattttcattaaaggaaaaaaccaagcatgtaagagccagacagttttataagaagagtagaatatcatggtgtaaggggttatgctgtgcttccgttttatgtataattaagcaattcaagcaaatcaagataatttatcttagcaactagatgattatttttctccttttgaataggagctgtcttttattttgtttaaaaatgcatccttaccttctgttttggaacagaatagaagcatttaaaaagatagaatttcgtattgttgaaagaaatgtgagacaaagctgacaacccgttcataaggccctttcaccccatctctaggcatggtgacattggtacagacagggtttgtcactcataaatttacagcttattccagtctcttcataaattgactaaattttttgaaagaaaaaaaaatagatgtataaaatacccagttataggttgtgttctatttagcccttgattgaaacgtattgctccttagtatcttttagctatgaaaattataatatggaacagagattagaatgaaattatcatggctagaaggcatttactcagtggtggcaaccacataaacctgggtcctgagaatgatgataatacattaggttctgcatgcccgatattattgccgtacattatgtatgtttcatttatactatttcgcacacaccagcaacgctgacagataggtaattactctctgcgccaatgaacagttatcagcaccaccgctgtttattgctggaatgaagcgcgcttgtcagtcaaggtcacttgtttgtgtgtcctcttcaatagttccttcacagttgttgaactttgcacacagttcttattgcagggttcctggaggttactttactacataatgtgtttctggtgttatcaaagtcacttgtatttatcactttaattgataaacaacgaagtcacaggaagcagaactgaagatgtgaaaaaacatattttgctagtcagctgatcccagtaggttttcagtaatgaatgacctcaagaagatgcattcagcacagaccctttcaggttgtgatacgctgccagcctaagctagtgaaatctcattttataacattaaccttaatttcagctgctgatggatactgacacaatttcataactactatagagttaatgtttttaccctctagaagtgtttttctttgttcatttcttgtgcagtgcagaggttattttcatgcttagtatagttmtataatgggctaagtccatttggtttgacttaaaaccagtcatgtttatttgttagatatgtgccattaaagcctccccttcccataaaaaatattatcagtctaatgctggttctcctcattgtgttaaagcaccggtcgtgttccaaaatgaacattgcatggtgcattttttagagtaaaaataaattcaatgccattgtgtcsatcccatgcagcctgtaatttcatctgttataaaataaagagaatggttggtctttttatttttgtttgttagctacagtgctttattagaaactggaataacctctrtgatataataatttatctagtcaagataactggagttatttccttaagcctgtgatcagcttgagtttgtgtgttgggaggtttatactgccgttgcttattaccaaagaaacagttaaaaaggatttatggtagtgcccgttatgtgtgtgtctggaatttttgtgtatttaacttctctccttgcctatctctgttttttcctctcttaacattatcgtcaaatagagagactatctatacctacaattaaatgcaaattttattcaggcatttaagcagaatcacattcattcattaaaccaaatgattcttttatttgaaaaaatatatcagcacatggtaatatcacaccctgcttacaagggcctctagttctctgtcagtgcaaaagtttactatttcattattaaaggattaaactacagcaaaagctgcctggtgaccatgaatgttttagttaatttgattatgcccataaagaaagagtttaattccatagcagccagtgggtcttatacctggcagtgtggttccaatgcattacgggcatgatcttatcctgggagagactgaaattgccatttgggtgaggtgtggaggaagagatgagaactgggttcactggtgaacccaggttaacaccatgcctcgacgttttcaaaatgcttccttttcttagttcttagttaccagagtgttacaaagaaagggttttgatctcatgtagatagcatagcattaattaccctgacactaattaaactgcatcaaacaaataccaccgtgttcctcagggggacaacagaaggcagtttaaaataattactggagcttcatgcatgtgtgaagttttcattactcttaggacacaagcaaaaaagatttgatatcattaaaatagccaccttttagtgattgcaacaacaacaacaacaacaaaaagtgactaaaatttccttggagcatattgatgtctaaatagtggtggcttcagttcttcagaatggtaacttttccttaagaattggaagtgtgtgaagcaggaacaggtgttccagtcacattctggtatgattatgtattagcttatgtttgtcagaccatttcattaaccacccactgctatcacatatacatatactttgttctttctgaaccatgaaatgaaatgcatatatcttcactaatgcttgctatcaatgtaaatgagaaaaagaggcttattaccaatcacgactcccatgaagtccacacctctgtacacttacaggtaataaacatcttttttgtaagtagaacaaaagatatattgagttctgcctataataagagatagtgatcttgtcctacttttttgtcctaatagatggtacttcccatacatagtttgacacaatgctatgggaagcaagcttctctcaaaactggaagtgcttgttatttttgagatctgacatcattctggacataagcaaacttttctggtcacagataatggaccttttgtgccactggacaagtgcagtgaattagtggccaccgttactaggatcatagatggtccctgtcctggtggttgttagaaaggactgatgtcaaaattgccaaatggatggtataaatgattgacagtgttgctgtgttagggccggttatggtgactgtggaagttgctcatgtttgattgctcttttaagtgtgtgtgactctgcacatgtgtgcwtgatgtgtgtgcatggtgaattctatgcgtcgtccccactgtctgctcagtatatatgcacacagcacattctacagttttgtcctcacaaggtcacttatcctatttatctcagtgacatatgagcagtgggactcaagttgtctgggttctagcaccaggtgccagccatcctccctgaaaaggtgttgggaattaaaatgggagagtggtcatttccagattgatgcaactcatatttcattcagtgaatgactccttgaatgtgattatggagtggttctgtgtatgcagtactgcataacataagccatttatttttttacttccttctgaaagcaataatttaagggaattatgcattatgagggttttccagtaattttttttaaaattaaaataatgctagctattttaggaaacctgtttaggaaaataacactgaattagtgctttgcagttgtcacactaagcaaaaaatggaacaaaactgattgtagaagaataaaaaattaatccagttgtagaaatttgatgtgttcaaaaatatgcaaaaaatatacttttgttcctttatagccagatggtttgtcctattttaagctgatagtaacttcatacatctctcttgaatgtcattggttttaactggcagacagtatctactattagaattttccttattcctggatgatctaaagtgtatttttggaacatttggatgatcatactgtacaccaagaaaattttttcattacacttagctcatactcaaaaaagtgtttatataattttaaaaaaacctctaaaaatgaacagttcttttgacatgatgttgacagaagtcactttgatgtagtttagagtcatgaattttctatctgttccatttttcctggggctccatcaactcagacatcctgatctgtcatttttcaactctttgtgaaggccttgacagatagaggttttgacaagtgctggacatcagcagcaatttagaataagcagtgtatatttctccaggtaaagtgacaaaatgtctaaaagtgtcagaagaactatgtggcctgcaatcatctctaatactataaagcaagcttccatttaagtactgtgttgcagcattgtwtgatggctgaaatttaaaattctgtcagaacctatgattagagggcatctggcttatttacaagtgtttgcaatattaagaaccttagggtcactagaaaaaaatcctttaaatttctaatgagtgaatgatcaggataatcacataatgtgataggagtctttaaaactataacacaccattatatatttttttgtttcttcagtactaatttgggtcattctttttaatgaaaacctacttcctgtgctgtcttcagagtgtacagttcagagttcaacttaagggaactttcactgggtgctaattataacaggtcattcaggtttcagatgtgccagcatttttcctggttgactcttctatcaatgactaagtaataactgtaaatatcatctcscatattgaatatgttgtccttttcatataattattttgtgtctgtattcactcaagaaacagctgttaaaagttgagtgggatgcaaaatggcacagcctgaagatgttcttactcactcagctaactcccttttgatgtgatacctactggcagggtcgcgtggtgaattcaacttctttgacagccatcagcactactgaccagtggttttgggttttctagtgaggggaaagagtaggaaagaattccgtagtttagtttttttcccccccctgctgctggagctaaagcttctgccaacaactatctaaatcaacaccatgccaacgtgatctgcagaccaaaggtcactccaacatctggccccactgtctgcttctttcaggtttgtcactgggcagcatctgcttatggattctttctcaacctctctttgatctctctgacagtaaaaagaagcttctatcacccatcatgtgttaggactttaaaaaataaattcgaaagcatgagacattggaaaactggtggaattttatgtttttcactcttgtatacgttgaacattttatttgatacaaggccatggactaaggtgattctactcttgatttcaaaaagtattgtcgtaatcagtaagtccactctgtgaaaatatctggtctatgtgagccctgtcttgtctctcttggtcaggatttaaaaaatgaaaactgaagagcacaaactggttttgtttttggtttgtttggtttgtattgactctgaaragtccgtggtgatagctcttgtctgcttttctgacatttctatcagtggttgagatctcatgtatttttcatccatagtgtggaatgtagagcacagtttggggatgctacatagtctctgggtacatattggtgaacatggtcagccttttcgtgaaacgaagcccaacagcctgttctccctggcagcagtggcgtatctcctagataaggcacaaaaacagccccatgcgctattagttcttccttcattccttcagccctcctccctccaggtgagttcttattatgtccaacctggagttcaaattcagccagcacaaaacgaatgctgactctgtgcctggcactatcctaggtgttggttatacagaaatggacaagacagacacacgtcctgttctctcagagtttacagtctggattgacacagcgggaggggggcttacacattttcatgtcataaaaaactgaatgagtcagaatgtgtttggccttccccaagaagtggcaacccattactgtatttatatgtgagtataattataagagttcacagctatgattgtaacacaattttagttctagtccaaatcaaatgccaaaactctcaggggaaaaatgataatgcattctccagcacctaacacagaacctgccaggcaatacacgttgtggagagaatttgtgattttcttccattttcattcattctccaaacagattggcagtttctattttccttcaccctccaggaaactaaagcagtagataaaaccctttttttcccctgtgtgatttaactttggctaactaaaacaagaacttgtgtttgtagcatttgccacaatttcacagcacttttactgctttgtcatcatttatttttcacaaaattccagaaatgtacaagaaacccagaattgagctgttaagtccacagtgactgagagagcattcagaccagaaatttgcatgtatttttacaattattagtttttaacatctcatgttcatctcataaaagaattacctaggaacttgttctgtcagttaaccagtgcttcagaaagtgcttaaataattgatgaaatataagaaaaaaaaagtaagcaatatgacacaaagaatgggactatttcgtatggaaatcaggctaaatactttacagtcacaaatcaatgctaagatgaagactgacaaagctagcactatgtctccttagccatacatattccaaaaagactggggctcagagtagctggcttctcatttcctttcctgctgactagtttagtgaccatgaacaagtcatttgagcttcctggttctcagggtttcatttttcatctgcaaaagatggtctgaggattaggtggtaaaaataataatttatatctgattttttgctttgcastttatagtttccacatatattatcccctttaaccagaactttgtttcaatattttaggaatctgtagtttcattataaaggctaaatgtttgatttccaaaagtattgtcataatcaataagttcaatatgtaaaaacatctggtctaagtgagtaccatcttgtctgtcttggtcagcatttaaaaataaggccttcagtgcaggcatcagataataatgaccctgtatgataacctcatacctgctttggaaattatctaactgtggaaatccagtcccctaaatgataagtgcttgtattggtaaagaatagtcatgaccctgttaataaatctgttgttgggttttctttgttctggacatttagcattacaaactcagaggaatgaattaatgtccaataaattataagaattataactgttctatttatcatatacatttagataatttaagaatagaatttacattttgcatttttaaatttatatctaattacatcatttgaagtacctgaaaacattttgcacatcaaaaaatttttcttttcttttaaaagcagccagattacaaaatagccctttttttgttaaccaacctgagaatttacatrtattactttgaccactagagggagtctgcattgtcaggaatgccaagcccaagagaacatgaaacaggctgttttcgggtgctgatgacacatccattgtctgtccacgatatcatatgcgtacaaattgccatagtaatcacattaactgtcactgggttcattattttccttaaaaaaaaaaaaaaaaaaaaaggaatttgataacatgttttattttgttctttttaaaaagtgcacaacttttaaaaggtgacaaaaacttacaatgcttccttaaaataacagagatttagcagtctgaagaacatgggggattaaataacataaattagtgataatctgatcacttccattttagggctggttttgtaatctggaaatgaacatgtcctccttctccctcagcccgccgcccaatgtaggcagcagctgtgcagggtttttgcatcctaacctactgatgtacatcgcccctaacctgcagggacttccttccagggtgagagggtaattgtggctcatgtccggtcagtcctcagacctcttctgagactgccaaacaagtggctttgcgtgtgtatttttcacagagccggtttataaatgaggaactgagctgaaaccacctgctcgtttcacctcagctaccaaaagcagagggagggcagggacagccattcctttctcagcatggctgatttttagtcagcagcatataattgaagggttcgaattgttttgaatttcagattttcaacaggacccttgagttttgcttaaatgtcttatcttatgcattattgacgtcagattcagttcatttctggattgcccacttctcgttacccatgtactcagaagtcaggacagaacgggcaatcaaaactgcagtttgttattacagatatgtatttatgtataacttttgttcctacattttgatacaggtagctttgataatctgggaaaccattacattcctcccagataaaacctgcctcagagtggcctagcatagtgcttctcaaactacacgcagagacagaccacttcctttatttccttccaatttttttggatcaatacttccacaaaatacagtaaaaataaatgactagaaataaaaaacacttgaaatattaactaattttctattattatcttcaacagacaaaattattctgtgaaattgctgtaagagtttctatgctcttcctctcctttctgtctctcactgtggaccagcacaggcagtcccgaggccagcattctgacttgcactggcctcatagcactctcatttaccaccctacctctgcacctttcagactcatgcagagctccaactttagcagaattcccctgttcttccttatctagagcaaggccagacttggaaggttttgcttcagtactgaacatagagtggaggtaaayagaaaaagccatatttaaaattacaaagcagagttggtggcagtgttggtttaatgaaaataaggtttcaaatgtttgaccctgagcatgtaattaaaagtttattgcagatgatattttctaatcacctcactctacaagagattcaatattaaattatttcttttcttatgaatttggggcaggaatgaagcaattaaagggggtcttcatgttcatgaaatattcagtaggtagagaatctggagagcttagtaaaataataggctgaacacactgccttatttttctttcttttcagttgccctttgaaataaagctgatggtaattttgtcttccaaccctcaacgcgtattgaggacagattagctaaacacactggtctgggaatcaagagacctggttatcatcttgtcactacttactagccagatggccttcascaaatcactttagacttcagttttctcttcttaaaatgggaagactgttacctctctaattccctcacaggcttggttgctaggaagatcaagttaactagtcagtgggctttggagaccagcmaacaagttacacacacacacgtatatatgtgtatgtgtatatattgcatggttctccatttatttaatcatgtatttctcttgaatgctcttgaaatatataccttctaagttcattgttaatccattccattttatggtcctttctcaccctatgcctagtccacccataactttaagcacatggttatttttgyacttcttttgaaaggtaaaagataaacttaaatatacacaatacagtttattattagaaatgttagaggaaaggatcatttaagtataatctacaaggtttcatctcacttgcgcagtgttgtgaagcagaggtatggtactgagctatgctgtctggataagagggagcctggcctctgaaggctcagtgtcaagccccattgctgcctccttgccaaaacacacacaaagacacatgcctgtatgcacatatgtgcacacatatacataccygcacacacacacggacgcacacatatagaaatgtatacatgtgcatgcacacatgcacacttacacaaatgtgcacacacatcccaagtgcttgacactcagttgtctcccaatagccatggccagacctgcacaatttctgcatgacagtactctgtmatgcagatcatgtctgaacgacatactctggctaggctctgcaagtgaagataatgggacttcctttggagaacagtgattgcaaatgagaccacaaggtcattgccctgagagcaaagaagcaggatgtcttaatgctgggacacttggcaaagcctagtcctgaccagcctcttcagtccatgaggagacagctttgaatgatttgactccaaatatgaaattctggaaatagaaaatggaaaagcatttttcaccctagtaaactggaacatgtggctggaagagttacatgtggctcgagaacagtttggaagaattacagaacctcattcattcatacatacattcaaacatttatagagcatctataatgtaccaggtccagtgcctggtactgggtagacagtagcaagaaaaaataatctgagtatctgctctcataaaaaatatggataattataatacaggtgtggaaatgactccaggagacttttccctcttctgctgtctttgaaggtgtactcaatgtgataaagtcagatgaagctgtggaatccaagcctgagtttattctgacctttacgtaattatacctgtgatcctctcagcccactgtgatctagattctgttctctctccacttctctaagacacactgagaaatgtccatgaccattttctgttgctcttagatagatagctgacctaggcatgtcaagggaagcactctcagaccgggctccatctctgtgcaccggggtctgcttcaacagcttggagtctgaatttgtcagtgaatacagattaaccaccctctcataaactgatgtacacatagtctcaaaaaagacatgagtaagtgataatatccatttgttaatttgcagttaggagtgaaccctttcagagacataaatgcttaaatgggctagtcagggwatccccttattgacatggaggtaacattgatgttacgttggtcttccagaggctgcttcatgagaatagaatcagagcaatcgacagtggatagtattgtggctctttggggtaggtacctattgttagcatatgcgtattcatttctgtgatcctttccacttcatctgtgagttttttttctaataatgttttggccacagaggacattcagttgatgctgactgactgcaatcctttgagacaagatttggatatctatactctgcaacttccagaaaaaacatgtttgaggtatgtcagaaaggtggccctttgggtgttcacagtaactgtgtgataagcatcgtctgtactggggaaggtgctctgacctaagaactaggaggcaggaggcttgctctggctctgccccctactgtggcagtcacttaactccactgcagatgggggaggttggactggatgagcagtaagggcctgtccagcctcagtgctcagatgatccatgactgttgagctggtgctagtggtggacttgtgagttcctcaggctacactaaagtggaggtattttttatgccattgtcattgcattgaaaatgttgtttcatgtacctactatgtctcaggcacttggatgcaacaatgagtagaaacaagcctattgcatttacagttgaaaaggactttggaggccatccacattccagctttaaccaccaccccccccccccccagttgccatcgcaaccatacgttcatgttggtgcctgtttatatgtacatatgctggctgtgtgtgccagtgggagctgtgcttttctggcaacctgtattctgtgacagtggacaagagttaagagaggagaaggtaggtagccatttggtttctcctgtcttttattttagagcttttggaagagctgataagtgatcactaagcctgcttaacgtccctaaactgtactacctatttaatggttgaatttctgttgataaataagaaaatttaaacgttttggtaaagtatacaactttgataagtgcccatgtctattgagactttttgaaactttgtagaagctctggatgttgtataatgttgaagtaataccttagccattggtaggactcccctcactgtcattgttaaaccacctcctccccgagccctgggaagcctacctcgggagytgtttcatcccagagcgttatagaacagaattgctcatcaaaccaggaggaggaatggagtggtgaattttgcacagttacacatgtgcagtcccttcgtgccataaatatttggttccatttcttactggaaggcataaaactgattgcttatgtgcatgtttaagccacaaaaatgtcctggcagaaagtgaatgcctggggatgtttgtatccacatcccacagcagagtgaacaggagaagtagttccagctaaaggagaagcataagcctgccttggaaaatgctttctcgtttcacaatctattttatatatattttttgaatagaacaattctcacatatttctttaaccgtggctcaacatatatatactactgaaaatgctggttattccatcaaatttgaaaaagaataatacataagtttttgttgttgatgtttgttttaaccagcattttcttagcaggtccataaaaaagaaattagaaatttttatggcctcatagtttcttggcttcaaagaaggctgtaaataagagtatctctatccaccccttcctccaaaaaaaatacacaacatctgggtttgctcattactttttgkttgtttgtttgtggagacagggtctcactgtatcgcccaagctggagtgcagtggtgcgatcacagctttctgcagcctcaacctcccagggtcaatcgatcctcctacttcatcctcctgagtagctagaaccacaggcatgcatcaccatgccagattaatttttgtaatttttatttttgtagagatgggattttgctatgttgcccgggttggtctctacctttgggctcaagcgatgcacctgccttggcctcccaaagtgctgggatttcaggcgtgagccaccgtgcttggcccccgatcattactttttaaataggatgtttgatcataaacatggggaaatgatggcataaaataattgatttattttaaagactatctagcattggaatattcttttaaaattaggaaaagagtattacatcaagacatatttctccttatttaaaaggagaacacatattttaatatagtaattacatagctgtaatttatttgaagcgttttccaaagagtggaaatgcaattagaaacagaagcaggccgggcgtggtcgctcatgcctgtaatcccagcactttgggaggatgaggcgggtggatcatttgaggttaggagttcgagagcagcctggcccacatggtgaaaccccatctctactaaaaatacaaaaatttgccgggcagtagtggcgcacacctgtaattccagctactcaggaggctgaggcaggagaatcacttggagcctgtgaggtgaaggttgcagtgagctgagattgtgccacttcactccagtctgggtgacagagtgagaccctgtccaaaaaaaaaaactggaatcaaataattgttttggtggtctattagccagttaaaagttgcatataacctataaaaacaatggatatttcaacatggaccaatttcattcataaataacagcacagaagaaggaatgtgttgtgctttgattcgtgattttcatgattttggggataatatttctcatacatgcctgcaagtgtcagtatgtaagataggcacttatggtgcctgccattgaagtaggatctatgtgtgtgaatgtatttgtgaggaaattcagttgttaatatgacccttccctctttaagtaaaccccagaaataaaattgaaattataactcacttatgagtattttctgaatttacataaacatttacttcattattcctttaaacagtgaacttgcataggacattataaacatgattttatagtttgatatttatacagattttaggaattgatctcaaaatgtatgctatgtatttggaaataaataataattttaaaagtaaagaaagacacatctatttcatacagctaatttaaacactaggaaagaaatggaaggatatttaaacttaatggcagacgcctcagaatttatttttaaattaacattttttatttttgttttttatttatttayatttttgagatggggtctcgctccatcacccaggctggagtgcagtggcacaatcataactcattgcagcctccatctcccaggttgagcaatcctcccacctcagtctcctgagtagctgagactacaggtgcacaccagtgtgcttggccaatttttgtattttttttttagagacagggtctccctatgttgtccaggccagttttgaactcctgggctcaagtgatccacccgcctcagcctcccaaagtgctgggatcataggcatgagccactgcacctggccctaaatcaacaatttttatcaccagcacctagaaaaccagaacccaaataacttgcacttcagccagagttggacttctgaaagcttataggggatgtgtgcattttaaagcaaagcattacctccttgtaggcatttctttttccattcagtgtatcttcagcttctagtgttgtacctggcatgtagtctatattaaataaatgtttattgctaaatagataagtgaataaagaaaagaagggaaggagggtgggagggagggaggaaggaaggaaagaaggaagaaaggagaaatggaaaaaacttcaaaagctagttttaaaaggtttttatatattaactgtagtcactatggccaccacccaagtctctaaagctttgctcagagagaagatggagatagaagagtagaagtgggcttctgggcattgctgcaggaccttcacagatgtagtgacccagcctgaatatcaggttttatgtgcagacatctgtattatcagcagtgctctcattgagtccaagaaagtgttttatgctgaaacatatgtgtttagggataaaagcagagggagcaatggttgagggtttatttggtactaaatgtatttgtatgtattatgctatagaataagagaactctacaaacccaggagatggctgggaagagctaccaagtttagttagccactgcctcatactgaagagaatcttgcagacaaccttaggtagattcactgaagtgtgagaaatataatatctagagaaaagacctataagtaacgagcgaggcttttattattacacttttcacactattgaaaggaggtggagctgttttcccagctatatggagtaacacatacttgaaaaatactcggagaaactctgaattatccaaggagtgatttttaaagtaaattttattgtgtatttttgaggtttacataatttttaagagaaaaatttatgtttcttgagcacctgttatatgctacatacttttaggtgttatcacattttgttttgctttgctttgtttggggcattttaaatttttcttaattgagatataattcacacatcataaaatccacacatcataaaatccactatttccaagtgtacaattcatcaggtttttttwagaacattttcattttagaacattttcatcaccccagaaaaaactctgttggcagccactcctcattccttcctcccctcatccctaggttaccactaatttactttctccgtgcatttgcctattctggacatttcgtataaatggaatgatacaatgtgtggtcttttgtaactaacttcttcctttagcataatgttttcaagttgtcacgtgaattaatagctctttcctttttatgactgaataatattccattgtgcagatataccacatcttctttatccattcatcagtttatgtacattttgattccttccacatttggctactatgcctaatgttttttttttttaatttatttttttattgataattcttgggtgtttctcacagagggggatttggcagggtcatgggacaatagtggagggaaggtcagcagataaacaagtgaacaaaggtctctggttttcctaggcagaggaccctgcggccttccgcagtgtttgtgtccctgattacttgagattagggattggtgatgactcttaacgagcatgctgccttcaagcatctgtttaacaaagcacatcttgcaccgcccttaatccatttaaccctgagtggacacagcacatgtttcagagagcacagggttgggggtaaggtcacagatcaacaggatcccaaggcagaggaatttttcttagtgcagaacaaaatgaaaagtctcccatgtctacttctttctacacagacagggcaaccatccgatttctcaatcttttccccacctttcccgcctttctattccacaaagccgccattgtcatcctggcccgttctcaatgagctgttgggcacacctcccagacggggtggtggccgggcagaggggctcctcacttcccagtaggggcggccgggcagaggcgcccctcacctcccggacggggtggctggccgggcaggggggctgaccccccccacctccctcccggacggggcggctggccgggcggggggctgacccccccacctccctcccggacggggcggctggccgggcagaggggctcctcacttcccagtaggggcggccgggcagaggcgcccctcacctcccggacggggcggctggccgggcggggggccgaccccccacctccctcccggacggggcggctggccgggcagaggggctcctcacttcccagtaggggcggcagggcagaggcgcccctcacctcccagacggggcggctggccgggcggagggctgacccccccacctccctcctggacagggcggctggccgggcggggggctgacccccccannnnnnnnnnnnnnnnnnnnnnnnnnnnnnnnnnnnnnnnnnnnnnnnnnnnnnnnnnnnnnnnnnnnnnnnnnnnnnnnnnnnnnnnnnnnnnnnnnnnnnnnnnnnnnnnnnnnnnnnnnnnnnnnnnnnnnnnnnnnnnnnnnnnnnnnnnnnnnnnnnnnnnnnnnnnnnnnnnnnnnnnnnnnnnnnnnnnnnnnnnnnnnnnnnnnnnnnnnnnnnnnnnnnnnnnnnnnnnnnnnnnnnnnnnnnnnnnnnnnnnnnnnnnnnnnnnnnnnnnnnnnnnnnnnnnnnnnnnnnnnnnnnnnnnnnnnnnnnnnnnnnnnnnnnnnnnnnnnnnnnnnnnnnnnnnnnnnnnnnnnnnnnnnnnnnnnnnnnnnnnnnnnnnnnnnnnnnnnnnnnnnnnnnnnnnnnnnnnnnnnnnnnnnnnnnnnnnnnnnnnnnnnnnnnnnnnnnnnnnnnnnnnnnnnnnnnnnnnnnnnnnnnnnnnnnnnnnnnnnnnnnnnnnnnnnnnnnnnnnnnnnnnnnnnnnnnnnnnnnnnnnnnnnnnnnnnnnnnnnnnnnnnnnnnnnnnnnnnnnnnnnnnnnnnnnnnnnnnnnnnnnnnnnnnnnnnnnnnnnnnnnnnnnnnnnnnnnnnnnnnnnnnnnnnnnnnnnnnnnnnnnnnnnnnnnnnnnnnnnnnnnnnnnnnnnnnnnnnnnnnnnnnnnnnnnnnnnnnnnnnnnnnnnnnnnnnnnnnnnnnnnnnnnnnnnnnnnnnnnnnnnnnnnnnnnnnnnnnnnnnnnnnnnnnnnnnnnnnnnnnnnnnnnnnnnnnnnnnnnnnnnnnnnnnnnnnnnnnnnnnnnnnnnnnnnnnnnnnnnnnnnnnnnnnnnnnnnnnnnnnnnnnnnnnnnnnnnnnnnnnnnnnnnnnnnnnnnnnnnnnnnnnnnnnnnnnnnnnnnnnnnnnnnnnnnnnnnnnnnnnnncaggcagaggggctcctcacatcccagacgatgggcggccaggcagagacactcctcacttcccagacggggtggcagccgggcagaggctgcaatctcggcactttgggaggccaaggcaggcggctgctccttgccctcgggccccgcggggcccgtccgctcctccagccgctgcctcccgggcggcgctcgccggcggggcggcaaagactgcctaatgttaatattaacatttgtttgcaagtttttgaatggacatgtaatttttctcttgggtatatacctagtagtgaaattgctgggtcatttggtattattgtgtttaactttttgaggatctggcagactgttttacacaatgcctgctccattttacattcagtgtgtgaaggctctgatttctccatatcctggtgaaaacttgtcattgtctgggttattgataagagccatccttgtggatgtgaagtggtatctcattgtggttttgcattgcctttcccaaatgtctaatgatgtcaagcgccttttcatgtatctattttgtatatcttctttggagaaatgtctaggagtaatttcatttcatatcattgtgcatttctatattatatagaagagaaaaatgaaggcaggcattaattggatctgtcaccaaatatttgttgagcacctgctggcagttgcttggtaaggtgccatttgtaggttcatttgagtgacatcatctttgaactgggaagaaatgttgaaatgctgattgtgaccttatacattttttaaataaatctatttaatatagacttatataaataaattatactttagcattattccgctgcttagcaaatctattaacttatttaattattttaacaaagcgtgatacagggtttatcatatactaggcattctaggtattgtttaagcactttaaaaatatcaattcatttaattctggtaataaccaatagtcgatattgttatcgctctcagtttatagatgaagcagctgaggcaaaaagagatgaaacaacttgctcagcaccacacagctagtgaggcagtatggttcaggaccacctgatttatactaccacactctgctgcccctcttatgctatgtcatcttactcatacatagtatttgggatgaggagtgtgtaaacccaaccatgcattcatttaacaattatttgctgaatgcctacccttacccactttcgtggtcagagcctgtgccctcatggggtttaccttctaatggacgagacagatcataccctgtaagcagaaagaccagttatctgtgaggtgatataaagaaaaggaatgaaggtaagggagagagtgtgatggggtaatgaaaggagtgtgcagacagggagtcaggggaagcttttctaaacaggtgccattcgaacagcaacaggaatgaagtgagccacgagggtatctagaagaacaacattccgggcccaagaacctgcgggtgcaaatgccccaagattacagcgtgactggcaaggtgtaggaacagggaaaaaaaaaagtatttttaaaggctcactagaacatcaatctggagaatacactgtttatttttatttttgtgggtacatagtaggtgtatatatttatagggtacacaggatgctttgatgcagacacgcaatgtttaataagcccatcatggaaaatggggtatccatctcctcaagcatcactttaattatttatcctttgagttacaagcaatccaattacactctttttagttattttaaaatatacaattaagttattactaactatagtatccctattgtgccatcaaacagtaggtcttattcattctttctatttttttgtacccattaaccatcttcccccacaactcccactacccttgcagcctctagtaaccatccctctactctctgtgcccaggagttcaattattctgatttttagatcccacaaataagtaagaatatgtgaagtttgtctttctgtgcctggcttatttcacttaacataatgtcctccagttccatccatgttgttgcaaatgacaggatctcattctttttaatggctagatagtactccattgggtatatgtaccacatattctatattcattcatctattgatgggcactcaggttgcttccaagtcttagctattgtgaaaaatacactgttaatgggggaagcgttagaccagagaaaggctgctgtgatcatgcagcaaagggataatggtgatctggatggagaggaaacactacttggatttggaaaatattttgaaggtagaacaaagtgatttgctgatgttatacgtgggttgtgagagaaagaagtcaaggttcaatcaagktttttggcctgagctactgggtgtagtggactgccatttgttgagttgtagaacactgaaagaagcattcttgatagaaaaatgaagcattcattttggataggtgaagtttaagatgttaatagacctcccagtggagatgatggataggcagcaggattaggagtctggatttcagaggagagggccaggctggagatacgagctgacgtgtctccagtattccgtggtatcaagagctgttgcaactagcctggacagcacgctctagagcaygtgcagagaggagcagatgtttgaaaactgagttctgaggcttttcagtgttcagagatactggaaaggtggggaacacagacagaggaactgagaagcatcagccaatgatgtagaagctaaatgagggagccacacagaaagagtgtttgaagaaaggtcaccaaggaataagcttgtctcaggcctaagtcccaggagactgtcagtggttgaaatgaggaatggaggaaatatctgatcagaaatgggcatttctattcctatgtatcccttgcagtaaaaaaggttagcgccttttggttaggcactttcctactttaaaaaatgcacacttgctcacttttgtctgtaggatgagtcttagctgctcagccttgtgttccacatgcttcacaacctggcttcatcccacctctttccagcttcgtctttcacaatccacgactcccatcccagccaaactgcaccctattactctggcagtgttgagctacttcctcatttctagttatcagtttgcatagctgtgcattcactactgccatcccatctgtctggcctatcatttcctcctctcattttctaatgaacggttgcccatctttaaactcacagctcagatgttaccttccatggaaagctttcccctgccactccaataataaatctactgggtttttctcttaataccttaacaacttgctcagttatgcttctacattggctacaactcagtgcaccatatttatatcctggaccatccatgccaaatgtgtattagctatctattgctgtgtaacaaactgccccccaaatttagcatcttgaaacaacaaacatttattatctcatagtttctgaggtccgagaatctgggaaaggctgagctgggtggttctgactggtttctcgtgaggttgctatcacaatgttggctgggctgcagccatctcaaaactcaatttgggctgaagaatctgcttccaagctcacacacatgattgctagcaggcctctgttccttgctggtcatgggccagagacttgctgctcactgtgcaggcctttttacagggctcttctcaacatagtagcttgcttcatcagagcaagtgatctgagagaaagactccaatactgaaaccacaatttttttataaactaaccttggaagtgacataccatcacttctgccttacaatagttgtcacacaaatccatccttgttcaacatggaagaaaactgcacagkgtgtgaatatcaggaggtgaagctctgtaggggccatctcaggggtcctttggctggctgctgcaaaaggagcacacctgtcttttcaacttcctccccccaccactacttatagtgaatagttggtggaagacacactccgtgacgactggggaattattaactggctgaacaaagaaacaggcccagagaatgggaagtagtgttgacattctgatcctattttccaccaaaaaataatgtgcaaaaggggggagaaagatctaattatcttttcatagataattagaaatgcttttatttctgttttattgtctactcatttgcatccacaaacattttaaaacttgtacttaaggcacagattgaaccaatcacattgctgttctctaaacgtttgaaataatttccagtgagaaaattgaaaattctggtgaggggcaggtggagtggatgttgagcaatgtatgagtaaacaaggaaagtaattttggaaagaagcatttacagatagagtggacctgggtggtatttggtgcagcatacttgaagtgaagatggcatgagctcactgggcccagagtttccatggaaaatggaaatggaaagatgctaaggaaaaccttactttctcacaaatataacataacattgttaaatgttgtttcaaattttaattttaattttaaaagtcagaagaagtgaaagcatataatcatcaggatcagctgaatccttttattgccctctgatgtgcttcattgaaaccatatttctgcctcaagtatctggaatttgtatcactggcagctgtcaccacctttattttctgtgtttaattttcgaagggcccatgcagtggttwttttttgtgaattcttagaagttgtagacacttttattttctaaatgaaacaatgcctcagtgccacaggacacagaaggtctgatttcatgtttttcatctaaatcaagtagaaatttgggactgctgtccttcaggcacagacctggtttgggtagggactgttgcgttttcctccagtgagaggatgagggattggtggagctcatcacctggatgatataggaacatattagtaatatattaggaacatattagaaatatgagagtgttcttgaaaggaaagctcaattggttagatagactaaagtaagcatgtgcaacactggggagaaaaatgaaggtgcgatgaaagaagtttaaaggagaaagtcacaggaggaaaaaaaacaataaaataagacaaagaaagaaaaaatatcacatgatctcacttgtaggtagaatctacaatagtcagactcatacaagcagagtataatggttgttttcagggaatggagggagggggaaatggggagatgttgatcaaagggtacaaagtttcaattatgcaaggtaagttttaaagatataccctgcaacatagggcctgtggttaacagtactgtatcatatatttataattttgccaagaggataagttttatgttaagtgcttttaccagaaaaggaaaaacaacagaaaacaaagcaagcaataaaaggaggcagaaggaaacttttggagatactggataaatttattgcattaattgttwtgatggtttcagaagtagatacttatcttcaaacacaccaagttctatacattaaatatatacagctatttatatgtcaatcatatttcaataaagcagtttaaaagcagtcacaggagggctaggaaaagataggctggttttcctaatgagaataaaatctgctataatggggacaaattcaaggggaaaggtttttctgttccctttcacataaaacttttagaaatagaaatagaagttagaaagcaagaaaaaaatgttggaaaacacataataatttgtttaaaaaatatggaactgtctctgataggatttactgacttgagccttttgcccaatttttttaaacaatcatatttaacttagagcaataaaaaatattttcaaagggaagaaaatgtttttaaaggttatttctatctatctatacagcacaaatcttacaaagaactttccttccctattcttctctatcagcccctgtcactggcatataaagtagtgatgatagaaatgcctgtctattgatttctacaaataagttatatagggaagtctcaaagtagagactgtatttggtcagctctttattctccaagctattgaatgaatgaatgaatgaatgaatatatgaaatgtggaaaaayagtttgattatcaagctagcatgctgtctgaccatcttgatgaagtggaattttaacaaaaagattatgaaagtttcacaggtttatgaatcgccaactctacctttcctgccccctagaaactcaaaacgtacaaggactgtcatatatatgcaatatatatgcaatcaaatatattcttaagcccagttgccattatgctgtcttgcttttcagaatctggcaccacaatttatttgcttatctttctatacacacacacacacacacacacacacacagcattgatgtttaacaaaagcaattccctcaaattccacaagagttccaatttcttgggataagaagggcctgtacagttctcatcccatgtggataggatcccatctgaaacatcagctacctgtgcctacaggcatggttctcactggatattttttacctcaaagcagggttttcctttttattttctacagatagaaggatcatccccagcagcagcagtatgtgaccagcaggcaaggagcacccgtagcagcagtatgttaccaaatactgattgtagactctgttttgctttgctttgaatatcaccacatatatcccacctctttgcttgttcaaaatatcctgggaaatgacagatgagccagcattttatttgtaactagtaagttgattttgttgtcacagtaggaggttttttatcagactaggtgctttcttttctttcaatgatttttctaggattaaagaattgatgctaaataaatccagctagcctagtgatcacaagaaccctatatgcctctctaagtatggatcaatatctggctgttttagggactcccagcaaggcaatcagtagactctcaaccttgtatgcagacagcaggcctgatgaaatgatacccatgtttataacatacccaggatctccttctcaacaagcaggaatttgagcattgactataggctacatgtgtggtaggtttcacccatagtccctatactgagagtgatacagaagacaagttggggtgaaatggacaataaaagcaagatgtacaggtcagagcttaggacagcccgtttaggcagagcgggagaatttaagtataaggcaagagtttgcaactagagaatcaaaccagagtatccagaaagacaggtagaaacagcatttgctggaatcatggcttaaccacgagaaatctgtcttgggttcctttaagccttgggaggaaaccatgaacagcaatgagctgaatctgactcctcagtaataataacaacaatgagaacacctaatgttatcaaacacttattatgtgccagaaagtatgctaactacatgacaatgatctcatttagcagaccagattttatatttaattttaaaacatagatcttaagatacatttctatgtaaaaaaaaaaaaaaaaaaaaaaaaaaaccaaggagtgtggttccttcttatgcattccttccatcacattacctttgggaatattttgatgaatccttaattttctgacatgcagtgattttagattagatttttaatgtgatggcgatagagcttttatggcctgtcctcctcagttgcttgagaatgttctggtaagctgttagtcctgtacttgtatgtaattgtcatttctctggaaattagctaatataatcaccaggaaatcatttttttttttttttttttttttggctcctaaatatgtgccgtttatctcatttctgggcttttcctgtaagaacttttagctcttattagctgttatttaaatgttactagtacctctatgacaacttctattccagcacatcattttggttggctttaaaaggtttagggttttttttccgtaggatttttgattgtctggtaagcacatgagaatgctttgttctgaattttaatggccagttagggtaggaactgccactttttgttttgaatatattttgccacagtgtatattttttccctgtaactcaaaatattgtatgactattaggcttataacaagcttaattcaaattgttcgtgtaaatatattttgtctagtgggcttttctgttaacattcctgagtttttgttttagcatcataatgtgttgccttttacattagaacaaaagcccccaaatgtcggttcatcagctgacaataccagttttgtctcttaattagaaaagagaataaagctgtttaggggtgtcaataaaatgacagatgcatcattagcagacggctatggtggatcagttttgtgcaaatacttggaatggaattaataggaatttctgctagcatatttaaattgaaagcttgggggaagaaagcagtgttttaatgccgtgaactagtcaaagaaaacgggagcaaatgaccatttaatactgaattaagagtgtaagagaaatcaagttgcaatagagaatatattactgagaattttatatattattaatatatcacaaatgagccattatgagtattgtatgattaattcatttaataaatatttattgagggtctactatgtgccaggtggtaaatttaattagagtatacaagtgagtccagacccaatgtcactgtcctgtataattaataggacaaaatttcacttcaaccctaagtatccgaaggggttcttcagaggttttgcattagatggtctcacagtgtataaaacccaggtcatccaatgtgattcagaggttaattccatttagtccatatattctaaatggttggcaaggttgttttagcaagtacaggcaggtgcacatgggtgtgctaacgcgtaagatggtacattgttttatctagtcatcaggaagcactttacacatgagactaaagcactttgtccaattcaataattatattcttagtgcctaaaatagcaccactctggagtaggtaccccataaatatgaatgaatggttgagaaaataattcacataaaactgaagacaagcaataggttaattggacaaatattaagtaagatatgggttgggatactaaaagacctttgttttgtttgaaatctattcatttgtttatttattctgtcgatgcttagaacacttctgctgttccttgcactctgtccggactggggagttaagaaaggaaacacacaggccctgccttcaaggagctctgagtttgtgctgagtgattttgatcctcagagacccccctgggggtgtatggtcctaggatgtagaaaagtgcagaatatcatagacctctaaggactggccttggagctatatacaaaagttggtttttgtgaatctcacaggaaaaatgtatgaacccttagtcaggacctaggtatgtgctattgtgggtatttcaagtgcatcctctaagaaacaaccacgctcccagttcttgctctcaaattccacatttcaaccacgtttgtttcagtgttgtacctgatgtacttgatccccagagtggatttttaatacttcttctatatgacagaatcatttagtkatagttaagtaataattagtaatatgtattttcttaatattttggtttttaaaattaataaagaagaaatttcaatgtatagacattactcaaaatcagtaaaataataataatagcaaaatacttaataagtaatataaaataataaaaaataaaattaataaataataaaataatgcatgaactgaaatgtgtatttaccaaacaaaaatagcacatcttgcagttttcattgttttattatttaaaaattttaaatataaataaaaattccaggggcttataaagaatgaggggattataacacaagttttctttactgttacaatcactgtgctagcatatttatttagaatctactgttgaaatgaaggaccyagtagaaggactaggttaggaggaatgaattacattcaaagtgaatttacaccttttgcacagttaagaacttgtacttgaaatgaatgtaggtaactgagcctaggtatatcaggagggccaagtgtatacctggttctccaaatttaacttccatgaagaacaccatgttcatgtaaagaaacgtaagaaaaatattctaacttaccaccctatgaaactcagtggactgaaagtatcactgttttacagcacatcatttaataattgctattcacggtgataagccccagtcataaaaaaaatctttaaattgtgatcattgtgcaataactttgagtcaagaaaatttgtgataaaatttacaaatattgctattcaggatattttgtgatagttacaactaaacaaagatgagtcatctgaaacgctccattctctgtgatccaaaacaaaggtattgttttatttttttattaagaacactttaggtatatacatgaattttcattggtagcagatgtgcttagagctaggtgcccctgaaagactctcctgtgcactacggkgtattgtaaagatcaacttgcttagtttctgcaagaaagaaaatatcccattctttttgtctttgccttttttcatgtaataaccacaaggtgaaaaaaataagctggagcatcaatgctaccccttattgccatcaagtatttaaagttatcattatttactcattcatgcatttattctttcaacaaatatgtatcaaacttgccatagccaggtaacttgctaggcataaggcaaatcacatccaacaaggtcaagggtatggtggcattgacagacaaggaaatccccctctacagtaaagtgtggtctctgtgccagtgacaaaggtgtgcaccctcaggtttgggaacataggcattctcaaaaatggaaacaccaaagcgacaaaagaataatggcaatgaatcggaagtatctgtctctgtgtgcattatagatatagtcagtactcagctgttaaatccagcaaaaattccattgctttaattaatttctttgtgccgattcttcctagtaagmcttaattttaacaaagttaattaggttgaagattaaaaatcccattagtgtcgatcattcacttcttggctctgtcaacaaggtactaaaaccttgctcagttccagagggccaagtggagggaaggggtgaaaaaaagcagatgagccagctgctgggcatccttcaagaccagatattttatgctgtttttgaagatttaggtggatatcagatataatcattttaaagcatattttttccttttccagtcatcactcatctctcatcctttaaacctgtggctatttattttctgaaaggtctgcggcaatggttacatttgctgagaaactctattccatgtactctgattacctaatttgcaggtttgcagggcatagatttttaatcaaggacctgtttccactgtcaccttgtctgcccgtttattatggttaagaactcaatggtggctaatatcttactcagagcaggaaagaacaaacaattaatagaatcatgaattacctgcaggtcataattctgttcaaaatactggttagtttgagttatgtgttcctccttggctcccacatccaacttacaatgggaagaattacacaaattcaaacatgtattgttaagatttgctcccaggacatggctatagtgttaatgcagcagccacacaaaaagaagggaggaccaagtccagagcaggggagcataagctacaggctgaaacctattatcttgttcacagtggaaagtcgttaatggggaaggaaccaaaaagggttggaggcaatgggaagccatctgaaatcaagttcaaacagggacatggcaaaagcattccaattcctgaacagagctgaaggccaaggggaatttgatcaaggtttaggattagaaaaaaacggagtatacattatgcagaacaggattgtccaagccaatttatctcaaaacaaggtgagggaaaatcacaacaggacacatcccccatgaaatttttctggggtaccagcacccacaaaagatggagaaactccacaagactagagcaaagggggagacaaggtatgtagcttgtgcctttatggtgtgtgtgtatgtctgtgtatgtcatttgctttttttctcccttgcctttgaacatgactactctattcatacttgacatgcacagaactcaactgcacagagtaaatatttttaagccggattaaacatcagttctttcttaccacttgaaaacctgcaatccaagaaatcctggaaaagaacaaaccaaaggggctcactcattgatgattgccctgcctttcacccacatttggtcttaactattaacatacttattacattcacactcagaagtcagcttatctgggccaagaaacataaattgcaagtcagcgttccttgggagtcatgcctgtgtcttgccacaccatctgaagtggttacttggcccaaatctccccttactgataggagtcacagctcttggatgataagggcatctcttaggttcaggtttagaagaatgccaactttttctccacattttttcctctgcccctcataaaaatacacacacatcagataggaagaatcataggtaagaaagatgaaatataggatcttttgtttctcatgaataaacatcaagtctggtaggtttagagtagggtgtgtttttgctttgaaggaggagagggaattaagaaggggaataatagggtcagagagggatatttgttctgctttggactttgtctaccaacagtgtcatgtctatattgctttcaaatgagtcagataaaagcaattgcataccttaaacaccttaatcggtcacctccattcattaatcaagtgagaaacaagagcctccagttccaggttggtgtaatttcagcttagaggaaacactttctgctcattaaggtcttaaactcagcttgtttcttagttacctgaaattaaaatggccagtcttctacaagatcatatcattaatctgttcattatttattcaaaataatttattgagtgcatactatgtaaattactttatgcaagatctatggaaggaacaaaaaaagtaatgagaatgtcagctcttatttcagcttaaatgtcatggcttcagagacaccttccctgaccacccaatctaaatgtagctcaccactcatgtgcaatcatatttatcttgttttatttcctacatagccctatcactcatatattgcttttgactagtgatgttatttaagtgatttttagttttcccctggaaaaatgtaagttccaaaataggagaaccttgcatcttttccaccccttttatcatctgggttttctggagaaacagaaccagtaggagatatatacgtgtgtgtatgtgtgtgaatgtatccatacacacatttattgtattgtatatgtatataatttatgttaagcagttggcctgtgggattgcaggagctgtcaagtccaaaatccatagggcaggctggcagctaggcactctcaggcaagggttgatgctgtagcctcgaatcagattttctatttctcaggaaaaacttggttttgcttttaaggcctttctactgattacatgaggcccaccccttattattgagggctgtctcctttaattaaaagtaactgattatatgttggctatatcattccattgccttggagttctacgcaaaattgtgaatgaagtacttcatccaacaagtttttaaaaagctgggttttttaaaaataatgattacatgagaaatatgaggatttctcttgatgtaaaaagtttagttgacgcagagtagcaagtgaaaagcccttttatcctgtacccttttttctgcccccaccactgccccaagctctattggtagtttgatataaaacctttcatatcctcacttttgcatttattttgtgtatacatggagggggaggcatttacataaattgaatatagttattattctgtaacttactactttcatatcctcatttctgcacttattttatgtatacatgggggggaggcatttacataaattgaatatagttgttattcaataacttaccttttcgcttattacatagaccttacaagctatgatcctgctctccttgtgtctatgacccaggtgggaagacacatcatctacaaggaaataattaagccacagcactgaccaatgtatcattcagagctaaaataagtgatactaacaccagggtttaaaaaamaaagactaggaattcagagcagggaagagccttgtgaaaggaagggatgagcaaagacctacaggagggtcaggcatctacatcaggttgctatttcactgctctttttcattgtgtgacagtaactaaaacccagttgggcggctttctcgttgccctctcagggcctgtaactgtctgtctttggttcagtttgtctctgcaggtgacaatgacaatgagctgttttcttgggagaatgtgctgctgcagtttggttcctgcagaatgagtggcgctcctgcctcctttgagttatggtcctcttggatcttgtgggtcagctcttaattgggtgggggaggtgactcatttaagctattttgtactcagtgttatattttactgactgtaataaatgtcattttattaattagtttggcaatcctttttatctccaggaaaatggcagaagcctatctttttttcattttgtgtacttataaaaattataaaaattttataaaaattatccttcttaaagaagctagaagactttacataattttacctttatatagtattgaaaaatacatgtaaacatgtaagaggaaatgaataggaacattggtgtaaagtgaggtgttctccttgctttggctctactgctggctgtatctgactttcaggtaagggctaggcacatgaaatgggtggaacccaagtgttacagagaggccatgtggtacagggcaacagggcacggcacagacaacagacagtgttctctgagttctgccactagggtgtggcatyaagccaattgtgtccttgcagggacaaattggagttggaatagcccttaagcatttttaagtcctgaaacactgcttacacacaatcttacatttaattctaacttgtgaaacaaaaaggcaaatctggaagccagagtctagagtaaggcttagagtacagtttgcaaaccataaattcaattgaatgaaatgatacctgttctccctttggaattctatgcaaaattgttaatgagataattcatccaacaagtttttacaaagctatgttttctttaaaataatgattacataagaaacctccagagttgctggggaggggtgtgtgtatgtgtgtgtgtgtgtgtgtgtatgtatgtaaaaccttcattccctccctagagagaactcaagaaacccctacagtttgcaaaccataaatttactgaaacgaaatgatgtctgttgctgctttggaattctctgcaaaattgtgaatgaggtaattcatccaacaagttttttaaaagctatgttttctttaaaataattattatataagaaatatgagggtgtctcttgctgtaaaaagtttagttgataaagagtaaaaagtgaaaagcccttttattttgcaccctttttcctgcccctgcccctgccccaagctctattggtagtttggtatgaaaccttttatatcttcatttttgcatttattttgtacatacatggagggggaggcatttacataaattgaatagagttatgtgtaacgtaccttttcactcaacagtatgacttagaaatcattttgtatcagtacgatatacttaattcttcctaagagctgaaaagtgctaatagtgtataacaattcccatttgccccatgccatcaacagccctggaattatcaatctttcagatgtctcctgtcagaagggcaaatttgatatcttcattttttttaacttattttctctgatcgttcattgttcactgtatattggcaaagtaggtttctcattatctgtcatgttgaagataagctaatacctacaaaatggtacccatttttaagtatatctgtttagcagagttaccgttatgctgtctgtctctggtaagaaatttagaccctgtaacctataaagcagttatgggattcgaacatattttcatagactcatacttaatattggccttggatagagaacattttagtaattagaggaaacttgtagttctcctgatgaaatataattttaatttataaatgcaatcattatcattctccccttgatttaaattgacaggtttggcagtttataaagtcttagtgttctctttttaacctttttttttttttttggtcaatatgcttctcagtttaatagagattttttttccttttaaaaaaaaacaaaccaaaacagtatcaagctccttcaaattcttatttcatgtactactatgtcaagtaagttgccagaccaatccattataggaggcatgtatctcctaagtaaatgccagtaaaaggaatagatttagtaagattaataatcattttaatttatagtactcttttcccaaagacagttgggaagctttgcaaacatttgaaccaaaaatgcagtttaaaccactgggaaacagatatataaacctgctaaaaaaaaataaaatatgagcctcatatagtggtccttcatattcagagatgacacattcatattatatagttatcagttcaacaagtttttactgcattttatttgttctccccaaggcttatttttgatagatggtcgctaagatatacagggagcgtcctttcaatagcgtgtgagtgatgaaaagcaaaacaaaacaatttatcaaatcacactgcatacatccctataaatttagagagtgatgaatctgtagacccatagaacgtggcatgtcatgtattcatcaaaggtaaagccccaaacatctcaaacactgctgttgataggaaggctggtattgcttggaaaaaagaaaagaaaaggaattaccctctgaaactattcctacgctgyaagaattctttggaagattaagcagttgtctgtagcatttaagttcagagttgtacagagaatttgataggactatttcaacagaggatgaagccactgcattcctgtttaataaaatgaagtgaatttgcaaaaacactcaagaacgcctactatgtgtatgctatatctagaatttatagctgctaatgaagaaccaaataaaacacttctttagaatgtaaaaagaaaaaaagaagactagacctttgtttctttcccatcctgcttcaaggaagacaatggtttttcccatcacagatattttgcaagtgtggataaaaaacatagtgacctaaattcattmcataatggcaaggtacccaactgatacctaattagaggtgagtctcatcttttgtcatttggtgagcagactaataaattatcacattatgctttaatataaaaagatcagataataatagttattattattatcttccttatctgttttaaggacccaagatttttaaaggtcactattgtcaccaggtcccaaagcatttgtttccagggagcattaggaaattggtggcttgttaggatcctctttagctcttttcagaataggaaagaattaatctccagtgctggcctggccctctgcaccagcatgctccgagtaatggtgcatttctattgcacggggattgatatggtggatgagcmccccgagggaatgtgtcattctgccaaatttcaaattacttaggggaaacttacttcaaaagyccttttgtgattgtttctttcaaatctataattccagaagtacaacttagtacataatttsgacagggtggggtttctttcctccttctattttccccattgggttcttttttctttttgagaataaatagktctgtttaattaaggaaaatgtcttccaaatcaaccagaaatgactctggtgaatagcccctgattatgtgaaagccctggcttctttctataatatcctgatatttccaaggttatttgagtgagaagtatggcagtaagggtatttgagagaaaacactttcctgtagagttgtaaagacattagaaattgaacaaattaacattgtagggtaggtacattttcacatgaaactctcaggttaaataatcacactaccttaacacaactttatttttaaatagccagcagcatttgttgtttgggtgctgtatgtaatttggtaaggaaggtaacgactatagcaaaccaaataatcatgatgttaaataacagtgacaatactgttgaagaggaaaaatccaaaataattgaataccagactatttttcacttcagtgtggtgctctgataaactttactcatttaccttcattaaatcagttataagttagtgtcatttgtcctgcccactgtggcaagctgttttctgccccaggggtcagacacacttgtccaccccacctggacactcttcctagcctgacccctactcatccttaggatccaacccaaatgccaactgctctgagcaattctctctaaactctcctaccaatttgtttgttcttattactctctttcacataaccttatttattcctaaaatataatattctatattttaaaatttttttgttatttcatttatttttcctcagtagactgcaacctctgtaaggaaattttgtctgaatcacttctgtatccataatgccaaggacagtgagtaggacttaactatttgttaaatgcatgagctgagtgactctgactctgtctctaaaacataacatttaaagggttattttgagtaacttttgtacttttgattggttatagaagagatacatctttattattgggggtttgaaaaactcagaaaagcataaacaagaaaaagaaaattaaccatagtgccaatacttagaaacaatcacagttaatttaacattgtggtgtatatcattcaaatatcttttctctcagtgcatgcatttataaagtaaatmattttaaatggagcatttagagagtgtattaacttttcaaagacaatatacttaaagacaagcttttctgtgtttgtgagacctaagttgccagtcgtaaaaagttgccaagagatcttattaaaacttaagcagggcgtggtggctcacgcctgtaatcctgacacttttggaggccaaggcaggaggatcacctgaagtcgggagttcgagaccagccggaccaacatggagaaaccctgtctctactaaaaatacaaaattaaccaggcatggtggcacatgcctgtaatcccagctactcaagaggctgaggcgggagaatctcttgaacccgggaggcagaggttgtggtgagctgagattgcgccattgcactccagcctgggcaacaagagtgaaactccgtctcaaaaaaaaaaaaaaaaaaaaaaaaaaaaaaaaaaccacccaaaaaaaaaaacacttaaaatgctgctctaaaggtgaagcagtttggctaagttaaaacactttgcccaaacttagtttgcctagtttatgtagctcgttaagtgttgacattctcctttctttgaatgcactcctccagcatttctgccttttaagttcctacccttttattacatataaaaggacccctcctccttgaagcctttccaaattacttcattaaaatatcaccactaatctccaaaacaagagagtgctttatactgcatatagccttaggtctcccaactttaatcatcttactttatctcctcccacccctgtacttcttgataatgaactcctaggggagggcaaaaatcataacttttaattggagtactgcatacagaacctgacctggtacctgtaacacagtagggactcaataaatgtctgtggaattaattaataaatattaatgtgcatcccactgacagtaatggactagcatcgttttcacatatgacacatagaaaataattgtataggttgccaaggtccaattcactggccagccatggtctgagtgcttttttttatgatgatgctagtgggactggcagagatagattctaattccatgcataaccaagccaaattgtagttggcttgggttcttttggacaaactaattatgccattgttctgtcagtatttcaactctatattctgtcgcaatgtttctcatgcttcagtacccttaggatagacaagaatttatagataaaggataagtgccacaaagataactcttattaaagaataagcctcagctcacggccctgtcctcatcacaggtcttttccttaggtctttgcactcatcaagagaaagtccatgagacttgggtgaaaggacatctgcttaacagaatcccagttccagggcaatgactttagagatcgtcaagcctgcagactgggaacctgaaccccagcttcactgcaatggctgaactcaaatcccagcttccctactgagtaatgagagacaagtgtcttacctctcctaagtcttggtttctctctctctctctgtaaaagaggataatgataaaaatctgtttcagagggtggctgtagagattaaattagataatcctttcaaagcacttagcacaatgtctgacataaatgagttctataaataatagctattattattaaaattgagccagaagcagtagttttgtgtatatgtatgtgtgtaaatatatatggtgtggcctgaaaaatgctgagctcctgttggctggattattcaaattgcaaatagacaggtcygatctcaaatactgccttccatctcccccagcacacacgtgtgtgtgtgtgcacacccatgcacccttacatcccccaggtgacttcaggcatgggcagtgggtgtgctctgagggacagcagtgagaaacagcagctgctttccttccctggcctgcatggatcctgaacctgcccagctggcatctgtagtttcaaccctgctggagggggcagagcgtgtgtgaccagagagagcagaggcaggaaatttcctctgagactccatttttttcgtctaccacagtgaaaagcacacatatcttgtagcattgtggtaacaacttgtaaccacatagctgaagcactgggcaacttaggggaaaaggccgagtggcaaggaataggcaagagagacgcgtggtgttgccagatgagagtggacagaaatgaaatttttggtccttagagaaagaatgaagagagcagctatctctgcctctttccttgtcctgtctgtcagacatgcctgcatattatttgtagtttggatgcgagattacacagggtaggtgagacagaaagagagaacccaggatttgaagtatcactctgttggaatgacctagcaaaggtttccttgtatttgcaacttttaggaggtagaagggtttaacagctattttatgcatcttttagaaaatgatagttaaatcaaggaggccctgtctatgaatggagaaggaaagtgaatcatggcaaaccatatttcaggagctgtgtcatctgattcagaaatgactgctgttgattcagccccctcatgttacggagtgaagcctccatttatttagtcatttattcatacaaccattttttaaaacatttaagtgtcaagccctgtgctaagagcttggaaaacagagataaatttaagacacatcagtaggcattcagaataattagttgaccaaaatgaatcaatatatgattcctcactgtctattataaataaacattcataattaagtcagatggctatctcctcacaactatttacaaagtaccattgaaaataaagcagttatcttctagcaaggagaggatggagggaggaagatcaaacaaaggttcataagaaaaggcttgttagaactaaacctgaaatgatatgtagaagcttgctaagtaaacaagaaataaargtaaatatggtgtatagggaagagaatctttgtgaaatggcctgtgttccagaattacttgagtataggagtagaacaaagggagaaaaaggaatgagggaatgtgaactcacatagattgtcagaggtcaggctataggaaaggcagagtagcctaagggaaaatgcaggactggggtcaaacatactcggttggaatcccatttctgccaattaataataactttttgactatggaaatttcctctgagaccccagtttttttttgtctaccatagtgaaaagcacatatatcttgtagcgttgtggtaaggacttgtaaccacatagctgaaactctgagcacatagaaagtactcaatttttcactgtgatcattactatttaaatgccttgctaaggaaattttgcttcattttgtttgtttcaacaagacaataggggttttaatcagcaaaatgacatggtttgcattcacactctagttgaatgggaaggatagaacttgcctatgatttgggcaagttgcttaaactctctgagctttaatttgctcatatttaaaatggagacaggaataaaacttaccttatgctattgtgaagggtaaattagatcatggaaagcatttagcactgtgcctaacccaaaagcaatctaccaacacttcttaattatcatgtcgcttatttttatgcattatcattttttatagaggcggtctcttgctgtcacccaggctggagtgcagtggtgtgataaagcacaccgcagcctcgacctcccaggctcaagtaatcctcccttctctgcatctcaggtagctgagactacaagtgcataccactgcacccagcaatttttaaatttttttgtagatatggaggtcttgctatgttgtccaggctgttctcaaactcctggcctctcacgttggttcattatctttataggggtaaagttgaaagcaaagtgactagccagccaggaggccttgttgatctagtagaggaggaagctagggccatgccttgtgagatgggctggagggcacagatattagatatttatgaatgaaaattgacaggcctggaattcattgaatgtgaaagacaatcttgttaatattttttcctccacagtttgccttttcctctattgagtatgctatagttaaatttatttttctaaagcatacatctcatattaaaacctacacttccagagcagtgaggtccacattccgtgaatgtccttattaaatgaaccattgcagttgagagccacagcttaaaggaagaggtgactgtgggttcagcaaaactggaacaagtattagagaccacagttggattttaacaaatcaacagaagtcctgctggagctgtgacttccaatctgtatcagatctgtccccctctactttccacacaaatttaaatatattaaaaggattattaacactattaaacagtttaacagaaatcaacctaagcaatgaaaaccatctggatatatctaggataaacttctatggcttcactgatagaaaaacagttcaaatcatctctgattctcaacaaaaaggaggaaaataaaaactggcttacttgcaaacaaatgacagtaaatcgcaccaaagttcttgagctgacggaagctaactttcaggaagactgagttggccttatatggaagatttggctgtcttcttgcaaacatttataaagtgctgtttaatttttattagaactttcaactcgaagaaacctatgacatttgttctaatccctcaagttcagaaaggccatccccacactactcagactcatgagaatatgtrcaaattacagtgacctcctattcttttcttagcaattcccatcaaaaccttatccttctgtaaaatcctgtatgttgcagtttaaggccaccatgatttgctctcttttaaattgaagagctgcaagttatatacatcttctttcacatttgcaggcttccattaagcttctcttcgattttcagaaaatttcaaagttttttcaatcctcagtgattagttttgtgagtttttcttactatactttccaggttaacctttcttctcatagcagaaccaacaactaaaatgatagtctaaattctagagtattgctcactaaagtgcaattacccactccctcattcctgagtccttctggttagcctactatgatgcctctcagagggcagtggtaggtgctcccaaatgtctcctggtgaggctatcctggtagtcatgcctcatatgttcccctccccttgagtatgggctagacttattggcttgcttctaatgaagaggatacagcagaaataatgggaatttacttccaatattaggttacagaaaagactgtggcttccatcttgggcacttgctcactcttgctctgtaggatcactcacttgaaggaagccagttcttgtgtcatgaggcaactctgtggagagggctatttggtttcaaaggattgagacctgcaacaaaggcctacaacaactcagctctgtcaagccttcaagtgagactgcagcctcaaccaactcttgtgtataatttcattcattgtgtatacttgatttcatacaattcagtgagaccttgaaacagaatcactctaagccatgcctggtatcctgacacacagacgtcatgagataatgaattgttttaagcctattggtttagggctagtttgttacacaataatgataacaaatacaaaaggctaagattatggatcctggaatcataatgtatatatgaaaaccctgcctgcaccatgttttagttaagtagccatgggcaagttatttaacttttgtgaacctcagttttctaatctgtmacaaagcaacagtaatagtgctttcctcataaagacggttatttggagattaattgaaataatgtgtgctaagtgcttgacagactacctggctcataaacaagtactcaatgaatattagttgctttattgttattgttttcagtgttcatcattttttaatattgactttgcctagggttttatactttagtctcttcccattgactctcccttggtatatcccatacactcaaagatgttaattcccacctctgcactgataaccaccaagcctgtacatctcttacaaactcaagatgggtattttttgttgcctattggataactccaccaggctgttttgcccacaggtacctcaactcagaaactcagagtttgttcttagacctttccttccaacccagactggctggagctcctatattctcctatttaacagaagttatgatctaagaactttgctttgagtatgaataaccrtgattatgctaatgttttatatcaaaaattacaagtatacagtgatctttgtacaaggaaacttattataatgttgtgctaaaacttaggaaccatctaagtatgtatcaataggaaatcagataaattatgctcataaataatattaattaacatttatttagtccttgctatgtgacaggcccaattctaagagcattgtatatgttgtatcacttaaatcactgcaagaattctatttatatttattcaggggaatactgcacggcctattttaaaggatgctataggtatagatttactggtatgcaaagacagtcatgaaattttgtacaatgagaaaagcaaattattgaaggatacatataatagcataatattaaaacacttatatgcatagatgtgaatatatatagtaaatagtttttattgtagtcaattactttgcatggtttttaaatgcacaaattctccattaccgtggtttagtaaaataccagttccccaaaaacacagttcaaatttcagttactatagtatattaccgtgaaaaataaaaagcaaactagctgctatagtttgcagatacaaagctattttgctgttagcttttcagccccaaaatcactatgtaaataacagatgcacatcacggtcaacgaccaatcacatcacttcttttcaagtctctcagattagttcctgcacatgtgtgtgattctgttcatgcaggtgtgcagttgtgttgcttccttgtctcctactgataaacctgtgtgtaaaattaggtacttgaaagagggaattgacgaagaaagattaaagtacagcaaaggaacaaaaactgataatgctggaagtcaggtgtgaattttatatagaattctagaagagaccactgaccctgggaatgttggcactgctgctatcctggatgtgcagccagaggagcttagtgaaggcggacaacctaacaacataaatgaggaaagtggttgtaatgaaaaagatgaagacttaccagggaacatgaccacaaaaaataacttcacagtaaaggaactctcagatatttcacattgaaaatgcaaaggataaaatgctagaaactgatccaaacttagaaaagggtgtgatgagtcactaaagcctggaaaaaaatgcacattccatataagagttataagaccaggaaatttataagttataagacaaggaaaaagaggcaagcactgttcaaagtactcttcataagtttttatttaaaaaaactttacttctcagtgtttctaatgttttaaattacagtgtactgaataaatattagttttactatttttttcatttccctgtatargtatagccaacagtaacagagatttcaatgctttgaaaaaaacttttagaggtcacagaacaattataatattcttcattgattattaagataatactatggtccaaatgtttgtgttccccctaaattcgtatyttgaaattcgaatctataaggtaatgatgttaggaggtggggtctttgagaggtgactaggtcatgaaggcagagctctcttgaatgggaatagtgtcctcataaaagagaccccaggaagcttggtcatctctcctgccatgggaggatacaggtagaaggagccacttttgaaccagaaagtaggcccttacacgatgccttgatctgccagtgtcttgatcttgaacttyccagcctccagaactatgagaagtaaatttctgttgtttgtaaatcaccatttttgtatttcattatagcagactgaatggactaagacagatcactttgcagtttcagcttacactgttatttttgtcatcctctactactgtgcaaagcaaggactgcctgtatatactagtaggaaagtctttaggatgtacattaggatgttaatgtttattttgaggcgattggattacaggtgatgttttgtttatctccattctataatgtctctacagtgaatacggatttttaaaacatagtgtagttatttaaccatctcttcctttaacatacattttttaaccctactcctgtttggcaatgtgacaagtgctgggcatttaaggatgaaaaagacatggtttctttaaacaggaggtcatggattcatacaaatgtctgccatgttacatggaatttttaccctgtatgccacatataatagaaatgtgaaagaatgtygggagaacatcaaagagaaagcccgaacacctcctggggrtgttgaagagggcttctggctttttatttttagactccaatattaaagcttttttttcccaagggaaaaatggatcctcattgcctagaacatttattctagaaattactaaaacctagagccctctttctagaaaaacagtttctgttctaggcctcacaaatgaacatagtgaagctactgaggtcgtggaacaatacactgaatgtttaaccataaattattcagatacttgttttatctgcttccttctgtcactaaagcttgatctgagggatctcacactattttgtctttgcttttgtttttcacactgcttttttttttaataaaagccaatcatttgttatcaaaatttttgctagcaatgagcacaaagaaactaaggcaatttagcattccttgggcccaggagtgtgtgactggcagagatgcttcctaggccaccagtctgtgttatcactgtttgggttttgtctgtagttttgagagttttaaaattaaattgtaatgtgtttatggtgacttaaaatctgttgatttccccaatcacatygcaggtgtaacatcacgttattataaaactgacagcatcaaggagggacacttcttaacatcaataaatagaattcagaaatgaaaactgtaccaactgaaaggattgcacaattgggcttctttttcaggtttcttcaatgaattgttttttaaaatggttttatctttgattgtgtgacctcattcagaacaatactttctacctagtactttgggatatggtggtgcataagaaatgtccctggtgtcttggcagctaggccttccctgcagctcggccacaatgcttgttcttcatgggctttctgcaggaggcagcacagcatatacagcttttcccaaaaggcagtggggctttcgtggtcaggagatgattgagggtgtagtagcaatgttgaatcaccttgtgagaaagttacctcacttgcagtttgcttcaaagcttcagtaagtcaaagaccacatctctaccccccatgacatttactaatctttctttttagccaagagaacagactttgggcttggagctttcagcaggctagaatatctagctaaaactcagtagcaatgtttttattttctgttttttgtttgtttgtttgtttttaatttagggtagtgatttatttatttaaaagaaacgagtcttttttaacttttattttttgtttggaactaaacacgtgaaggtttgttacataggtaaactcatgtaacagggacttcttgtacagattatttcatcacccaggtattgagcccagtacccaatagttaccttttctgctcctctccctcctcccaccctccaccctcaagtagaccccagtgtctgttgttcccttctttgtgttcatgaggtctcccacttttagctcccactcataagtgaaaatatgcagtatttggatttctgttccagcgttagtttgctaagggtaatagcctccagctctacccatgtccctgcaaaagacatgatttcattcttttttatggttgcatgctattccatggtatatatgtatcacatttttttatctgtttcattgrtgagcatttaggttgatttcatgtctttgctattgtgaatagtgctgcaatgaacatctgtgtgcatgtgtctttatggtagaaatagtttatattcctctgggtatatacacagtaatggggttgaatggtaattgtgcttttagctctttgagaaattgtcatactgctttccacagtggttgaactaatttacactcccaccaacagtgtaagggttcccttttctccacaacttcagcagcatctcttattttttgaccttttaatattagccattctgactggtgtgagatggtatctcattgcggttttgattttcatttctctaacgatcagtgatattgagctttttttcatacgcttgttggccacatgtatgtcttcttttgcaaagtgtctgttcatgccctttgcccactttttaatagggtcatttatttttcttttgtaagcttgtctgtttcttatagatactggatattagacctttgtcagaggtgtagtttgcaaatactttctcctattctgtaggttgtctgtttactctgttgatagtttcttttgtggtgcagaagctcttaagttttacttagatcctgtttgtcaatttttgcttttgttgtgattgcttttggtatctttgtcataaaacatttgcccattcctatgtccaggatggtattgcctaggttgtcttccagggcttttatagttttgggttttacatttaagcttttaatccgtctggagttgattttatatatggtgtaaaaaaggggtccagcttcaatcttgggcatatggctagccagttacctcaacaccatttattgaggagggaatgttttcctcattgcttgtttttgtcagctttgtcaaagatcagatgactttaggtgtgcggccttatttctagactctctattctgtcccattggtctatgtgcctctttttgtaccagtaccttactgttttggtaactgtagccctgtagcatagtttgaagttgcgttatgtgatgcctccaggtttgctctttttgcctaggattgccttggctatttgggctcttttttggttccatatgaatttaaaaatagttttctctagttctgtgaagaatgtcatttgtagtttgagaagaataacattgaatctatagattgctttggatgatatggtcattttaataaaattgattcttcctattcatgcgcatgggatgtttttccatttgtttgtggcttctctgattcctttgagcagtgttttgtaattctcattgtaaagctctttcacctccctggttagttatattcctaggtattgcattctttttgtggaaattgtgaataggattgtcttcctcatttggctctcaccttggctgttgttggtatacaggaatgctagtgatttttgtacactaattttgtatcctgaaactttgctgaagttgtttatcaactgaaggagcttttgggctgagactataaggttttctagatatagaatcatgttgtctgcaaacagggatagtttgacttcttctctttctacttggatgcactttatttattttccttgtctgattactctggctaggacttccaatactatgttgaataggagtggtgagagagggcatccttgtcttgtgctggttttcaaggggaatggttccagcttttgcctattcagtatgatgttggctgtaggttggtcatagatggctcttattattttgagttgtgtttctacaatatctatttattgagtttttagtttatttagagttttagtttatttagtttacttttaatataagggtgttgaattttatcaaaaggctttacagataatcatggggtttttgtctgtagttctgtttatgtgataaatcacatttattgatttgcttatgttgaaccaaacttgcatcctggggatgaagaccacttggtcatggtatattaactttttgatgtactgctagatttggtttgcaggtattctgttgaggatttttgcatcgatgttcatcaaggatattgacctgaagttttctctttttgttgtgcttctgccaggttttggtatcactatgatgctggcctcacagaatgtgacggggaggagtcccttctcctcgatttttgaaatagtttcagtaggaattgtaccagctcatctttgtacatctggtagaatttggctgtgaatccatcaggtcctgggctttttttggttggtaggctatttactactgattcagtttcagagctcattattggtctgttaaaagaatcaatttcttcctggttcagtcttgagagggtgtatgtgtccaggaatttatccatctcatctaggttttctagtttgtgtgcctagaggtgttcctgatagcttctgatggttatttttatttctgtggggtcagtggtaacattctcttcatcatttctcattgtttttatttgaatcttctgtcttttcttctttattagtctaggtagcagtatatctatcttattaattttttcaagaaaccaactcctggattcattgatcttttgaatggtatttcgtgtctcaattttattcagttcagctctgattttggttatttcttggcttctgctaactttggggttaatttgctcttgcttccctaattctttcagttgtgatgttaggttgctgatttgagatctttgtaacttttggatgtggatatttagtgctgtgaatttctctcttaacaccaccttagctgtgtcccagagattttggtatgttgtatctttgttgtcattagtttcaaagaacttctttatgtctgacttgatttaattatttacccaaaagggagcatgttgttgttttttagttttttgtttttgtttgtttgttttgtttttgagacagagtatctctctgtcgcccaggctggagtgcagtggcacgatctcagttcactgcaagctctgcctcccgggttcacgccattctcctgcctcagcctcccaagtagctgggaatacaggcgcctgccaccacgcccggctaactttttgtatttttaatcgagatggggtttcaccatgttagccaggatggtctctatctcctgacctcgtgatccgcctgcctcggcctcccaaagtgctggaattacaggcgtgagccactgcgcctggccacatgttgtttaatttccatgtaattgcaagattttgagcaatgttcttagtcttgacttctatttttattgtgctgtagtctgagggtgtgtttggtatgatttcagttctttcacatttggtgaggattgttttatgttcaattatgtggtcaattttagagtgtgtgccatgtggtgatgagaagaatgtatattctgttgttttttgggtggagcgttctgtaaaggtctattagatccatttggtccaaagttgagttcaggttctgaataggaatgagccaatttttaaaagagactaataaaatactataaccaggtgtatcgtggatatggcaaaaaaaattgttagtagtctatgaataacgaaagtttggaatcattggtaatttggagagatcataggctaggagtcaagaggcctagatttgcattttgagtatttataattttagaatgtttgtaagccattagatttctttatctcaaaatgttcacctgttaattttcaggtaaaattatatgtgattcacaacaatagctatcattgatagaccctttgttatgagcttgaatgtttctaaagattttatacacactactgaatactcacaaccacccagcaacgtaaacagtattattatctctgctttgcagaaaagggagctgtcttagttcattcaggctaytataacagcataccatagactgggtgacttataagccacaaatttatttctcttagttctggaggctgggaagtccaagatcaaggcagcaccagatttggtgtctggtgagggctgcttcctggttcatagatggtgctttctcactgttttctcatatggcagaagaggtaagggagccctctgaggtctcttttataagagcaataattccattcatgggagctctgccttcatgacctaatcaccttccaaaggcctcacccccaaataccatcacactggagattaagtttcaatgtaggaattttgagaggacaaaaacattcagctcatakcaggagccaagatacagaaaaagatcttattccaagattacacattgagtagatggtgaaaccaggagtcagactcagataatctggctccagacgctacgtccttaaccaccaacattgtctgagaaacatttgcaaaatttattttaaattacagaggctcaatatgttcatccacttctccaacattatctttgagtcacaccattttgttttattgaaagagctgcagactagtatggacctgtgtatcatgcagttctgcagtgtagtcttgggagtgggtctcttaatattctggctaccctgcataatagaagactgagcctcatttctcagctctgtcagagaagagagaaaccatctcagaagaaccaagtggttttggtaacattaagcaacccctaaaacattctccaagtagtatttttccaaagctcatgtgatcagaatacactgtggatgtctcagccttcttcctcatctccgtcttcccccacctcaaacacacttttataggttgttttaatttagaaagtcagcacttgcaagtacattttatacacccaatgaaaactgtaagaggtttcacaggtcatttgcctcgtctgagcccaaccccacagcattctatggagaaggccccagaatactctagaagaaggtgtatttgctgggatgaaaggacaggtgaaggccaacctagaaaattttctgctgctcttaggttatgttattaaattgtaagtttcttagaggtccaagttaaaaaaataaatgtcaaggttattacaatttaaacttttaaaaatctttgccaggcttatattagaaaggattttacctgtggcataaacaattaaatatttctttttttgtttttttgagacagagtcttgctctatcacccaggatggagtgcaacagcacgatctaggctcactgcaacctctgcctcctgggttcaagtgattctcctgcctcagcctcctaagtagctgggactacaggtgcatgccaccatgcccagctaatttttgtatttttggtagagacggggtctcatcattttggccasgctggtctcgaactcctgacctcaggtgatccgcccacctcagcctcccaaagtgctgggattacagacatgagccaccacgcccagccaagaattaagtatttctatatatgactgatctatgactttgtttctaattttttttaggacattaaggcagttcatagtaatctgtatattatttgattcattttattattaggaacagatacacagtctaaataaacttgacccatatagaccaaccaacttatatatttttctgggagtattactagagagaagcttctgtaaacttatgccattgtttgttttgaaattaaactgtaagacagttttattttaaacatatgcacaggcacaggcaacaaaataaaaaaacagacaactatatcaaacttaaaaactttttcacatcaaaggaaacaatcaacagtgaaaaagcaacctacagaatgggagaaaataattgcaaattatatgtctgatgatgtgttaatatctaggatataaaarcttctacaattcaacaaaaacaatatataaataacccaattaaaaatgatcaaagaactttgaatatacatatctccaaagaataaatacaaatgaccaataaacacatggaaagatgctcaacaccactagtaattaggtaaatgcaaatcaaaaccacaaatggatattgcctcacacttgtcaggatggtcactatcaaaacaacagaaaataactagtgttggtgatgatgtggagaaattgaaatccttgcacattactggtgtgaatgccaaatggtccaaccatggtagaaaacagtatggaggatgctgaaaaattaaaaatagtgtttccatgtgattcaacaatcccacttctgtgtctctatccaaaggaattcaaagcaggatcttgaagagacacaggcccacctaatgttcactgcagcattattcacaatagccaagaggtggaggtaacccagatgtccamcagcagatgaatggataaagaaaacatggtacatacatacaaaagaatgttatatagccttaaaacggaagaaaattccrcaatatgtracaacatagatgaaacttgaggattttatattaacaaaaataagccagttacaaaaagacaaatactgtataatttcacacatatgatgtatctacagtagtcagtatgatagaaacagaaggtaaaaaggtagttgccaagggcttgggggaggaaattcaggagtaattgcttgaattgatgaattgattaatttattgattcatgaaggtggttttaaagagctggaggggaaccgattaaaaggtttagtgggcatagagttttggtggtggaagatgaaaaccgttctagagatctgttytacaatagtgggaatatacttaacattactaaactgtacacttaaaatggttgagatgataaatttaatattatttgttaccatgattttttaaaaatgcacagattctggagcatgtgggtaaggatgatgctaattcttataggctatgacaaggtatcattcatattttatttttagacctcaggtcactttggatggtgggcaattgattctagaccgtagattttagattatggagaattatctgactcttccatatcccattcagcagaaattacaatatgcattttatggaattaaatatgagaaaagttgtatagcatcttctacacctcttgcctttaccatacctcactgtgatatgaatattatcatcacaaggaaatacaattattacaaagttgccagttatcagcagaggctagagcaaaacagaatgaattaattattataagtttctactttactgagatacagagatagcagtgagcaaagggccatcaagacatcacttaacaagcactgaaattaaagaatgtgttaatgacatgtgttgagaaaggatgtgagtacatcccacaggactgtgaatgaaccattgtggaaactgcattttcatgtggggatccgagcacaaatatgtgtggccaggacaggtaccatcattaaatagcgttgtatttctctttaacaaccatattcctttggcaagggtatatgaggaccagatatacagggaaaaggggtagatgcatggactagggttaaattcaatggcgaattatgacaaggaataatgaaatacagataattcctagaaaaaaagatcaaaataagaagtgaattacaaggcagagcacataattcataatcaactctatcactacagtcaccacagtgtaccactaactttttatatataccttttcccacctctgtcaacattgagctctttcagggaagatcctcttattcttccatgtgcccttgtcacctattatagtgcttgacacaaattgagtatagagtaattgcttkaattaatgaattgattaatccattgattaatggatctgtcagctaattgtagccataaagctaagagtagccatccttcttttgaaatcattggcatctaaaaggaacttgtgatgattagctttatgtgtcaacttgactgggccatggctacccagattaaatattatttctgggtgtgtctgtaagggtgttcctggatgagcttagcacttgaagcagtggactcagtagagtagactgccctccccactgcgggagggcatcatccggtacattgagggcctgaatagaataaaatgtggagggaggaggaattttcctcttttctctgcctcactgtttcagctgggacattgcatttcatcttctgctgcttctggactggaatttacagcctcagctccccctggttctcaggcctttggactcagactgaattatattgttagttttctgggtctccagcttgccaaaagcagatcatgagacttaccaaccttcataaccacgtgaggcaattcctcataataaataaatatatacagacatattttgcatttcacaaatattgcatcttttatacattgaaggtttgtggcagtcctgaattaagcaaatctatcagcaccatttttttttgcaacaccatgtgctcacttcatatctttgtgtcacattttgataattctcacaatatttcaaactttttcattattattatacctttttcagtgatctgtggtcagtgatctttgatgttactgttgtaattgttgtggggctccaagaattgcacccatataagatagtgagcttaatcggtaaatgttgtatgtattctgactgctccactgaccaaccattcccccatctttttctctctcctcaggcctccccattccctgagacacaacaacattgaagttaggccaattaataaccctacagtggcctttaagtgttcaagtgaaaggaagattcacacttctctcactttaaattaaaagcgagaaatgattaagcttagtgaggaaggcatgttgaaagccaagacagactgaaatctaggcctcttgcaccagttagccaagatgtgaatgcaaaataaaagttcttgaagggaattacaaatgttacttcagtgaacacacgtgtgagaaagtgaagcacccttgttgctgatagagaaaaagttttagccgtctgaataaaagatcaaaccagccacaatattccctaagctagtcaagggcagttcgtgaggtttaaggaaagacaccatctccataacatagaagtacaaggtaaagctgattgagaagctgcagcaagttatccagaagatctaactatgatcattgatgaagatggctacatgaaacaacagaatttccatgtacacaaaacagccctctattggaagaagatgccctctagggctttcatagctagagagaagtcagtgcctggcttcaaagcttcaaaggacagattctcttcttaggggctaatgcagctggtgactttaagttgaagccagtgctcatttaccatctagaaatcctacagcctttaagaatgtggtgttttttggctgcataaatgtcttcttttgagaagtgtctgctcatgtccttcacccactttttgatggggttgtttgtttttttcttgtaaatttgtttgagttcattgtagattctggatattagccctttgtcagatgagtaggttgcgaaaattttctcccattttgtgggttgcctgttcactctgatggtagtttcttttgctgtgcagaagctctttagtttaattagatcccatttgtcaattttgtcttttgttgccattgcttttggtgttttagacatgaagtccttgcccatgcctatgtcctgaatggtaatgcctaggttttcttctagggtttttgtggttttaggtctaacgtttaagtctttaatccatcttgaattaatttttgtataaggtgtaaggaagggatccagtttcagctttctacatatggctggccagttttcccaccaccatttattaaatagggaatcctttccccattgcttttttttcctcaggtttgtcaaagatcagatagttgtagatatgcagcgttatttctgagggctctgttctgttccattgatctatatctctgttttggtaccagtaccatggtgttttggttactgtagccttgtagtatagtttgaagtcaggtagtgtgatgcctccagctttgttcttttggcttaggattggcttggcgatgtgggctcttttttggttccatatgaactttaaagtagttttttgcaattctgtgaagaaagtcattggtagcttgatggggatggcattgaatctataaattaccttgggcagtatggccattttcacgatattgattcttcctacccacgagcatgaaatgttcttccatttgtttgtatcctcttttatttccttgagcactggtttgtagttctccttggccatcagagaaatgcaaatcaaaaccacaatgagataccatctcacaccagttagaatggcaatcattaaaaagtcaggaaacaacaggtgctggagaggatgtggagaaataggaacacttttacactgttggttggactgtaaactagttcaaccattgtggaagtcagtgtggtgattcctcaggaatctagaactagaaataccatttgacccagccatcccattactgggtatatacccaaaggactataaatcatgctgctataaagacacatgcayatgtatgtttattgtggcactattcacaatagcaaagacttggaaccaacccaaatgtccaacaatgatagactggattaagaaaatgtggcacatatacaccatggaatactatgctgccataaaaaatgatgagttcatgtcctttgtagggacatggatgaaattggaaatcatcattctcagtaaactattgcaaggacaaaaaaccaaacaccacatgttctcactcataggtgggaattgaacaaggagaacacatggacacaggaaggataacatcacactctggggactgttgtgggatggggggaggggggagggatagcattaggagatatacctaatgctaaatgacgagttaatgggtgcagcacaccagcatggcacatgtatacatatgtaacaaacctgcacattgtgcacatgtaccctaaaacttaaagtataataataataataaaagaatgtggaaatctactctacatgtgcacgataaatgaaatgatgtagcccagacttcagccatctacagcataggttactgaatattttaagttcattgttgagacctactgctcagagaaaaaagatttatttcaaactattactgcttattgacaacacacctagtcacccaagagctctgatggagacatacaaggagattaatgtttttgtattggctacaatgtctgttctacagcctatggatgaaggagtaattttgactttaaattcttattatttaagaaatacatttcctaagaatatggctgccatagatagtgatgcctccgatggagctgggaaaagttaattggaaaccttctggaaatgattcaccactctagatgccattaagagcatttgtgattcataggaagaggtcaaataccaatattaacaggagttttgaaaaagttgatagccattcttttttttttttttttgagatggagtcccactctgtcgcccaggctggagtgcagtggcgcactctcagctcacttcaacctcagcctcctgggttcaagtgattctcctgcctcagcctctgagtatctgggactacaggtgtgcaccaccacacccggctaatttttgtatttttagtagagacggggtttcaccatattggtcaggctggtcttgaactcctgacctcgtgatccacctgcctcagtctcccaaagtgctgagattacaggcgtgagccaccgcgcctggccgccattcttataggtgactttgagaggttcaatacttccttggagaaagtaactgcagatgtggtgaaaatagcaggagaactagaattaaaagtggagcctgaagatgtgacctaattgctgcaatctcatgataaaacttaaacaggtaggagttgcttgttatggagaaacagaaagagtggtttcttgggatggaatctactcctaatgaggatgctgtgaacattgttgaaattacaaaaaaggatttagggtatttcataattagttgataaagcagcaacagggtttgagcgaattgactccaattttgaaaagttttactgtgggtaaaatactatcaaacagcatcaaaatgctacagagaaatctttcatgaaaggaagagtcaattgatgcgacaaacttcattgttgtcttattttaagaaattgccagtcactccaaccttcagtaatcaccaccctgatcagtcagcagtcatcaacatcgaggcaagaccctcctctagcaaaaagactgtgacttgccaaaggcacagatgatccttagcattctttagcaataaagtatttttaattaagatatgtacatttttatacatagtgctattgcacacttaatggactagagtgtaaacataaattttatatgcactgtaaaaaacgaataattcatgcgactcactttattgcgacatttgctttattgcaacattcacattatgatggtggtctggaactgaacctgcagtatcttcaaggtatgcttgtatatgtgtgtgtgtgtgtgtgtgtatatatatatgtatatatatgtatatatgtgtatatatgtatatatgtatatatgtatatatatgtatatatgtatatatatgtatatatatgtgtatatatatacacacacacacacacatcctattgattcttttattctggagaacactgactaatacaaaactgtatggccatatgagagacagttgcaggatcttctatgactgggaggccaaattaaggtggcagattttcaggaaccaaagtatgtgtattagcataaacagacatatgtccaaatgatttatatgagtgttgataatgaaatgtatatgctctgggacacagcaccccagggctcactactgtcccaagatggatgttgagttggacaatgtcatcagcctgtaagcaccccattcactgcctttcccacctggtgctttacttctgtatatataaatggtcaaaatttgtgccctgaaaagaagtatgttacaacaatttttaaatgttctatagctgaccataatttggatattcaacaaaaggttaaaatcctgttgattcacacagggacagttcattgcagatgcatcatcaccaaaccttaattacattgttcaacaatggtttgttctcttgtcttcctctagtgaggaacctgtgacgaatcctaaaatgttaaaataatggtttccagcccataccaaataaatcatcatctgtgaaggtttgggagcaaaattttaaaaatcttccctggggatcctacagtaaattcggggtcaagtgctgytacattaaaatttgggagaaaaaataaaacaggaagacacacttagggaatagtccaacgaggtggaccctgggtagaaagtgggacaatagattgtgacacattactaggacttcgaatcaatttagtgggttccaaaaaaaaaaaaatttaaaatagaagaggaaatagagtacaatacacatagtaaggtatcattttgtgacttttagttatgtctacatatttatatatctatacatgcatatgtgtattacatcataatgtacatgctagatcaaaagtattggcaaaacattgatctaggataatgagtacatatattaacacatattttgcaatcagtgtgaggtatgcaaagaaccatgtagttcattacctgaaacaaagagctttttgtttagctcttatgagtcatttttggctaggttacactgcagtaacaaataactcagtggcctacaactcaaagaaaattttgctcagtctatatgtttaccatgagccattgtcttccttccagtttccagatttaaggagaatattctgtgtgtgatgtttttttttacttgtggcagtaggaagagaacatagtggaaccatgtgatggctcatacagcttctgttgggaagtggcatatgttgctcctaacagttcatcagccaaagagtcatgtgactaagcttggtacccatgggacatcaattaataatgcttttacccggagaaacagtggctactgtgaacaccactacaatctaccacagtgtatcagatgtttccttaaaaatttacctttaagaactatcaagttatcatattccttgttttcaggactttattgagattttggaaagaattagttttcctgaaccttttcaagtaaatattgctggttctagtctcaaataacttttggtacccttgtctctttgatacaaataaggaaactttcttggtgatattgaatactttaaaaccttctgagactcaatcacatgtcctcatctttcttttcttttgctttagatggcttactttttgtattttacttttatcaaccagactgattcttttaaaagaaaaacaggcattaaactggactaggatttgatgtaagtcaattctagagatattccttggaatctggaggtggagaaaaggtatgaataggatgtaagatttgaaaaccctttagctaccacactctgtctggtatcaagtggctcattttgtttccagagaattaatgttgtttccaaaaattagctctcatatggctcattcaggtaaccagcgttgaatatggaaattagatttttgttcgtacaagtttattgcactatagtttatgaatcacaatggctaagtgccaaactccctttcaagctaagcagcctctttgctatgttattccagctgagtcttttatttgaagtgtttcttcatcttggctcatttagccacaaatagaagttgccctatgggagataacatcttatgcttatttactttataggattatcacctctgggctcatcacaagtgcaaaacatcagaaaagagaaaaacctgatttcagaaagtcagaattcccgtaaccatgacatttacctaattttctttgggtagtgtgtgtcacaatcattggattgtgagttaggagacctggtccctgatattttttgcttatttgatgctgtatgactttgggcaagttattttacatctctgattctgtttccttatttgtaaagcacacagtgagctaggtgaatcttccaaatctcttttagtttcaggaccctgttctatttatggaattttgcagaagtcatatggattgttcagcaaaatcattaaaggagagagttcggcttggaaaatacaaagataaaaatgtttctttatatacagatatggtacaaaaattgccaacaatatctaagcttaaacctaacatttaagttctgtagataggcccttgctttctttacctaatgatagaaatttaaatatactatttgcagtgatatatttcattcagaaacttgtctgataactgaaatatgaaattaatcttagtctcattttttcatgaggtttgttgagatataatttatataccatgaaatgtatccattttaagtgtacaattaggcaaattttagttaactgatagttttgcagccatcaccacaatccggtttagaacacttccatcagcacccaaaatttccttaagcttgttgccatttaatccctgctcctaccctcaaccccaagggaatgctgatctgccttttgcctctatttttatcttttcaaaaaatttcatataaatggaatcaggtgtctggtttctttgtcttagcataatgcttttgggggtttaatcaatgttgttgcatggatcagtgatttgttcttttttcttttattccatttcttttcttttccagttcatttcttttattctataaactaaatattattccattgtgtagatacaccacattttgtttacccattcactaatcaatagacatatgaattatttctaaattttgactattatgattaatactcctatgaacattcacatataagtctttgtatggacatgtgtttttgtttctcttgggtagagataattagaagtggaattgttaggtcacatattttatgtgtgttaaagattataagaaactgctactcttttccaggtaactgtactattttatattcccgccagccctgtatgagagttccagtttctcctcatccttgctaacacctgataatagtcattcttttttttattttagccactgtggtgggtgtatagtagtatctcattttagtttataatttgcatatatctaaagacttgtgatgttgaacatcttttcatgtgcctatgtctatctttttggtgaaatgtttattcaaacctcttgcccattttttaaatcagattgtttgtctccctatagttataaggcttctctatatgttcacccctaagttttaggggactttccctgccatcagcatctatatatttcaatatatatacactacttaattctttcataccaatgctttgaagtaaaatcctgttgcaataactgagtggaatttttaacgttggacaagaaacagaataatttttaaatgttcattgacaataattaagagtattttgaggacttatctgtaagctatcaaaatggtaaatttttttttttacaaatctaacagtagcttctgttttcttagtttgtgtcctatttatagagaaggaaaaaaaacaccttctatagatgtataaaagtctgtgaaaatccagctatttctgaggagagaagaggaagtatctgaggaaccagaaggagagagagacacttgaacccttgtttttaatgcttcctattctactgtgagttaagacatctgccttctaaagggtggtttgtggaaggaattaatgagttactgaccttggcatcactttttctaggtcccaatttaaaatacatatacatgttcatgcacacacacaggcacacacacacacacacatacacaaaagtagcatatttctttgccctaggttctytctgccagttattcctaatcctcccagcccctgaaacaaattagtatcacttacgcgagtgttggagtagttttgggaacaacacagtgaaataataaaatcccttactccaccctggaattgtaactaacaacttgtataactatagaggacatcatctttccttcattcctgacttctaatgccaacctggcctgatatcttctgtctattcttatctccacaaatggaaataaactcaaaaatattctacctacaaatgttactccaaatgacttcagcaacagtctccaaaaaactataaagaaaaattcaaaattggttaatgttaactctttgtaggaaatatactactgtatatttgtataccatgctctatttcaaagtcctcaaagcaaaattaacataaacaaaatctcattcatttaactacaaaagagaggtagctcatcaaaacaagattcccttccagccaccatggaagaaagtccaccagccctgcaaacacacacacagccttattgcaaatatgaatggatgctaaggatctggagctagtgaggaaagtcgccatcatgaaaaagagaaagcataactttaaaaactgaaacaaagagacttggagaaaatagacaattcaaggaacatgaaaaaaaaaatcccaagaaactatgtttaatagtcttagaaaaataagagtagaaattgcatttatgaatcaagaatgacatgcagttttcataaggtataatcggagagtataagagaactttgggaaattagaaatctaaaagtagaaataaaataatctatgaaagggataaagtcaggaaaatctgtcagtaagtggagcaaaagataaagtgatggaaaataggagaggagctatatgaaaattacaggaccatatgtctgaccatattgagaatttagagagcactgaaggaaattgataagaattagtgatgagtacatagaaatgaggcacrtgcaaaaacaaagcaattgaacgctatctaaataatgaaaatggtgtaaacattgaaagtttatttcacaaaacatgtgggagggtacagacaagatggggtagcctaagcaaaggacactgcaagaattaagatgtctaaaatatgtaagaggttatctataatagaatttgacaatttgcaaactataatgatttctgtatataaatatgatgctgtgccttctatgtcccatgttctaatactggtgatgatggatttcctgaagtaatcatacactattcatgcagtgacttaaaatcaccaaagtcaggaactgatctttggaaaagaatgttattttcccagttgtaaagccctgtagctcatgacaacaccaaaacactgcccttctcagcaccgtgtgctgtgtagagatattattagtttttgctatgttaatagtttatccaatattaaaatatgggcatgagttaacatattatgaagcaggtatagcatatggggcctcaggcttttcattatcttcccacttcagtaaactagagtatccttgaaatgtcttttctgtgattgtgataagctgtgcttgattattttggtgttgatctgcagaatttggaactttgtttctccattgacaggggttgataaaacgtcatttgttaacttgactatgcatttatacatcattctcattgatctgtatattgtcattaccaaggctttctgggctagtcctctgtaataatttagtttccacaaaactgtgggttctaattttttattaaacatttcaaaatcaaatgaaagaaattatgagttaatggaattgatatctcttccatggagtccaatcaaatcccatctgtaaagtaaattaacaactgatcatctcagaaattacaaatttagttgcatggttttctattttaattaaggggctgaaataacttcagttatgaatcgacttccccctttcagattgtctaggccgttgaaacatttttgactsgctttctcctaagatccagtgcacttcagagccacttctgttcccctgagtttgtttgcttagagaatacaaagcctagaatgttagagtttctttcagagcaggcaggttattctggtgcctcatctgtgaccagcatatcatatatggcagccctaaaataaaatctaaattaggcaaataaagaaagtggtcaagtgaatgaaaaaatctttaaaattagtactttattgaaaatgttcaggaaaaaagggtcaggagagagccatgattagatttgtattttagatgatcccaggtattggtacagagataatataataaataataacaataatagtaactaacatttttgatgcttactgtgtgagtcattgtgttcagttttttatattcatcaatttattaaattctcacataaggaaaataccatagggtattcattttacaaatgaggaaccggaggcaaatataattaaatggaccaaagttaccaaggtaggagttggcagagcctgggagctgagccacacagtgagactacagcaccctcgttctgggtagtgacattagccaggaggctattgcagtcatgcacatgagaaaggatgagggttagaaccctagaaccctgctaatccagggttaagttaatagagaaaggcacttgagtggtgtggtcattcatcgtttgtggggcctgctcgaaactcaattaagttttaaatgatagttttaaaactctaccttgacattatttccatggtgcaaacctaagcacccctcccagattagaaacaacaacaacaacaaagttctagacttctctggttgaaatcttacatmgatacaaagaagcacttacaaatcactcacttgatcaaggcattagtattaatataattctgctaatagaatcgagtttacaaggcacattctacagacaaagctttatttggatcacaaaattacatagatgaactgacagctaaagattcagctggtatatggcttgaagagttatgctctggagggtgaaaatacatttcatcatattcatgttgattttgctctgaattcacctgagaaattccatggagaaatatgtgactattcagcattacttgcttttacattgccattatwtgtaaagctttgattaaaagtgcttgaacagtgaatatctttgcaggaaaattaaatcaagttttaagtcaaatgctatcctgatagagtcaaaacgtttcagagtaagaggcttctttattcttacagaccgttctagagtggtcactagactaaagataacagacctttctagactggtgcagaagttaccaaagaacagagagctgcattattgatagcctggaagtgacattttatacaggaatttttcatttatttgctgtgaagcagagggtgtgtgaacaccagatgtcaatcacataccaccagtagatttgcaagattataggactggggaaaaaatgaaggttaagcacaggggacaatagagattacttggggtaatgaattgcataatttttctagacagagttggattaatgttcatcctgagaagagattacatcagtctgattcttgcagtaaacaaatattaagcagataactttactcaacaaggggaaaattgacctaattcctaactgtacccgtgagatrctcttgagtttggcaaggaagtagacactgtgtgctgtgtgtcacatgtttcttgcttcgagtagaaccttgaagagaccatcaggaccttcagttgtcaagtccaacagctgcactgcaactgtgaaaagcctttctccctgctgaggttgtcaaaggaaccgattctgcctgcctcatttgcatgtcacctggacactggtgaaagtaatggggtatccttaggttgcactgtgtgtccatactttgtacagttagagcagctaaacctcagtgtctactcttcatttttggagtacagttcaggtaggttctgcttgtcctcatggtgaatttcaggctgattctccacttaattgacttaggaatgttgagcttttttaaaaaaatcaacctttgattcatttgtagactgtactttttgtcatcaactactttttagaaggcagtgccttctgtacatggatttcacttttaacaccaacatagcatttctttcttttttttttttttcttttttgagatggagtcttgctccattgctcaggctggagtgcagtggcgcaatctcggttcactggaacctccatctcccaggttcaagcgattctcctgcctcagtctcctgagtagctgggaatacaggtgtgtgccaccatgcccggcgaattttttttttttatgtatttttcatagaaatggggtttcaccatgttggccaggctggcttcgaattcctgacctcaggtgatctgcccaccttgccttcccaaggtgctgggattgcaggtgtgagccaccacacccagccccaaaatagcatttctttattatttaaaaatatgcacctaaaaggacatatcacttctgtagaattatttctcaaaatgttattattaatacctcaatctaaccatgaaaaatatcagacaacccaacccaaatggagggccattctacaaaataaatgacaactactcttcaaaagcagtatgyttatgtcatgtgcaaatcaaaagatatcaaagatcaaacctttgtaatctcaccacctgagattaatgactactaacatcttaaagtaacatataccagacttttctctttgcattttgcaactactttgtaaaaatcagttgtctatatttgtgtgggtcaatttctaggctctctgttctgttccattaatatgtttgtctattctttcatcaataccacactctcttgtttcttatggttttatattaagtcttaacatcaggtagtataagtctttccactttgttcttctccttcaatattgtcttttgcctttccatataaacttcagaatcagtttgttgatatccataaaacatcttactagaattttgattgggattgcattgaatctgtaaatcaagttgagaactgacttgacaatattgactcttcctatccatgtgcatagaatatctctctatttcagatcttctttgatttttaatcagagttgtatagttttctttatatagattttatacatattttgttggatttatacctaagaataaattttttcactaagttaactttgtatattttgttttgattaatgtaagtagtattgtgtttctaatttcaaataccaattgttcattgcagttatataacaaagcaattgacttttgtatattaatcttgtaccttgcaactttactgtagtacttcattaggtctaaaattttgttgttactgattctttgagattttctatgtagacaaagaatgagtaagcaaaaccacagatgtgcaattgcttacaaaatatgaatagcagggaaaaactaatcctgctgtgtatatcagctactttcaaatactcttatctcagtctgaatgataaaccaccaaggttggtatcaacattctcctttacaggtgaagacactgaggatctacatagatagtgtaccggatttaaaatttccccatgagtcaaatgtgcagaaatgtaaatttatttcttcatatctgaactcaaatttctcttgagccctgatttctggtgatgactgaaaacactgaagacttccagtgacaatagtctggtcacttctggtttaaaacctagtcccttttgtaaaactatttaataaaatttaagactctctccccgccccccttcctttctgtggatggcagttcttttcttttcatcttcctttctttcttctccatttgtatatttttaaatttcattttctatcttactgcattagctaggacttccagaatgatattggatagcagtgatgagagggacattattgccttgtttctgatcttaatgggaaagcacctactttctcaccaataagtatgatgtaagctgtagatttttttgtagatgttacttatgaagtagaggaagttcacctctgtttctattgtgctaggagttttatcatgaatgggtgctggatttttttttacattggttgatcccttaagattttttgtttattttattgtggtaggaacacttaacatgagatctactcttaataaattttgaggtgtacagtacattactgttgactatacatacaatgttgtacagcagcagctctctagagctaattcatcttgcttaactgaaactttatacctgctgattagaaactccccatttcctccctctccccagcccctagtaacaacaatttcactctttgttttatgaaattggctatcgtagatatctcacataagtggaatcatgtagtgtttgttttctgtacttggcttatttcatttaggataatgtcctccgcgtttatctgtgttgcttcatattgcagaatttccttttttaaggctggatagtattgcattgtatgtttataccaaattttccttatccattcatgtgtcagtggacatttaggttggttccacatgttagctattgtgaatagcccttcaagaacactagaatgctaatatttcttccagatcctgatttcattcttttcgataaatatccagaagtggattatataattactagatcatatggtaattctatttttaatttcttgaagaagcttcatactgttcttcatagcagctgcaccattttggagtcccaccaatagtgtacaagggttctcacttctccacatccttagcaacacttgttgtctttgttttttggataatagtcatcctgacaggtatgaggtgctatctcattgtgaatttaatttgcatttccctgatcattagtgacattggcattttttcaatacctgttggctacttacatgtcttctttagagaaatatctgtttaagtccttagcccattttttaattgggttattaggatttttactgttgagttttaggagttccttatttttcaaaacattaaccttttatcaaatatgtggttcacaaatattttcttccattctgtaggttttcttttgactctgtcagttgtttcttttgctatgcagaagtttttccatttgatttagtctygccagtttattttcggttctgttgcccatgcttttggtgtcatatccatgaaatcattaccaagaccaacattaaggagctctttcctcatattttcttctaggagttttacagttttgggtcttgcatttaagtcttttttccattttgagtttatttttgtaggtagtataagataaaggggtactggattttgtcaaacatttttttctttattgatatgagcagatgattttttttctttagcctgttggtgcaatggattacattaattcatttttgaatgttgaaccagccttgcatacctggcgtaaattccacttgctcatggtgtataattattatacattgttggattcaattgataattattttattgagaatttgtgcatctatgtttataagaggtattggtctgcaattttcctttcttgtaatgcttataatgtctttgtctggttttggaattagggtaatgctggcctcatggaatgagttaggacatgctccctctgcttctattttctacaagagattaatgttaatgtttgatggaattcaccaatgagactatctgggcctgaagtttttcccaggtcactgtcctccttagagagtcccagcttaccatgatgcagtctcactattcctctgtcctgccacttcttttcttctttctctttctctttaacgtcccaacccccacattcttgttcacttcttstatagaacaatctcattatctcttaaagcaggtcatgcccagtggaccacatcgaaattatcaaacatccaatgaaactttgcttctaaacaaagatagttcattttctgagaaagctctttgcatagcatatttttgcctgctcatctgaagttactgagttcgtgtttatctgggcatttggcagttttacttaactgatgtgttgaaggatgaagagggccttcagacctgggcaactccttgaaaggtatagataagcagagagagttgacaaaagaaacagttcaggcagagaatgagtaagcaaaaccacagatatgcaattgcttgcaaaatatgaatagcaaggaaaaactaatcctgctgtgtatgtcagctactttcaaatactcttatctcagtctgaatgataaaccaccaaggttagtataaacattctcctttacaggtgaagacactgaggatctacatagatagtgggccagatttaaaatttccccatgagtcagatgtacagaaatgtaactttatttcttcatatctgaactcaaatttctcttgagccctgatttctggtgatgactgaaaacactgaagacttccagtgacaatagtctggccacttctagtttaaaacctagtctcttttgtaaaactatttaataaaatgtaagactctttccccccacttcctttctgttgatctgatgagtcctgttgtgcaaatgttcctattggtcctctttggcttccccagggtgccttctcagatatctttgggtatagccctccacctttgcgttcattgctaaaatgtgcccagttggttgtaaatctcacctcatttcctggcagagcaatacattgtggccttgtgcttccttgtccccaccaggcctctcactggggcttctggtctccctagactcagccacatcttccatctcctcctcctttgggatctcccatccacagccttgtattgagatactcctcttcccgatatcctgacaaacatgcaattcttgattatcaagagttgttagaacatttctaagtttccttgtgctaacatcagagcccaagaagtgtgcggggataaagagtgtttcaagaattcagttccaagaggtactatgaagcaaattacattttccattgaggttgctgccaaagtaagtcaaagaacggtaaaacacagcagcttccaaagtgccttgctcaaaaaaaaaaagtcgttcaaacattcagaattatcatcagatactgtaatgtatatcagttgtgtagtttctgaaattttaaccacatacacaaaaagaaaatcttcattaattcaggaaaataaaaaaataaaactaaggcactgttacatatattcggtcacctaatacaaatatattacatctttaagcacttttaataaatacgtaattttattttttctagttagtgtgcatgtataaaggttgctcaccacctacttaggaggttattgcaataacctgaacgcctagcctagaatgattacaggaaaagtggaaaagaagaaattactctgataagtatagattgctgtaagaagcgctggactttttttttttttttttttttgagatggattctcacactgtcacccgagctggagtgcaatggcacagtctcagctcactgcaacctctgcttcacaggttcaagcgattctcctgcctcagcctcccgagtagctgggattacaggtgcccaccaccatgcctggctaattatttgtatttttagttgagacggggtttcactatgttggccaggctggtctcgaactcttgacgtcatgatccgcccacctcagcctcccaaagtgctgggattacaggcgtgagccactgtgcccggcagcgatgggctttaaatgttgaggggaaaaaatgtgcaataggtcactagtcaagtttttaacatgtttatttaactacaggtatagcatgaagatgaacttcaaatattatgggaaattaaatattctgtgttggtctactcttttaaatttcagagtacctcttcttaactaaagagaaatgtcttaaacctctttacactttacatccattttatgtatttagattcttctccagtatttcattttatttatttcattttgttttattttatattttattttattttattttatttgagacagagtcttgctctgttgcctagactagaatgcagtggtgcgatcttggctcactgcaacctctgcctcctgggtttaagtgattcttgtacctcagcctcttgagtagctgggattacaggcaagctttaccctgcccagctaaattttttgcagttttagtagagaaaggttttgactgtgttgatcaggctggtctccaactcctagcctcaagtgacctgccctcagcctcccaaagtgttgggattacaggcatgaaccaccactccccgtctccaaaatttgtttccagataactttggactgtagatgacattttgcacacactttaagatgtgccctacaacttgtatgaaagaaactgtaagcactgatgcaatggtacttgcatagaacttgggtttagttatcaagagcctgtataagctcaaatttgtgtgatgtcttagatgtgttcttatagttttttaaacggtaatgagaagatttgaggaaatgtatattgtttgagattatgagggagtagggaacatagtatttgttagctccccatcattgcttttggacctatttcatttaagttttgaaacttgatcaaccccaacaagcatcctatatccctactcagccatgggcagtgtgtatttcattttcaaagtcacagagcatgagagagacaaatagcagtatttgcactgtgctgtgtgtcatcaggcctttctcgatcattatggtgatgtctttcctccctaaataatttttacaaatatactgatgaagacagatttctgttatctatcttcaatgggtcataagttgaacaagcactatattttttcctgaaaatatgcacagttgtgacatggtgtttaatagtcttaagcttactgctgccaaaataaacacagctgtaagaaatgatgaccctctcatctttgtaacaataaaatagcttcctaatgtgcttccctaactctgaatgttaagttaatatcccctggatttctgagccctatcctttcccctggcggaaaccccatgaagaatacagcttttgaccaaataacagagcatagaggatgaaattagttgctttaaattagaatatgacaaaaagcttttctaaatctttgtcaaaatgcaacattcaagcaacattaaaccaaacagagtataagtagaccaaggaagagagttaatattttgaaaagaaatttggtgaactagatcacttgcaaatttgaaagggtcattgatagcatgtgagctgtggcagtttgtaacttggggatcctactctacagttacatgcgtggtctcctcttgttcaatctttggatatggaattaactgtattaatggtttttttggttttcttatatttctcataaaagcaagtctccattgctaaagcctgcattcaagaaaataatgggagaaagtataatgagtaagattcccatctctatgcagtgtttcttgttttcctatttctaagtatgtgcatttaaacaacagtatacattttgtaaattagcattaagataaattgtcttctaaaaagagaaagcaaaatctttcctttatttctatcataacttggatttattttgacattctttcccctgaaagatctgagttttattttcaaagtgaaattctaccatgttggattgtgggaaaataaaagcctctgatatggttaatctagctacataaaagtccatgctgggtatgatcataatcttgatctttgattaaatctgagctagtaatatcttgtgattaatcaaaatgagttgcactgcatgtagcacaagtcgtcttcacagatgggctttcagaatcagagttcttttaaatatctgttttaatcctttctaggataaaatggctttgttttctgtttttgtttctttttaccttttttactttaaatcagattgagttcaccaaataaataactaggaagacattttgaagtataatcttgctaagattacaaatcaacaaagaaaaaacttgttttttaactgatagtattccaaaggattttttgtatgttaaaaaatgcaaattattagtaaaatttaacaaatcgtctcaatcattggtagcttgaataaaaaactttatgaaagactaaatcaaaataatacctcaaatacataatatggagatttttatagttctcaatttaagattattatttctcttctgattatgtatttccagtctaattgacatctgataacaaagagctttactctggcagctaaactttccaacttctaaaacccagggcacagcaagagccctcaggttcacacacacaatgtctgtcagctctggcagtgagctgctttggtggttttttttccctaggtccacaggttaactgactaatgtttctaaaggggccagagagcagctgtgggactccaagtcttgcatcctggtacacagcttgtccttacatagtttcatgactttaaggaaacttgttgatctcttaggccttgagaactcttacctataaaaatgagaaattgcatgaaagtctccaaggtgccatctagttctaaactcggtgataaatcaattcagtgaaaaatttcacaacaaatacttgaatatgacttgcatatcctaaagaacacatctccatttactatgttaagtagacttaagtggcttaaaaaacttcaaatcccataatgcatcatccctctatacctttattatataagaatataatcgaaggttttttaagatttaaaaaaaaaagaaagaaagaaaccctcatagcctttatttgtggaaagacctaaatgcctatacatgagttggaatttaaaatgaggtggggttagtttgactgagtctacacatataaaaacactgtgctgtatagaaaacaaaataatcagtaattgacattgtttaggtgatttctgacaagcagtttgactagaactcagatttggcctgttccactgcacatcaccaagcacatagcagataacataaatattagtcaaaactaagtttaggtctcattgatgaaactgatcaagcagcatttataacatgayttgtgaaagaccaataaaatcaggcagctgatcatttgttttttatcgatattataactaacaatttcatagagtaaattatatcaaacagttgatttagtttcccggagatctccttagtcacaggtacctacctatgatgacgggaaacagaataggaaataaataaaacagattgtaacttaactatcaggcagtcatccaggccttgcaagacacaattccttcaaaaaattgctcaccaggatgcaaaggcgtacgaatgatataataggctgggcgcggtggctcacgcctgtaatgccagcacttcgggaggccgagttgggcagatcaagaggtcaggagatcaaggccatcctggctaacacggtgaaaccccctctctactaaaaatacaaaaaattagccgggtgtggtggcaggcgcctgtagtcccagctacttgggaggctgaggcgggagaatggcgtgaacccgggaggcgcagcttgcagtgagccgagatcgcaccagtgcactccagcctgggtgacagagcgagactccgtctcaaaaaaaaaaaaaaaaaaaaaaaaaagaatgatataatggactttggggactcagtgggggtacccagggggaagggtgggatgggatgagggataaaagactacatattgggtacagttacattgctcgggtgatgggtaaaccaaaatctcagaaatcacaactaaagaacttatccatgtaacgaaaaaccacctgatccccaaaaactgttgaaataaagttgctcaccagaagttatgcatttatccatacatactggagaagctcagtaaactcatgtctatgattatataagaatcactgagtaagagaatagaaagaagcagtgcaatccatgcagtcaccttctagattcagtaaataaaccacctgtattcgaataagaatgatttgatttttcttttgttcttttatctttttttttttccttgtaggagacccggtgagcctccattgataaaaggttggcttccttatcttggagtggtcctgaacttacgaaaagaccccttaaggttcatgaaaacacttcaaaagcaacatggtgacactttcacagttcttcttggtggtaagaagcacttctattaataccttatatatgtcatcatttttcacttgttctttaatgtctttctgtttttctctaggcaaaatgtagaatatttgtatatttttattttattttgtagagctaatgtgaaagaaaactattatttttagttcagtgatcctcacattaaaaatcaaattatagaactctcttcatggtacttagggaacccttctttccagccatcacctgtcattttggtttggtttagtttggttttaagaatggtagaaaaaaawatatatatatataactatacaaaagctagaatgtattttttaaattaatgctctttatttgtagaggagttttaggtttacagaaaatttagtagttcagagagttcccatataccccctccccccaatcacagtttccctgattgtatctatgtagtatatttgttacaactgatgaaccaatattgatcaatcattaaaaatccatgatttacattacagtgtactctttgtattgtgtagttcgttgggttttcacaaatgtataatgacatgtatccaccatcacagtatcatatggagtagctgtactcttctaaaaatttcctgtgctccacctattcattcttcttcccctgcctctgagtctccagcaaccactggtcaagaatgtatttttcattttaaaactttcattgcacttcagactttaataaagtaccaaaacaccaagaaaaatgaagaaaaaaacagcagaattgctacacaccccaaacattctaggactgggaggagaagctagactgttactagttcacaacattttttaagacccaaactatgtagctgtatcagctattgattgctgagtaacaaatccccaaaaagtttaatggtttaaaataacaactggtctggcctgagtcacttgtgtggcttttctggactctggatgggaactrgatgatccgagatggtctcatcacatacctgggtgggctgcctttccacacggtctttcatcctcaagaaaagtttcttacatggcagttagtgtctcaagggagtgagrgaaaaagcttcaaggtctcttgaggcctaggctcagatattgcaaaaccttacttccaccacatcctattagttagaccaagtcacagtgcagtccagaatcaagggcagggaaagagactccacctcttcctggaaggagtagcagagtcacattgcatgggggcacatgtagagagatggaaggaatacatcatagctatctttgtatacaatcttcaacatcagtttatggcctgggctagctattccctctctttgcttttgcatgtcctgtctgtgctctgtaagctgatctctacacactagattacccacactcctttgcttgttgagtgttgccagtggcaggaaaagaagaggctgagtctcactccccactctcactggggctctggtaacacagttcactctccttccttcacaaggtaactgaagatccagtataatctcccttagatccccatgtatctaccaaatgtacctacttttctcaatgatttaccatgttttctccaatttcaaagaatgttcaagacactccatctccctgtccccatgaccctttcttcttgccgcctctggactggtacatctagattcattcctctcacacatgcatcttcatttttttctttcttgggctcttaccatcacttataaccatgcttaaggttcccctctagttactttccacttttcttcttttcttttgcattcagctctttcaagagagttgcatatatttgctatctctagttgcatatctcccagagccctcctaactataaccagacttcagccttgctgaagttattccctggtccacctacctagacctctctacctggtttgacaatgctgatctcttgttccttcctgaaatactctgctactcctttactctctatactcccccttctagttctttatctaaatcatctacatgcatgcctttttcttagctcaacccttacatcttccttcaaccagccttggaagtttatgttctattcttagagagccagtaatttttttctgcctgtaactactttgctgagggtcagaggcaacctttggaaactacagtgacttaatttcaatgctttattatgcaaataatgcattttatgcagtattatgcaaataatgcattttatgcagtattatgcaaataatgcattttatgcattattattcaaataatgtattttaatgcagtatttgggagaaatgatccaactggaggaaattatcagcatgattgagttctcccatggacagacagtatcagtttcatcacaacttactcctttgcctggaagctggccagtctgaggcgggtggatcacgaggtaggaattcgagaccatcctggccagcatggtgaaacctcatctctactaaaaaaaaaaaaaatacaaaaattagctgggcatggtggcatgtgcctgtagtcccagctacttgggaggctgaggccagagaatcgcttgaacccgggaggtggaggttgcagtgagccgagatcgtaccactgcactccagcctgttgacagaacgagactccatctaaaaaaaaaaaaaaaaaaaaattgtatgcattctgatttcagaaaaattgaaatggaaaaaaatcatgcatcttagaggaattatattatatacagtagtcctcatgaggctccccaagatcaggtctccaccagcctttccagctcagtctcttgctgctgctcgccttgtgcttcacacaccatgaatgcaccatgttgtttgaaatttcctcctcacacgccatacctggtggggcctctgggttttctttatcttgctgttctttctgccagaatgttattgtttacctgactgacatggactcaacttttgaggccagagtcacacattgcttcctctcaagagcctttgctgactcctcctatatttggtgcctcttctccagggtcgagttactcccagtatcacttctgtaggagcatttaatacattgtgaagttattaccaactgacttatctgtctcccttcattattctgttagcttctctattgtcaacatttagtctagagctcagaactgattctcaacgaatattggatggggaagcccctaatttcttagagctgatgaaacactggaatactgtacagataaaagcctgagctggtgcttctcctctaagtgagccttgggctttatggtaccraaactatattgttcacttaaaaagagtcattcttactttaaataattaacactggtgtttctaatgaatagatagaacaagtgattgaaatgttcagtttttctttttttaataccaatgtacaaaaataacctaagatgattatgcagaaagttgtggcagatttgaatcactttattcacttttcaaaaaaatagccaatttctgctgatgcttgatttcttaatcttaggtaccaagaagcttgctgaatttctaacatctgaataatttgaccatggttatgtttgaactcaacagtagacaaccagttaaatgtgcacgatacctcccttttgcttcttactagaatttgaataaattcctgtcaagaaatcctgttaatgtatatggttctagtgatcagtttgcaaagtagctcatttagaaaatgtgaaatgaagaacaaagtcttccgctcttgtctcataatgtgatttcactgagtatatgttcttgcatgatgagcaaatgattgtcatccccaaaagtctcaagggacacggatgtcatcttaataaagaaattaaaaagtacatcttttcatgagaaaccatgtaaattcttgacctgtcgcagaaaatagttctctaattggttttgtgtggtggtgcagtggaatcgttttccctagatgtcaccccagcaaagcaccactgtacatcattgtcagcagctagtgaaatcttcctaataagcggggggatatgtacatgtggccatcctcataaagtacaaagttgactcatatttcactcttccaaccgatattttcagcttgagattaaaaacttctattgtaaaacaacctaaacacagagatgaaaagcttctaattatgaaaattgttaaaattcaaatttgtctcttctttttttagagataggttctccttttgtcacccaggctggagtgcagtagcataatcataattcactgcaaccttaaattcctgagttcaagtgatcatcccaccttggcttcctgagtagctgggaccacaggtgtgtgccaccacacctggctaattttttttaaggttttttgcagaggtggggtctccctatgttgcccaggttggtcttgaactcctggcctcaaatgatcctctggccttggttatattttttttacaggacatttctatgccaagcagccaattctcatggatatatgtatatatatctatatctttgtatagcaccaaatatataaaatgaaaacaccaaaattcaatttataatgacccagatgtcaaaactttttgtttgacattagggtgaatgactgaatttttaaaatacatttaccaacatactttgaattatgtagctttaccttcctaaagaattaattttaacggaagtggaaaggctactgaggtggtaaagtctcttatgcagcttatacaggaatgctacagttaatattgtaaggccagttagctcctaaaaagggaagagaatgaaatgattggcaaggaagatatcaaaaatttggagctgacttcaaatttactgcatctaagaatgatttatattgtatttttcttgcagatatcagccccactttgacatttatattttagacaaatgcagactttgaaattctttaaatcaatatttcatatcaactgctgacagcattctcttctctttggaaaacatggcaaagggtattgtttttaccttgtgatctttgtaaactaggtaacatgcctgctgacactggccattcatttacataaaatcaccctggagcaaaagttaatgttgctgcaagaatacacggccttcagaataccttttcagaagatttcctttgttaagaaatttaaattcattttatgaatgtatatgagttttcctaactgtctgattaaagatcacaaagaaactctggttttgcatctcacattagcagatggtggacagatggtttaaattaatattaattttggaaaacttagcttaaattgtttatactgaagattaaaagttggaaagccagctaacatctccagggttattagtacttccaaacccacatgaaaagtaaaatccggaaaatcaaaacatcttcttctgaaccaattcacatctcaataaaaaagatagtaggtaaaacacaatgccttgatattgaaggacactgaaataagaatgagaaagagaaaatacagatcctagactgaaaagagccttgaaaggagtgagattagatctacaaacaaatgaagttaacagtactgatttttataaagaactgatatacaaacaactgcttatatttttaaaaacaatttattagtaattggttgctaacttgaaccattttgtccacattcaacttttattccttttatttgaaattaacctcattgttttttcccatacccttattcccaagaggatggggataggagagaggaggaaatagagagacagagggagagagggagagagagagagagaaagagagagagagagagagagagagagaaaatgaatgtgtgtatttgtaatgattgtagacaaaacaaaaattgtaacatgtgtacagcctctacttcagtaggcccaataacaggtagctcatgctgtcatgtctgaatatattttctgtttccatttagatttagatgaatatagaaaattgtaggaaaaaattcaaaatattctctaaatattgtgtgttttactaactgaatcttttatacactctggtaatattagggaataatttaaaataaccccaaagatatttagcaaaatccttttatttagtgaaaggagaaaagtatgaatcaccacctgtgaaaatacacaactttgcctaaaattatatcttttgcaaaataagaaaattgatttttttcaattatttgacaggcagatgctggcaattttatttaattaagctgtgatggtaaagcaggtgtcataaaatatgcctaaattgggttgaatcctttttgctctccccagagcacatacacacacacaaatttagtttaccttgtagaagacagctttgggatctgaccagaatgaatagccacttctagctttactggcatcctagatccactcacattattgaattaatcaaggggaaaatgagtgaataaaatttaagtcatctgagtcatttttagaaaataaatcatagcacatgtatattcatgtatattaaaaacttgtgtttcaaaattgtgaaacaaaaacatatttatctgtttctaggatgaggttgaaaattatttcaaaactttatttgaaatatcttgcaccaaattgaattaaatttctatgatgccgtttgagttaccataaataacaagtgagaagttgttccgctaacagagcaacacacacacacacagacacacagacacaaacaggaataatgacatgaagacaataaataagtagatgttaacgtttttaggatcatctaaagtttatgcctgttctgtacaggaaagacattaaatgtcattatttattactatctgcttaatatttctaattagaaggaatcttaaaacagcactctagtgagaagacaaagaatagtgcatggtgagtaacttctcatcaagggtctaccactgaaaatggcagcatgatcttgacccgtaacatctcttgactttcttcagctttatcaactgataaatgcagatggtaaacaagcaattctccaaggtctctgccaattttgagagacagactatagtagactgtgtccttcaaggtgcatccttataagaatcacttgaggacctcatcgaaaaggacactggtaggaccccctccaagccttctgaatcaaaatcttgcaggaatctgtatttttcgcaagcatcccaagtttttaaattgataagtttgggcaacactgatatgttgaaaaggtaaatgtcatcacctcaaagagaccttggtgataactccaggctgactgaagcagactctactttctgctttccttatgctgtgtttcacccctgccgtatcacaatccatagggatgcaatgatttctatacataattgtatctcaaaaagaaagggatccaaccaagtttccagatcttaataaatgtggtgaatggtgaatgacttcctgaaggaatggatgaatggatgtgttctagtttggaatcctgtgtcagtcacaagtcaatatgtgaccttgaacatgttattaaatctcccacatccataaaagtgaaaatgctggcattagtggatttttgccagtgttgaattagacatttatttgtgagtacctgctccatacagtatggtcatttatttgagttaaaattgttgtatttgaacaaaactcagatgacacctaagcatgaaaaagctctttatgaagtataaatactcagaaatggaatggcatgttgccaatttgttttctgctttattgagggaaatatatgagaagtatttaagtcaggggattatgagaatatttaaaggatatttaaagtgttcaggtactttagttaaaataaaaattggaagagtaaaccatctttgcaaaggttagtaagaacttcaggatatttaacttcacgtttctagagtgttttccaccatctttcaaaggaaacatgtagtgtaccttcgaatgaaatggatttgtattaaactttttgccttagttattagggtctttctaattttgattaacatattttttaatttgtggtgtttatttctgttttattaacaaacgaactcatattttctctctctttttttttttctaggaaagtacataacatttatcctggaccccttccagtaccagctagtgataaaaaatcataaacaattaagctttcgagtattttctaataaattattagagaaagcatttagcatcagtcagttgcaaaaaaatcatgacatgaatgatgagcttcacctctgctatcaatttttgcaaggcaaatctttggacatactcttggaaagcatgatgcagaatctaaaacaagtttttgaaccccagctgttaaaaaccacaagttgggacacggcagaactgtatccattctgcagctcaataatatttgagatcacatttacaactatatatggaaaagttattgtttgtgacaacaacaaatttattagtgagctaagagatgattttttaaaatttgatgacaagtttgcatatttagtatccaacatacccattgagcttctaggaaatgtcaagtctattagagagaaaattataaaatgcttctcatcagaaaagttagccaagatgcaaggatggtcagaagtttttcaaagcaggcaagatgtcctggagaaatattatgtgcacgaggaccttgaaataggaggtaagaacttctgaatgagcacttgcctaaaataaaatcatttacaatagacctctgaaataaaaagacaaaatggcgaccttgaaaattttttatgctctttctaattggctaatgataaaatgttttactctgatataaccctctataattgatwttttttttttttttgctgaggtggtaaaacaagatacttaatggtgataatgagaaagagtataactaagctgcatttactcctcttatctcatcccccaccacaccgccccccccatacacattacattttaaactattctcattaagcagaaaattagacttcagaagcctattggttctcattagcatgcactgatccttggctgggtctgtgtcctaacatcttttaattagcacactgcaaatctaatcagtgtaataaacgctattaatcttccttttcacttattttctcccagcacatcatttaggctttctctgggcctctgtggcaaacactattccaactatgttctgggcaatgtattatcttctgcggcacccagaagctatggcagcagtgcgtgacgaaattgaccrtttgctgcagtcaacaggtcaaaagaaagggtctggatttcccatccacctcaccagagamcaattggacagcctaatctgcctaggtaatttatttttatctgttatgaagaaaagaaggtacctctctgcaaactcggtttatcactcatagctgtttaccaagaggtagaggacacagctgcctaattgacataataacacccatttacatcaattataaattatgtagtttatagccgtagatactctcattgcatgtaaacattaaggcctaggtaattaactgtgcaaggtatgcaaaaggctaaaccaaagctttacaattatttgaaaaaaagtttatgcctattaaatcatttgattctgagcatctgttgatgtgctaatgctttccaacactgctgcaccatcttgtcaagaagtatttagggattgaaaaggaaagtattgcaaaaaaggcaccctgtgtgcaaattgtatttcttccctaaaatgatgtctatattttcaaacacaggttagacgttttatggagtgtgtgattctcaaaaacacagaaaacagttttccattggaagttcgtgatttaaacccacaaaaaaggaaaagagggaaaaaatagaaaagaagaaacggaggagggacagagggaaggaaggaagagagaaagggagaaaaagaaaaggaaaagcaacaactacaaactattcctgtgaaacattgatattttataaaatactcaccgactcatgagatatacatggtcactatttcaagtatgtttgaggttggtagtgactaaggtttttttctatttctacataggtctgtacctcaatgactggagcttttaatcgcagcagatttcgtttaattagcacgctgcaaattaaagatttcgttcccctttactactttgagaaggctgttcactaccattccctgactgaacttctactgccaaagttaaattccataccaatgagttattctctattctctctgtattgacatttcatcctgcggtatcctttagggtacaatattccaagtttctttagacaaacgcaggaacaaatgttcacatatttctgtttctttattcctttgacaatgtaggcgagcattttagcctatgttggtctcaattttttatcttttaaatatgttccaggttctttaatgggacctttcaggagcaaaagtcctcccaggtttggtcaatgttcaccctcagtggccattgaggaaaatgccccaagtgttctagagattgttctcacttctcaggctaaggcccattgagacaatgccagaaagcatgccttatactagcagtcaatttggaagtttgtagtttgtgtctttagcataggttatcaaataaattttatattttcttttaaaaaaatctcaacattactaaaatacaaatattcttttatttttctttgcagaattattggggaacaaattcagaaaatttgtgtaaaattttgggtagttgctccacttggatacacagtattttctggcatatttgtaatttctatgaagatctaggttgcatttcccatacattcaagcagtttccattgcattttatgaataagatgacgcatactgggaagtaaggcaaatacactaaaaggaatatgtgtttgtattctgtatagttattactcttaaaaaatgtagttgtaattcatccactctttttactttcaactttttgctattaaaaaatcatttttaaatttcagtattaaagcagaaacatttaaatttattagaccagaaaaaatggcagattctagaactataatttgaatccatttaagcccatagctagagctagagattttcactgttggatccctcataaattgacaagtctcctatcattgacaaatgaataaaaacaataaaaatcccaagcaagtttagatccacctggataaaggcagtaccttcagcagcctggatggttcatcacgaccttggttaccagcagaggccagtgttgttcattacgagaatttaaaatgatggggctgtttgtgatctagaaaatagtgtgtatttttttctttcaaaagatagaaggttttatgcagatcagagcaaacttatatgtgaattagttacacaacaaataacctctgcacatagtcatagctcagttgtatttctctatatcaagagagcatgaagtatatgtacaaaagcaagacttacacagttaaatatttaccatgtgccacgtggtatgtgtgtatgtgcttatccttcttgtcttcttaaggaaagagttctatgtattttaaatgcaatgtcttaaaaaaaagtttaaacttttatccttataagaggaaaaaagattacaatgataaaatgattgctgtactttttaccaggaaggaggatttgggcactattacagtaaagagaaaagaggttcttctttttacagaaattttgcatgtcagcacactttgattataaagcagggtgagaagaaacgttagactgccaaagtctgtttaagtaatttaaagcaatcatctgctgtaagaggttatgatagatttgtccttttttcaatgcttttgagaatctctctttaaaactattctactcttattttaggcaaagaaaacacaactatatattttatatatttacgtatcttgttaagattctgcttatgacctcagtaaaacattttatctattaataattagttaagatctctataattacatttaactgaaaatttaaaataagtagatataaggtttcagtaactgttacttggggcttaaatctcaataggaaaaaaattgctgatagaatggaagtttgagaaactctgagagaaaagtaagaatttttcagttatctcagaaaaaaatctggggtgkaggtaggatttagaactgcgggtttagatataggaaaaagaaaagtataaaagataattcagaaagacaaagataagaaaaaaagataatgcaagcagtaaaagctctcaaaattggaattttgatagatcaattgcaaataagcttgatgaataccacttcttaatggtttatttgaataatggataaataacttagtataatggtacacggtataggctcaataaatgttatctgttgttatcaccaaaatgacatttaacctctgcaatgtccctatgtagtttatattgttttcttcatttgcaattatttatgaacatcatgctcaagtctaccttacctcacaggagcgctctttcgatgactcaccagtgaaaagagcaaacatactctggaaagtcaaggtaaatcagaactgccacatggctcaggtgaattgtagacacctaatgttgttgagtgacgtatcctcaaattgagaaaagttgcaaacatggtccaggtgagggatgttaaagtaaagggagatgccttaaaactggaactgggcaaaatctgtaatacttttttaaaaagagaatattaaaaattataactctagaagtatgagcttgcagtgagtccacatcgaaatttgatgaaagattttgaagccgattgtgagtagttggtgtgggaggagaatacagaaaggaaaaaattaaggtcctttaataacaaataataatgataattagatgcaatccatgttaaatatattaacgatttcaatatttcaaagcaatcttatagacattgtttcatgtcatcagcaccaggatactctggaggacagtgacagctattattttgtcactttcacagatgagaaaattctcagggtgctaaataccccgtctaagatcatggaggtgattaagaagaaaggcaggtctttaactcaggttttctgaccacgcccatgcttttcccctcaggcctgtctgataccagagcccttgagatcttttttcattatcccagctgagagcggagaggaattctttgtatctcagttctacaaagccaggcatgatgtgcatgtggacaagatcaggcaacatgggccagaggatcatacagttggctgaatttttagcttcaggataagatattatgaatgataatattaataattattatttgaatatgtgcctgccactgtgttaagtgttttatgtatattaggttatttgtcaagtattatttttattcaattattgaataatgaggttcagaaatgttgctaaactaatgcaagtcatacagctagatagtggcagaaccagaagttgatgccagatctaactttaatgcctacccataatgactgtcgcctcagacaaaaatgctctagaaatggactggagaccttgaccagtattttttataagatatatattactgattctcaaatgcagttgggtttaagggtaaggatagaactagaggttcacattagaatcttgtgggtatttttttaataaaaatgaactttttattttagaatagttttagatttatagaaaagttacaaagataatagagagcattcctatatatcccccacacagtttcccttatgaacgttttacrttagtgtgatatgtttgtaaagattatgggtgttattttgaaaaagctcgttcaaatattataaaataattgtgtattcaaaagcttaaaagattacataattcagacagtagtgaagttttgcaacatcctctcttctaatgaggatttacagaagacataactttatttaggaacttctaactggaggaagtgggtgaagcatcttccacaaagaagtacatcagaaactcagggatgtaaatagtgaaaattttatatctaatataaggaaacagcagttaaaaagtgaaaaatactgatttcgatgttcatcggattttcaactcagcacaaagctaaggtggttagataatataaggaatgctggaaacagaatctgaaaggattgaaaagcaactttaattaaaatgcaaattattgtatttagatctaaatatcaactttgtaagaataggatgagaaacatgtgactcagcagaaaagggtttgaagcaatggttcttagctttgattgctcattggaaccacctgggaggctttaaacactttgcataccttgccccacccttagagattctgattgcattggtctggggtgcagactgatggctttaaaaaaagctccctaggtgattctaatgtgcagccaagattcaaagcctctaactgaaaggttttagttaatgcagtggttctgattccattagactggaatggggcatttatttttttaagcaatcccaggtgattctaatggccatccagggttgctgataatctctggcatatcagaaaatttaaaacaatagtgatattatttcaaaaatctgttgctcatctgctcccaggaaatagtaatagaagcatggtgtctagggacataaattaataattctgtacttttccaactaaaatagtacacacctagttgtgccaagtcttaagaggcacattgactaattgaattcatccagcatggcaaaggctaaacaccatatcatctctgatacacaattagaaaatggcatgatagttgtctttacatactttgaaagggttgttatgtggaagaatgattagacttttttggcctgtgtgttttataaagggtggaaattaaaaggaggaaaatttcacctcagtatgaaaaatggctttctactaaaatgggctttctgaatgctatcattggagttatccaattagaaaatgtgtagtatcaaattgccacaggagtagattttaagttttctcaccacaaataactgatcagtatgtgaggtaattgcatatgttaattattggacttaaccattccagaatgtgtgcgtatttccaaacaacaagttgtacaccataaatatatccaatttttatttgtcaattaaataaataaaagcaactgtgcaatatcttcagtaggatcttgggagcattcctgtttatatgtattttccaactttgaacttcctagattgcattgtccatgaaggccaagtccatgtgctgtgttcctttttcacaccagcagcagtggcccagtgctccaagcagagtagggccttaacaaacatttatggaatatatgaacgccgaatttacatgtctgtattttagcagtgaaccaaagactgtgtctgagatgcagagtgaagataggcatttgtaccaattcagatttatttttaactttacttaagatgtacaattgttgagccaaagattaattattttgcctcaaattatatgattatcacaatttcttatttaccttctcaactgccttgaagacacttatgtagaaatgcacatacacatgcacacatcatgagcttcactccattccatgacaccttccagagcacaccacctccatacccaacccctctcccccttttataaccaccaccacctccatacccaacccctctcccccttttataaccaccttctctttaagatcacccagtgttcagccccagtgactgcagcaggttctggctgttcatttcactctatccattgctgctatcctctgatcaccatggctaatcaaatggcatgccagcctgcaccaatcattaagatgacccaaattaacagcctggccatgtcacagtacattcattccacatatacagacagggcctaagtgtgaggcagaaacccagatatgcttatttgtttttgtgttgtaacatgcattattgattgtcataagctgctttagtgctgtaaatctgcaaatgagaatcatccatcctttattacagccagaattgagaactgagagcaaaagagaatatgtgcatgccttttttaaccataattttttatttgttatttttcttcacaattgtgttgtaaaagattttagctcaagacattccctggcatttcacttagaagggatacttaatcaaaataattttgtatcctgaaaagagaaagaagtcttccctagccaggtgaagaatgtagtgcatgctctgaattgtgagatcrtagagggaattttggaatccaatttcctagcatatactggtcagtaaagctcagttcttaacaactcacaggcagccttatcttaatcacagttgcagttgttggcagcttgcagtgcctggtgtaaattttatctcaaaatatttgcattcttgatggtcatttttcgacaatgcattctaataattagagtcctattacctgctaaatgttagtataaattaacaatccattatacacaataagttttataaaacatttacagatagagatcatctttaattaaaattaacttccatatgaaagccaagtgcattaatgactcacaatgaccttttattacctgcagtcccctgttttggctggatgattgacagcttgctgtttggctaccatgttgaatttcagctgacaagacttttcattttaactcaatttgcccgcctatcacaagctggtggcaggccagacccaagtcacccagctttgcctcagcagcttgctctagttctcattagtacgcatttattcagtggaaattggaagacaaatgcttgaaggcatgtgaactaagtatagcaaattaggtttaaagactgaatatttataagtatatggaaagtttttttttttttttttaattctagagcgaattgagaactgagtgctagctttggtataaaagaaattaagatagaagggggaagattctaagaataacaatactataagctttttctttccactttggaaacatgtaaaatctctctgacaacaccttatcaaataaaaacctggcttctctttcatggagtgcttgcacaaagaagtttagcacctcatgtgtgagaagggggaaaaaatgagggtcatgttcatttgttgcttggttatcccttggtatgttttaaattgccttgtttgttcggcactagcacagaaacagatgttgctctaccgtgcaggataatttactgtacctcctggtgcagcatggaagtcctcccagggcccagctggtctgtcagtggcactggctggtgtctgctcaactatgacaactacaagtagaggctgcaatttttttattgtgcagttgtcattcttctcaacgtatagctctgcctgcattcgtactggggctggtggaaaagctgctcgcttttgtgtctggatgttattctgcagagccacgtaagctctactctccattgttgataataacgcarctcattacttttgtcgtctattgattatcggcatgatggctcagagcgagagccaacctcatctckcacacataactggtactggaaggtaaaacagatttgtcacttactatctgaccgctaagccacactttgcgctccattattgtgattaacttctacataagatatgcttgcccaattgtcatttgtgatactgyggtgggcgcaagctgccatgcttcccgagagcacatcagccaatcagatttgaccatgttattcggactgttatatgcctgccctgtcacagcagccatcccacaattattttgcttttgtgtttcttcttcccacacccctactggacttgttgagtgaatagcattgctacatatgtcagctaccatttcacaccacaagctaaaaggatgctgtgctattgttgctccaacagagccggcagcagtacatgggaggccgagccttgcttttcaccacagaaatgttggtccttggtgttctgccagctgaaatccatcgtgtcaggtgcctcgtggctatctgcagtagagcccatgttccaaaaccaaagttcttttctggcctcatcaccaacaaaccgatttgactctgcctgattataataacgaaggcagtccaagagaatatgcactgcctcactgtacgtcacattgaatcaccacactggccacacaaagctgaccgcagcctcatttctttagacaaatgcatgcttaaggaaaaacctcctgggagaaagcacccaaagctacttgatagccttatgcaggctgtgcatagatttaaattttactgaaataacatttatttttatttttggctgatgcaagccctcacggatgggcctgcctttaataatctaataattgggtactctgtgtttcagagctttgctgaacactgagaaacggggctctgtgtgtgtgtgtctgtgtgatttctaaattgcaagtcataaacacgaccatttgttatcatgtgaagsgggagaaaactccatttggggcttttttttcatattgctgattagagagaatcaagctttatattctaggacccattcacgctggtggaaacatagtcagttttgattatgaagggagagatgcagacctagacaggagctacacgctgatatgcatgctatcagaatgatttatgcaaattatgcatattattcccaaaggaattcctcctcaaactgccaggataaattgccggaaattagccataaaatctgtcgtgctaggagtaaaaggtgaaggccactgggaaaggaaggacattaggcttctggaatcttccaggatatgatggtgcctgttattttccctggatgctgagaaaaatgtggttttcttctgaatcctctaaaaatattttccttttgaaaattttccagcaaatgttgactcacattttatttacagctagcataaaagaaattaagtgttaagctgtctcagaaagcactactacaattactttactattaactgcctaagtggttattaaatggctaagtctggctttaaagcatcagagttctaaaggtttgtggaatgactcaccagctgtgtattttaactgggatatggttttaatttcaagcatatatacccataacacaacattcctctctagcagatcaccctctcctacaaaatcttaatgactttctgcccaggtacaacactgctgccttctacctgtgaaatgcccccaagccttgctggagccagaccaccgcccctgctcacatcctgtgcacagccacccttggctccctcttggtgctcaatgtatgtgatgaagaaacagtttccttttcaatcaaggctattagtaatgagttttattgcaaactgagagcagttttcaggaccagccctatcttaataagctatcgtttgtttttttccttcagaaagcagcatttttgaagctttacgactgtcctcatattcaaccaccattcgttttgttgaggaggatttgactctcagttcagagaccggggactactgtgtgygaaagggagacttggtagccatctttcctccagtcctacatggtgaccctgaaatctttgaagctccagaggtaagtaaacatcaagcctatgattgstacttcttagatcctgtgggcacattcctcttccatccctatytcttcctcttgccactttggtccagaaggggtttgaggcagcttgatggcttctattattcctcctaataagaaagctttcctctttactgaagtgttccctaaggatatctttgaaaggttccatgatctataaagagaaatacagtgatgagactaaatgctagttgcttcaaatgaagtggacattgcgccttggccactattacgttttggccaaaattacattttgcttggtggagaattattgaaaaccatggagggctagctattgacaggtggcttagagaataaatgatgataactattttgctaagtgtttccaaagtgaggttgactgttccaaagtcaaatagtatcattgctgtagttaagcccatatacttttccacctcttatgaaaggtatgtgccccttcttgatcaattagtatggcattatgaacttgagattgtaaagctgctgctcacgggtgaagctctgagggtaattgtgtcatctccctgtgtttttttctgaagctggagttaatgaatatcaaagactggaaattaatccaccctggttcatcccttaataccgcttcagagattcaccacctgcatgcaaattgaatgcagtcctattctgcctgtgtttcttaggaagtaatgttgctgcagtagtttttgtgtgtaaaatgccttttttcaaagggaaactttgctgctcttttttagcagttcatagctggaccacctctaaatctaattgctaagatagatgttttgcatccaggctggattacgatattgttgaattttgaaaattaacaagaagagagcagattcaaatacaattagaaaatttgcatttatttcagcagcaaaggtgaatgacttaagtgtggggggagtgtacatatagtttctgtgtgtttcaaaaggagggacattgtatgaatgacaataacaaataggttgtagagtattagcaagtgaaggaacattctgcaaacaacaggctttatctccacatttgtaagtatcaaagaacaaaattatattcaataaacagggcaaatgaatagccaatagccaatatctggaaaatatttttaatttttatttttacctacaattctgcatttatttaatttcaacttactattttcattatgtgattattccactagtcattaagtttactattcatatcatgatggtaaaatcaacattagtgttatcaagaaacaataaatgtttaccagattaccactgtctttatatcactgtgctttggactcctatttcttaccctcatgatgaaaaataccttgatttagacttaggaacttaaaactcaaagttaaaaatcaaaaatatgctaatttatatttttttcttttggaatactcaatagcaatgcccaaactttacataataaatcaaatagtaatcagaagggcttgccttatacaaaatctgtggcagaacaaaattgcaatattgtgaatactgatttagcatcattagggtagctttaacttgagttgatgaacactctctattatttactagatttaacattagccaattatgcctgactaatgttaaaattaactaatttattgtcacgccattgtttccttgaaattagttggagaatgctgataatacctggcacagaaaaaaaatgatatagctcagaaccagttttatagaatttgggaaggttttatcattcattgtataaacattttctgagtgactaccactctcagacatatcagttattcctttgattcttaacaacttcatatggcaataagtagatgctatagatgctcttaaaagagatgtccatcccaagccaccatatattgacagtaaagaaaaggagattgttctagaaaagtctaccgtgagccatttgttgctgagaacatggttcaggagctcatcagagacacattcattactacctgccttttgtatccaacataccttgaatgagaagatcaagcctcagatgttgataacaggcaataggtgttaggccaaaaatataaggaaggcagctacagggatagttattcttggaagacagagagacaagagcctcagcagaacatagattctcccagcccaacaaggcagggtttcagaatttccaacctccaaaagactctaaaatttggcatttcaaagacaggccatggtcttccaacatacttgagagctgttggatctgcatctccctattcctggaatgcccctccttatttgtgcacccagcaggcaccaaactactccacaggaatcacctaatcacctctttgttgacagtgtgcctgatttccacctcattcctcagagaatttgccattgctcacactgtggcctgtgtttaactttgtaggggggcataacacacagtattttgcaattatttatttacttgtccttgctcccatatgctgtaagctccagaagaggaaggactatgtcattcccatctctgtattctcagtgcctagcacacaggaagctgtacactacacataagttgaataaataaggggatgcttggatagataaatgtactgagagtgaaaatatgcttcagttataattttaaatcaggacagatattgcacattaacatatgtactgggcctaaatagatcaaataaagaagtgatttgtgtataaatatagcaatactattagaagtgttaagaactatggcaaaaggagatgctaggagacatctaaataggaccactggctacttctgaactagccctcagctcttgcaagcatttagacctagtttggtgaagtcattttgattttttatttaaaaaataacctgaaaaaataggcttttgagtgaaggtttgaatttttaaatatttggaaaaatgaaatttaaaacacaatatcttacaataataaataaaaggtgtttgggaacttaattgagcctataagctaccaacatgcaacctctatattaagaattattatttccctgaatattggttgcttaacttattgtaatgttagccattcaggtggctcagtagtaaatagtgatgatttcttttctgccacaatgcaagatacagaaccggagctatagagaagctccatagagaagatcaaatctaaatctgttcgttggctttcctaggtccagaggtactgagggataaagggagacctggtgacattgtggggtttatagggaaaaaacgtcagacatttaagatggcaatgcattatataaccatgtaggtaaagaaacaatggtgaaataacaatgtaattccaaagcctttggaatatcccccaaaagctctgaagatggaagatcttgtttgtttaatctaatgcaattctgccctatctacttcttatagttgttgagataataaaatgattaataaatttgaaagcccttgaaaaaattctaaatcactaaaagaattgtggtaccaattattattttgattattgccactgttcttagaatgacatggcagataaagaagtactctcaataattttttatctgtattgcaaaatggaatagagattgtgccactagtagacttaaaggaaacaaacatatatcaattaattactatccagaaatcactttgatgggcatagtgagtgacaaagaaataaaaaggtcccttcccctacaaacttgcagtatagggactcagccctgtcacatagctgatttctcatagtgaggtgcttcctattgagaaaagttttctgccataccaacaaattgacacttcatacctaccatattggaactagcagtgtgctggtaaaccagggctctgagccctgatttgtagtgtttgtcaattttcgtagtataaactacccctttggccaatttcatgttactaatgtgaagaccctaaacacagagtcactaagagatgtgcacactctgacaagctggtcaaactgtctgcagcacactaccaatttgaacccaagtcatgaagataaaaagggacttctgtactctgccatcttgctaaggggcaacagtgtagccccttagccatgcattcaaaacactgactttttttattatgagaaagtcatatcttttgtctaatttatatttgtctaatttatattcccatacccaaaattatgaattgagtggattcaagacatgatcctattgtgtgtcacctacttcagcaagaccatgttttatgccttgtaacttcaatgctttacatacaggaagtgctccaaaaaaatctgttgaactgaactaaacatagtatttggagaacacaaattagggtgttatgcaatcttcctttgtcacgaataccaaaatcttttctctatccagaaaattgtgtcctctatccaaacttgatttctagtgcttcaatattatacaatttcctactatttgtaaacactgaatattcatcgactcatcatactctacatatttatttactcattcaatatctatgttttcttcaaaagcttgaaaatggtttttaaaatatacttttttctcatgtatttattcattaattcaacaaacatatatggaacctctactatgggaatagcattgtgttgaaggctttaaacatgcagagataaataagaaaatgtgatagctccaaactcctgggatttcttggcactgccatctcctgtaggttagctctgtctttagcctgatagcagttccagacatcatagtcacacatgatgaggtccagaggaggaaaggtaatcaaccatttctttttgttttattttcttcacagaaaggggacttctcctagatgtccccatagatttttcccttgtagcactcaccagattgtttcacaattctatcccaaaccagtcagagaccagaacaatgtaattaccaagattagtgcctagacaaattttattcagaagaacaatgttggggagtcaactgcaacaatcattagaggaacagtgaggaacttccgtgtcttataccttctcttgtgatttttctattctcatctatttaattggctctctttaattgtgaagcaacatgcttattatggtcactgtaaagaatttcaatcagcggccggacacagtggctcacacctgtaaccccagcactttgggaggccgaggccggcggatcacgaggtcaggagatcaagaccatcctggttaacgcggtgaaaccccatctctactaataatacaaaaaattagccgggcgtggtggtgggcgcctgtagtcccagctacttgggaggctgaggcaggagaatggcgtgaacccaggaggcagagcttgcagtgagccgagatcgcgccactgcactccaacctgggcgacagagcgagactccgtctccaaaaaaaaaagaaaagaaaaagaatttcaaccagtttgatgaattccaagtttaagtttttccaaatgaatggatacatcttgagcttcctgtacctttgttctgtgtcactgtgaccccagaatctcagtggtgagattattataccccttcctttttcagctaaaacaaaactgtacccctagcagctgacacaggcccttcttaacattggttcatgcttaggttttccatgcctaggcaatagggcaaattgcaaataaattttaactaaaaatatatttatgctcctgcaccctttgaacttggtgttggtcacagagctaaagacagtggccatttccattttagtttcataaaataaacaaccgaataggaatttctaagatgtttactatgagaaaattgaatagaacatcctggaaactagagggatggtgttgctcgttgagtagaaatttgagggaactgaatataaacactagctgaaggtcatgggtaaggagcactcctgcatcacgtgtttgccgtgggcctctcagaggttagcacattcattttcacaaagaggaaccagaaaaccatggtgatttctggcttatttatgatatcaagacactaaaaagtcataatccaagctaagttttcattttgcgtttgctggcttaactagtggggctacagtgagaggcttcctaataaatcataccatagcaaagctcacttagactgatttgggttaggtagatagaggaccagtctcctcagattggtcagcgtgaaggaggaagcagcaggactaagctcaggcaagcaggcttgagccccaggaatggaagaagttccccaggagagtgttacatttagtaactctatctccagtgaccctgtatgtcaacaaagggtgtccttgttctttcagcattgattaaataccgtttggatacatcccagaactatggtaaaatacgtgttttaaagggctcaaatattcactatcaggaattgagcagttataaaaatgcagataaattttgccattatcattgcatccacttgcaagttggaaggaaatgggaactactgagaatttttctaagctcaaatacttatcaaaataagtattctacataaatgaggacaaacctaatasttttaaaggaaatggttcactgtcattaacaacactggctttgagtgagaaaagtaaatcatttgtgatgaattcagaatctatccacatattgcaaggttttcaccttaacctgaaatgctttggatctgacctacttttttgcattcgtcttcatgtaggtcatatcaaagttgtgtgtgagcaggtctaatgttaatgagcaccaactacaggaaatacttggtcgtttccatgcaagccacggacattaatttaatcaatggcttaattcaccataggctaaaataaggtcactcagtcccctctaagaaattcaagtgagagttgaaccataaccctttggcagcaaggcaaaattaagatggcaggcccaacactctaggtaaagcagtcccatgatttcctgtaacaaactaatataactcatttatgaaaacatttcagaaacacctgccaccctagagtaaactcagagagctgattttaatagaactttcatagaagaaattaactacaacatcaaaaaacaaacaagattaattttggggcttagttcctctctagtgctttatctgaatcttacgattttatatttgtttaatccaaacatcagcaccggatcctaaactcatagttctcatctatcagtagctggtggggaagggataagagaaactcgaattaggaatccacagttaggcagctcctgtggctagttaggattcatcagacccgggtaacaatggcagtctcaccagagcccttgccttctacctaacattggtataatcaagtgcccatatgtcaggacccaccttagggagcaaaaatagtgatgttgccactctacttgggaagctcagcttaggagaaaaatacaagtggagaaaaaaagtcatacagcttttcagatttcactttgatatgggagaagtaatttcctagtaatatttgagttttttgaaagttcatgcttaatttgcactcagccaagtttttctggtgttcacctgattaaaaggagctttttaagacaggcagagagagctagcaactttgtggacttgaactcaaactatttcatataaaatgttaattttaacactattcttccttacaggagtttagatatgatcgttttatagaagatggtaagaagaaaaccacctttttcaaaagagggaaaaagctgaagtgttacctaatgccgtttggaactggaaccagcaaatgtccaggccgattttttgcacttatggaaataaaacaattgttggttatacttttaacttattttgatttagaaataattgatgataagcccataggactaaactacagccgcttgttgtttggtattcagtatccagattctgatgttttatttagatacaaagtgaaatcttagagaagctaaaaggaaagaaaataaatctatcaaaattaccctaaacatcctaagctcatctatttctttttaatttctgcaaatgtaattgatttatttgtttaaaaagcgctaatttctatttgatctgatatcagtccagtttgtccttagtcacaaagcccatcataatataaaacaggatggtggcaggaaaatggacatcaaaatcaacttaagggtaggctcaaaacagggttgttgttgtttttttagtttctccttgttgtgattttcacctgttataataaatgtaccttcacaccaatagattgggcactgtggaatttaaatcactcaaattgttctctaatatgtaaaattacactttgaactactagaaaattgtgctggaaatggacacagtctaacaaattccaaattctcacagaagaaggaaattgaatttccatgagttacactggatgaaaatgttcccttcaagtataatattaataatacctatatttccagggtatgtgtgcattaaatgagtttcacagtagattgaatgcttcaacttcacttcaatatttaatcatgcataaatgttccttattactttgtatactatggctcaatagaacaaaatttctggttacataagacctttcatgttcaagttagatactgataagatttaatgtataagaaaacacagaacctattatatattcagaaattgccctagacattagtattaggtttattatgggagcaaatgttgaaataattacagcattgattatatcatttggctttagtataaactatacaggttatgcaaatattgcaattaaccctttcctaaatgctttcatatatataaactgagaagctagatatagtatttggttttgatgtctcaccttttggatttggagttcatgtgttctattttgaattacaacatcatgtaatgcagtgtaatttcatatgacacatgcagcattgtgtcaataattcaaagattttttttcaattgagagagtatctggctgtgttgcccaggctggtctcaaatcctgacctcaagtgatcctcccgctttggtcccttgggaacctggactacaggcatgtaccaccaagcccagtgattcaaagattctaatatcagagtaccacatgattggcatctgatataaatgatgatgcaatatataagcaggcaaggcaggtaataaagtccagttaattcatgcttcgttaattggaacttctaatatttcagaaatttgctactgttttgagaaaaggaaactgactttaaaaataacattacaaaatatttacattcttagtaagtaaataagacagtctagcatttattttatccttcctgaagtacatgttctgaatgttccttcagtgaaggtctgctggtgcaaattctatttttgcttgatttagggtgtctttatttttactctccttcttgaaagatggttttgctggatgcacaaatctagattgacagttatttcctcacagcactttgaagatattgcccgttcttaaggtatccattgttgttattgggcggatagccgttagtgagtttaattactcaataggtagtctgtctcttctctctgactactttaacgtgtcctctttgtctttgatgttcttagtttctttctgtttctcatgcttgcatgtcctgctgcttcttgaatctgagcacaggtgtctcccatcaagtatggaatcttctcagccattctctctgtgaatattactgttctcacactctacattagatcctctcactctacatacatcctttgatcttttctcaccacactttgtatctctaacttacactccacgtaatttctttagatgtctcttccagtttcttctttgaacagtatatctaatctctccaactcatccactgagtttgttttttccttctttttgttttaactctaggttcatcgagttgagtgatcactctccttacactctttagttcatgatacacaattataattggttctaataaggtccctctggctttatttacttattctgttttgtccctaatacccactttcataccccttcctaatatcataggcaaatattctaatgtgtttgatgcatatcttggtatgtatatgttttcatgtaacatatattatcttgagtacctattttctgtaagttatattcttcctaattttcttatgaagctctgtgattttaaagatatattcatatttctgtagtatatacatagtatactactatatttaatctattgcttctaactgctgcacagcaatccataatgtgcacacattatgttttaatgatctagttacccagtgatggacactgtcagcaggacagttattgtgggacagaggccaaagcagaacttaaaagcttttccatcacctatcctcacactactgtgcctaaccatctcagcccagggctgctaaatgccttgtccccaagccccaccacccaccccccacatacacacatttagtccatgataactttaattcttcctaagatgttctaaatttgttatgtcccatcctcagatccatccaatcctctccattctgtagggtctccaaggttgattttgagtcagagtgtcagtctccagcttgttaaccttcaggttttccattccactgagtttgctaagttcaatcattacatttttcagttttacgattcccttttgttcttcatatatgctgcttattttttataatatcttgtacctttattataaactcaacatcctttttcatttcttcaactgtatgaagcaaacattttagattctgtatctgatatttccaaatcattggtgttttgtggatctaattctgtagtttatgtgttttgctgtcactgttaccaggaatggcttgtttactgagcccatgttccttggatttttatctctgaaaaatctttagacctagatttaaagttcattcctcaagagagaatttgtatttgcatttgtcagactgctgatactactaccaaactcagatcaccttaaaatttcagcttgattatctgggagtggggagggaacgctacataggtattgtggtttctagccctaaatcaggtagaatgcaaccattttattaggaatagacaggggacacatttgggggttcatttttttgtttatttttacccggagctaagactgagataggcaaatatactgacagttttgctctgtggagcacagtttctttctagttcacctattgagtatgttgtctttgcaagttcttggctttatgcaaaggccttggattacacacacacacacacacacacacacacacacacacacacacacacacacacaccctgggccctagcctttagtccaccacaaagcatactctgtccttttcgtacttggacgtctagttcgccatgttgcctaaagtggaagttccatagctttaaattcaacttagtggtacacttttgtgatgttaaggcacagagaacacaggaaattattccattccaatttcggcttattttataactggaaatgtgtacaggaatttagaaatggaaagtaaggataaatgaaatggttgagaaaagatgacataaaaggaatgaatagtagaaccaaaacaaaacattgagaatcttgtgacagtcttaaatccagtaactaaatagtatttacaaatagaaaaacatgtcctggacaaatcagttaaaagatgcagattctggctgtgacataactggcttattattaaacaatttccgtctcagagcttcaacgtcctcatttgaaaaataaaataataaggccctttgacatcagagttcattgtaacgattaaacacagtaacgtgtatggatttatggtataatgcaatataccaatgcaaagtttaatgaagatacttcaacagtgttgtgcctttaaaaaattgctcttgtgtattgttcaagggaatcgttttttatagtcatttgttaattcattgttcatttattcaaccaaacattcattgagcattttctctgttctagatatgattgatgctagacactggattccccttccccttcaagaacatactatttgttagggaaaacaatacgtaggcaactaatttattataaatgcagttgtaagtgataaattcatctctttaaaactattttaaaattctgatttatcactagttctaactagccttccatcagtcattccaaagtaatggtctgtaatgagaaatcactatgtataattatacacaataaaaatatatacaacaggtattttgataatatgataattaaaaccaaatatagtcattgaggcttagaatttttaaaaactgtattatatattgtaaaatcccatccttttttttttttagatggagtcttgctctgtcgcccaggctggagtccagtggcatgatctcagctcactgcaacctccacttcctgggttcaagcaattcccttgtctcagccctccgagtagctgggactacaggcacccaccactatgcctgaccaacttttgtatttttagtggagacgaggtttcaccatgttgatcaggctggtctcgaactccagacctcaggtgatccacccgcctcggactccctaagtgctggggttgcagacatgagccaccgtgcccgcccccatcttttcatttttatagcttcacctaagttttgaattaaaagaaataaataattaatacccaaaatattgttttatatcaatgaccaacgtaatgaaacactcagcagaaactaaagccctgaagtggttaagaaaaagctacctatcactaaatcaggcatgcttataagcaacctagaagaaaacttttatctgccttgttttggctttcctggcatacttccttacttcatctccattttataattaagttttgggtcacaagtctaaggcaaaggagcttccatactgaaaatctacatttttaatgcttattttatcataaaaataatttgggtaattttctgcaagtgacttctaacttaacagtagaagtttaaaactgttcaaagaccaaagcacaacatttatctagtgtttgatcctagtataaaagaatggcaataattatgtgaacaggaattacatgcccttagaatgtgcattttttaacctattaaatttgccaatcttgcaaactattgtttacttgtattgcataattagatactcatattaacatattgaattcagaaaaagttagcaagccaagatgacattctctgtagcactattttaaattataatgaatgatcacataaaactctttagtatttatctaaagtaattattactctacttcatttgtttatctaaatcagtgatcattgatgtttgaactttttggcttaaatgtttattttgtttatactacttgctagagtaaaataaatttaatacatgaaaaactctacacaatttaaaataggttataatttgtcaatacttatgttttaaaatatttttagaaggaggagtgctgtatattattaaaacaattttctgaaattgtttaatattatctttgattttaaaatgacatatatgtggatttacaatgaatcaaattgtcctaaaagatgtcagataagaaatgcaagtgctttgcaagtctaatacttaatgttcttttatgtacaacaaaaatttaataaattaactttaaagcacagatgactgattatgtctctttattgtcctactaggaatatgttggataacagaagatttgattacaaaagaaaattatttggaaaataattttgctctctgaatatctcctcatctccatttcttgcccccgtacacatatattcttatcatctgatgctctcctgaaagtatattaactatttcagagtatgtttcaatatattttaacttattatttatttgtaaaataacaaactcaaaaaaaatcactaagttttaaaatgtttattctaggcaggctgaccttgctaggttacaattcttaataatcactattagtgtggacagaagtataagcacaataaatgggagagagttttcagcaggtgtaatctttgtcttcagcagatctctttactacagataatgaataaagctgggtaatatttggacagtattctatttgttcataaaactaaaataaattgtaaataaagcatatactacagaatggtggtgatgaaaatgaaatgtgggtttttagtaaccctacgtacagtattttcctgggacactgggcttttctcagagacactggtgtgagtcactaacattttacagggactggcctgagactccgtgagaagttggctagaaggtgttctgttcatttgaactagtcagctcattattgtttatttaccaactgggataaattatgtcactaaatagataaactgtgaaataattatcttttgttttcaactttattctagatttgcagaaccttccagaattagcaatgatcatgtgaataataatgtgtattttcttttcaggataaaaaaatgcccaatggctgtgctgtgttttttgaaaagtgcttgatactgtttactgttaattgtttattgttaattatttactgttgattacttttataaggagagacatgatgtatcacagactacacaaaaagtaaatgttcagagatataatcatgaagtattttacttcccttacagcaaactgtgctcacaggagaaactagaggaatggaaataacaggtaaaggtattactatctaatgattcatcattgagtcaaatttaaacatttctaaatatgaaacatattagttggagattcttatttgtgtgcaagagaatatttactacacataacttttatttctaagaactagccatcgtagttaccaaaaaatctgtgtcattattgcctgatagataccaaactttttaataaa

SEQ ID NO: 94062 - DNA, 217214 bp, Homo sapiens
  misc_feature (1)...(217214): n = A,T,C or G
ctgcctcattgggcctcttaccattctttcaaattcagctggccttgcctctgtttgttccagcttccttaaagcagtctgtccactgcccatctttgttcctctgtgctttttttttttttttttttttttttttttttgagacagggtgtcactctgttgcccatgctggagtgttgttcctctgtcttcttttttttttttttttttttttttgagacagggtctcactctgttgcccaggctggagtgcagtgatgcaatctcggctcactgcagcctcaatttcctgggtcaggcgatgttcctgcctcagcctcccaagctgctgggactacaggtgcacatcaccatgccagcctaattttattttttgtagagatggggtctcactatgttgtccaggctggtctccaacttggtctcggcccaggtgatcttcctgccttggcctcccaaggtgctgaaattgcaggcatcagccaccgtgttcagcctctgcctgcttttttatttttatttttagagacagaatcttgctctgctgcccaggttggagggcagtggtgcaatcatagcccactacagcctcaaactcctgggctcaaaggatcctccggcctcagcctcccaagtagctacaactacaggcatgtaccatcatgccagacaaatgttattaaaaacaaattttttttagagacagggtctggtcatgttgcctatgctggtcttgaactcctggcatcaaagtgatcttttgccttgggctcccaaagtgtggggattataggcatgagccactatgcccagcctacttttgtttttaagaaattgaaacgatatagaaaagtacaaagaacaacctaataaacactcatattcccaccactcagaattatcaactttttatcattttatcatatttgcttcagatcttttttttttttaaagaaaagtataacagatttagctaaagtaccctttgaccaataccccaccccactctccccgctgctcaaaaggaaagcaagcctgggcgcagtggctagcacctgtaatcacagcactttgggaggccgaggtgggtgaatcgcttgatgtcaggagtttgagaccagcctggccaacatggtgaaaccccatctctcccaaaaatacaaaaatcagctggatgtggtggcccacgcctgtaatcccagctactcgggaggctgagggaggagaatcgcttgagcctgggaggcggaggttgcagtgagccgagatcctgccattgcactccagcctgggcaactgtgtgagactccatctaaaaaaaaacaaaaaacaaaaaaccacaaaaaaacaggctgggcacggtggctcatgcctgtaactctagcactttgggaggccaaggcaggcagatggcctgagctcagaagtttgagaccagcctgggtaacatggtaaaaccccgtctctactaaaatatgaaaaattagctcggcatggtggtgggtgcctttagtcccagctactcgggaggctgaggcaggagaattgcttgaacctgggaggcggaggttgcagtgagccgagattgcgccactgcacgccagcctaggcaacaagagcgagactccgtctccaaaaaaaaaaaacaactagaagttcgagaccagcctgggcaacatagcaagagccctactctaccaaaaacatttttttttaattagccaggtgtagtggtgcaaacctgtagttccagttacttgggaggctgaggtgggaggattgcttgagcccaggaggcagaggttgcagttagctatgattatgccactgcactctggcctgggcagcaagagtgagactctgtctcgaaacaaaaaaccaaagttttcttcatatgtctggtgactttggttgtctgttcatacttaagaatgtgacactaaattgttcacggaagctctgtgaacatgagtatggtcttcagggcgggtgatctggctggcttatttcctttggaaactctcaatgttagtatctttgttttctctcttggattggtcagatacctcagagaaattcttctttttttttttttttttttttgagacacagtcttgctctgttgcccaggctggagtgccgtggcgcaatctcagctcactgcagtctctgcctcccaagttcaagcaattctcctgcctcagcctcccgagttgctgggactacaggcgtgtgccaccacacccagctaatttgtgtattttagtagagacgggatttcaccatgttagtcaggctggtctcaaactcctgacctcgtgatttgcccgccttggcctcccaagtgctgggatttcaggtgtgagccaccgtgcctggccaagaaattcttctttattggccgggcgcggtggctcaggcttgtaatcccagcagtttgggaggccaaggcgggcagatcacgaggtcaggagattgagaccatcctggctaacatggtgaaaccccgtctctactaaaaatacaaaaaattatccgggtgtggtgacacgtgcctgtagtcccagctactcgggaggctgaggcaggagaattgcttgaacccaggaggcagaggttgcagtgagccgagatcatgccactgcactctagtctgggcgatggcacgagactccatctcaaaaaaaaaaaaagaaaaagaaaaaaagaaattcttttttataccaatgtcctgcatggacgttacattcctgcttgccagcgttctggaagctgaatgagccgggtgaaggaagaagacctgtagtccaaatatttcattaaatagttcataaactggtgcttaattaccctgtttctagtatgtaatttgatcttcaactgtacctggtgtccctcagctacaaggatggcagaagcagcaggtatgtagggatggagttgacaacaggttgaagaatgtgtcctgatggttggccccaatcagtggtggtgactggaataaaacagggtatcagtttcattccagtgctctaactccttatattttataaccacatcacactgaagaattaattcatcctctcagtaatcaattctagtggcaggtaggcagctgctgcctatgagctccaacacatgccaggtggctgtaccrtagctcccttgagcattagggggaagaatgaaatcagttacagagctgctaatctctgctccgacagctggaggatgaagctctgggctrgtttctttttaacaggaaggaaattctgaaagccggaatgtgaagaaaaaacttaagaatctcttgtgtcttgtgagctctgtggaaatggcagtgctcagatgccttccgacatgtactgtgaggcacaaatttggagatcaggaaatgagagcctccattcaaggcaggacaaccacacagagtgaacagatttccaaaatagtaggacaggaaagaagatcgaggcaggtgatttctctcccttctccttctttttttttgagacagagtcttgctctgttgcccaggctggagtgtagtggtgcaatctcggctcactgcaacctccacctcctgcgttcaaaggattctcctgcctcagcctcctgagtagctggaactacaggcagaagccaccacgcctggctaatttttgtatttttattagagatggggtttcaccacgttggccaggctggtctcgaactgctgacctcaagtgatccacccgcctcggcctcccaaagtgttgggattacaggtgtgagccaccatgcctggcctccttccttctccttgccaggcaaaacacagtgacaccaaagactagatgtctaaagagtagctgtccagtggctgcctgggttgttagggctgtaagtctctgaaacagctgtaaactgtatgaacccctttgctcctgtttctctgagcatagagaggaaccccccccataatctgtcgcgagtcaactgcattttgtttttttaaagtattctttttttttttttttttttacgagacggagtcttgctccgtcgcccaggctggagtgcagtggggcgatctctgctcactgcaagctctgcctcctgggttcacgccattctcctgcctcagcctcccgagtagctgggactacaggcgcccgccaccacgcccggcttatttttgtatttttagtagagacggggtttcaccgtgttagtcaggatggtctcgatctcctcacctcgtgatctgcctgcctcggcctcccaaagtgctgggattacaggctttttaaagtattctttacataaaatcttatggcatgtgcaattttgtctcttgcttcttagcttaatgtttttatcataagcatttattctgaaagccagaatgccttgatcttctttcctgtgctattacgattttggaaatcttcacttcgtgaagttgtcctgccttggagtctctcatttcctgatcgccaaatttgtgcctcacactatgtatcggaaggcgtctgagcactgccatttccacagagctcacaagtgtaccagacacaagagtttcttagcttcctcttcacattttggctttcagagtaaagaatgaaaaagggaaaaccttgttgttaaaaagtattggcaaacaattttctttctttcttcctttttttctgggacggcatctcactccgttgtccaggctggagtgccgtggcatgatcttggctcactgcagcctctgcctcccaggttcaagcgatcctcctgcctcagcctcccaagtagctgggatttcaggtgcccgccaccacgcctggctaatttttgtatttttagtagagatggggtttcaccatgttggccaggctggtcttgaagtcctgatctcaagtgatctgccggccttggcctcccaaagtgctgggattacagacgtcaaccactatgcccagctggcaaacgattttcaaaggctgtaacaattgctctatttgttggacattagttttagacagttttttgttattaaaaaggacgctgcggtgcatgtctttttgcttacatcctctaaatgtaaaatttaaaaataatacagaaaagtacaaagtaaaaatcaccttaaatcccatcacttaggaaattaactactcatattcactattcatatccctctatgctgatatatgtatctgaatttcagatgattgccctattagaattataggtgaaaagatttggcctcgtttaaggcaacgtgtaattcctcagccttgaattttgatctagtgatacctaacttctttgaggaatgatcttagcttccaaacccagaatgtgacagaaagcgccacagcaagcaaggtcctactttatcccttctaaaaacaaagccactgaagtttggaagggtgttgagttctcaatatcacaaagaaaaataaagccacttccagcctggagccgccgcttctcctttaaatactcgctcacgtgatcgcagacgggcacgcgcggaggaacttcacgctgtcaggacaacgagccattcctctaccacttcccctcccctaaggcttcttggcgttccctccccggaagtcacaactcctctggagactttctcttcctcatcccctccgtcgagtcacctatcctcactcctttctgttagctgccggccctagcgctccctctcctcggctgaatctcacttagtggaggaaaggctgaaaggactacaactcccaggggacgctgcgggccccgcccatggggcgcgcagtgtaggtcggggcctgaggtcccacggtcttctcgccgcgtgcggccgggagcaaacgcactacaggttccgtggcgcctcgcgcgaggccagaccgggacggggcggggcggggctggaggggccgggactggcgggcggagaaagggggtgggagaggaggcgatggaggggaggagtggggacatgggggagggaagaggaagggaggtgggaggcggggccgaccaagagcaggagctggagtctgagccggtggttgcagcggaggcggtgatgtcggtgcaggttgtgtcagccgcggctgccgccaaggtgcctgaggtggagctgaaggacctgagcccctccgaggcggagtcgcaactaggactgagcacggccgccgtgggcgccatggcccccccggcgggcggtggagaccctgaggctccagctcccgccgcggagcggcccccggtccccggcccgggctcggggcccgccgccgctctcagccccgccgccgggaaggtgcctcaggcgtcggccatgaagcggagcgacccacatcaccagcaccagcggcaccgcgacggcggcgaggccctggtcagccccgacggcaccgtcaccgaggcgccgcgcacagtcaagaaggtactggggccgggctgcctctctaggagaggaagggaggggaggggaactgcagatcctctcggcacggcggcaccaccctccacgccctcctttctgatcgcaggaccggagataccccttgtccccttaaacccactctctcagagatgccccccagccggcccctcgtgctgggagcggagactccaggaggcacggccgtacttcgctctgaataacatggaggtagcgctctcccctactacttggaataggcagcgggaggagagacacctaatagtacgtcccgcggccccaacacgctcccgggtgtgattttccagcctatcggggaagagacctcgatagtatagaaaaaccttaccgctcacgggagttcacacagcaataaggatgaaaagatctttaatacttggagaacgagtaaggtgtagtcaccttgcatagaaatcgtcagagttgtctggtttccatacagttgatgactttctgcctttctgtggccaaccgtggccatacagcaacacgatgctgtgcccttcatttccagcgactgcgatattctctcttccctgaatatgtaaaagggtaatggagagattctcctcactctttcgtgttaagagctttgtcctccctgctgggtatagttggtcaccaggattattaggctgtgtatgaagagaatgaatgtcttattgattgctttattataatctgaaagtgataggaagaaatgctgctacttttgggaaagacgatctttgtggggttttcggtcttaggcgtcagcttctttcagacagttttgaggaggtctcagaataccaagaagtaactgcctaggtggatgatagccctgtattacccgtacattgtctatccatagttgtctgtctctctcaaagcttgtctttctttctctcttaaagctgaatcagcacagaaaaacagggcaagtattggaaaagacagaagtgtggatcatataaaaagggcttacagcttcaatttcgtagacacagtatgggcacagggattaatgttttttttaaattgttgtgaatggtttttaattgctttatcagaacagcaacaaagagackggaagtgtgcattggttttactgtgtgggaccagctgaattggaaccttggatccaccataactttttgttgtcatagcgtcatgattaaggtatagcggataatcctttcatcctaacgatacaaatttaggtgataagtcagaggcaagactgaaggaatttctgtaatgctttagacaatgtctttgtcgtttgtagtatgaaactcctctgggaagaattagmgtagaaagaggcagcatcctgcagaaatgggtttaaagaaaaaaagtaaagtaaaaaagagaggcagcagcagcaccagtgctgggagtacctagatctgagtctggaaatccaaagcatacttctgacttgttgagatactttgtaactttcgttaagtcattttcttgtgataaagactgtttttgtctaaactttgtaatttggttagatttctttaggctaaaagtgtttaacaaattgcttttagagcatgaagtttacagtcaggcagacctggatttgaagcctagtacccccattactaccttttgggtaatttccaaattacacaaatsagyttcctcttctataaaatgaaagtactaattatgattgaggattagaaatatttgtaaaaggtttagcattgagcttggcacataaagtcttaaatgatattcttactaatgcttttattattatgaataattgattttattttattcctcccatcatggcttaagtgcaagcccccatgaccacctytgaaagttacacacagttcaatatattctatataaagaaattaaaaaatcatggctcacgtctgtaatcccagcactttgggaaaccacggctggtggattgctcgagtccaggagtttgagaacagtccgggcaacatggtgaaamcctctctctccaaaaaaaaaaaaaaaaaaagagccgggcatggtggtgtgtgcctatagtcccagctactcaggaggccggggtgggaggatcacctgagcccaggaagttgaggctgcaatgagcactctagcctgggtgctggagtgagaccttgtctcaaaaaaaaaaaaaaaaaaaaaaaagttaaaaaatcaaagaccagcatactggagtctgtttttcttaattctagatgtgcttcttgaccactttccttgtcgttgaaccatcttcctgttttttcagcaccaaatgtatgttccatgattgtagatatactcagcagcctcaaggctattgtaaagcagggctgagcttgccttacaatgttaattgcaccaaaaaaacaacttctctgctgaaagttaagcaggtgaagctctgggcaaggatacagctggatgacgaaattcagggcattgctgagctgcttttcaggtgcccaatctttaaccttcttgatattgaattggctaaatcaaaataagtgcccaagactgccctttccctaagttgaaagtcatctcaccaaggaactgcagtgtgacattttgatttgttgagcctttgttgattcttagattgtctatgtaaataaccactttgaccttgactccttactgtttttcttatagcatatgaaggaactgagaatactagtattgaaatagctgcctttggctgtggaactggtgactgttgcatttgttttttaactttcatgtataaacatttattttaagtcacatttccatagatggttttccttacttcattyacatatcatcagttttcttagttttgttactctgctcagccacacaagggraataaactttttacaagagccagaattcccaagtgcagtagttaataagaaggaacatatggtgtgcaggttactcaatcacatcttatctttggcacctgcctccgtcctgtaacttgcgatgctctgggggccagatcatgttatgtggctatgatatatttaattatagtgtcctttttcataagttgacatcaagtgaacccagcaagccaaaaatctctataagaagtaatttgggaaatgggaaggtaagttccacagggaatgaggtagtactagctgaaagggatttcttccttgtgttcttgaaaatgagtgataggagtgttggcgcacagcagggaaaacaaggcaggagaggatttatttcagaaatattaaaactttctgacaataaggctgcaagcccaagaacctcaactagattgtgcttacatcagtatcagtaatgaccgtgttcaaacagaccctttattgcttttggcaaacatatycaccttccactggctttgttgctgtcaggagagaatgagttgagccatgttagcacttcttgtcctgaattgtttaagctcttgatttggttaattatagagtactaaaatggaatgttttggataaagacatgggaatgtggtagcagtatgactccttttgcctgttacaagagtactgctctgaaaagtgttcagtaaggcaattggcagttggtctgtaataatagttaccaataattagcctttttttttttttttttttttttgagacagagttttactcttggtgcccaggctggagtgcaatggtgcaatctcagctcaccgcaacctccgcctcccgggttcaagcgattcccctgcctcagcttcctgagtagctgggattacaggcatgcaccaccatgcccggctaattttctattttcagtagagatgaagtttctccatgttggtcaggctgctttcaaactcccgacctcaggtgacctgcctgcctcggcctcccaaagtgctgggattacagatgtgagccattagccttttatgtgccaggagttgtcataggggttctgtaatcctcacaaccatactatgagatgtaggtggcattatttccattttatagatgcagaaatgagatcctgggaggttaagtgccttgcccaaggttatacatctagaaagtgtcagaggtagaacttaaatccagggctgtccgtctccaaagcccatgtccttttcattatgccacagtgattctaacttcttagatgctgagttcttgctttctcccagaggtcttttagaatactaagtgaactctaaggcgtgtctgtctggctaaggcttaggtcatcccaagaccaaagtaaggcaggtctgagttagagctttaggaagaggatgggagaaaattgtacaaatgtagaacttgaaagaattgtaaatttagaagaggagaataaaagcatcttatacagaaaagcatttcaagatcaatgatgcagcttcacactggtaatttactgataatctgagaaatttatccatattttaaaagttataaataaatttggagtacctgaggaatataccctttcttcctgttcagctaacactttttccctattctttaagcctcaccatctctatgagtcaatctttgataagagcttttgaaaattgcaaagggaagaatattcctactgtataccaggcattgtacttagagctttacatatactgttttatttaattctttttttttttttttttttttttgagaccaagtctcgctctgtcacccaagctggagtgcagtggcgatctcggctcactgaaacctccgcctcctgggttcaagcgattctcctgtcttgccctcctgagtagctgggactacaggtgtgtgccaccacacccggctgatttttttaatttttagtagagactgggtttcaccaagttagccagggtggtctcgatcttctgacctcgtgatccgcccgcctcagcctcccaaagtgctgggattacaggcatgagccaccgcgcccggctatttaattcttttaagaggcctcgaagatagctagtgttctccttgttttattgaagaaactgagtgtcgaagagattaaggaatttgtctcaaggttacacrgtaatgtgatggaactaacagagccctaaactgttgcttttcaattcaaatagtactctgttcgaaactcaggatgaaccttctaaatctttttttttttttttttgagatggagtcttgctttgttgcccaggctggagtgcagtggtgcggtcttggctcactgcaacttctgcctcccgggttcaagtgattcttctgcctcagcctcccgagtagctgggactacaggtgcacgccaccacgcctggctaatttttgtatttttagtagagacgaggtttcaccatattgtctaggctggtcgtgaacttctgacctcgtgatccacctgcctcagcctcccaaagtgctgggattacaggcgtcagccaccacgcctggccctaaatcttaatctgtgttttttgggtagtttttttgttattgcactgacagtttctttttatttattgcgtggttgaaggtcttaccgtgtgtttttgtgagcatttattttctgagaaagcagcctgaggtgggcagatcatgaggtcaagagatcaagaccatcctggccaatgtggtgaaaccctgtctccactaaaaatacaaaaaattagctgggcatggtggtgcactcctacagttccagctactcaggaggctgaggcaggagaatcacttgaatgcttgaatgcgggaagtggaggttgcagtgagccgagatcatgccaccgcgcttcagcctggcgacagaatgagactctgtctcaaaaaaaagaaaaaaaaaagctgctttaggagctgaagttgcagttgtgtgtttgatgtcttgaggaagacaattactactactactactactagtactacctacattctcagtatccagttaattgaagaaatcgatagttcattaaaaagggagagtgagtttattatatcatttccttggaagtgattccctcccccacgagagaaaaaaagtttgttgtaatctttattcagaccctttgtcaagtttataaagaatatgcagtttgtttcatggtggtttttgtttaaataatttagagaggtacaactgaggcagatgggaagagaacaatcttggcagttgccctgatccactgccctgctgtcatgtttaggtggtagacacaattagaggagctgaaattccattcacccaacaagaggtttagtaaacttgatcagatttctrtggaatttgtaggagctttttatagtctgaatgacctatggcctgcgatttggtgagagcagagcagaaagcggcagtggattgacgtttcttctgtaacagttcccaactctaaaattactttgattaaattagatgattatttgtatgggtttcagtctcccttttccccagctgtatygtgcaacagttcagttagctatttccctcttggacgcttgcactaaaagctggtgattttattttctttttttttttcaagggtctatcagtagaaatctattggtttggggcacctagttcttagcttagaacctatataaaggaagggtatttgaactgctgattgagtttctctgagtataggactttagcctttctgaatgttgcaaacctgaggctaaaactagcttcatcttctctgcacacacttacattctacagtgctccaaggtgaaacttcatctattgactaccttttcttggaaactcttctcttggcttcagtgtcacttataattgctaccatttactgaatacttactccgtgtcaggaatctctgtcttagtatttaatcctcatgacaactttatcagatgtgtagtactatctttatattatggataagaaaatataggctcaaagagagtaattaacttgtccaaggctttgtcaatgaaatgctggccatagcaatattgggcagctttgcctctgtgccaacacccgtgctgctctgaccagactcccactgaagtctgcttaagctgctgctaagaccactttggatctcacaatctagcctctttcaaggggaggcctaaacaccatgcctcacatccctgtttgtttcagtcactacccgccatccgccatccattatcttcccaatactaattcctttaccactctcttcatccttcagctgattcagtccctcaaactgttccaccatgttctttacaatatccccctccttgatcagcagattcacatgtagtatcagtctctagcagcaagatcaagttataagggcaacagtggcaagtgttagcacttagtatccagaactgtgatggtgcaaaccaagctgcagcatctcctgcttggcattagcaatcacatctttgccaacccagttctgtaattttgagtgttgttttagctgtgtagcacttaagttcttcactgaaaaagtgacctcatatcctttctgtaaattctttttctgtttaattcagccagtgttgacttctgctgcttgtagaacttggagtgatgtacgggttgaacctaaccatctaccttcttagttgctggcactcatggagctgagagttgctagagaaaatcagcaaattagacagatcagtgtcattaaaaatttataatcatctatttcatatgcataatcagcattacctagcaatgttatacatttctctagttcactttccagctcactgcgaattatttcttcatattgtctctttctcttttcttttttactgagacaaggtctccctctctcacccaggctggagtgcagtggtacagtcacagctcactgtagcctcaaactccctggttcaagcaatcctcctgtctcagcctcctgagtagccagaactacaagtgtgctaccacgcctggctatttttttatttttttgtagagacggtatcttgccatgttgcaggtctccaattctcgggctcaagtgatcctcctgtctcacccttccaaagtgctgggattataggcattagccactgtgcctggcctactgtctctatttctttttctctttttttgagatggaatcttgctctgtccccaggctggagtgcagtggcgcgatctccgctcactgcaacctccgcctcccgggttcaagcgattctcctgcctcagcctcatgagtagctgggactacaggcacgcactaccacgcccagctaatttttgtattgttagtagagatggcgtttcaccgtgttcgccagaatggctcaatctcctgacctcgtgatccgccctcctcagcctcccaaagtgctgagattatgggcatgagccaccgtgcccagctcttatttctaatctctcatattttcttcttttttaaccagtcataggctttatgcctcattataaaaatggaagctgctgaatgggaattccttcattcttttacctcccaagtctacaaacctatgtgcatctgggactcatctttttctccttcattctgtcaagaccaatcccttcacaggtgctgtaatcattcttttctccccctccccccttcctcctcctttctttttctatctttcttctctctctttctctttgttttcattcatttttcttcaagagatgaagtctcactctgtagcccaggcaggagtgcagtggtgtggtcatagctcattgcaccctcaacctcctgagctcaatagaacctcccttctcagcctcccgagtagctgggactataggtgcatgccaccatacctggctaatttttttatractttcttgtagagatggggtctcttttttccccctagatggagccttactctgtcacccaggctggactgcagtggcactatctcggctcactgcaacctccgcctcgtgagttcaagcaattctgctgcctcggcctctcaagtagctgggattacaggcatccgccactgtgcctggctaatttttgtatttttagtagagacggggtttcaccaggttggccaggctggtctggaactcctgaccttgtgatctgcccactttggcctctcaaagtgctgggattacaggcgcgagcccacacctggccaagatggggtctcttgctatgttgcctaggctggtcttgaactcccagcttcaagtgatccttcctccttggcctttgaaagtactgggattataagcatgagccgctgcacccagccacattttaaaaactttttgtagagatggtgtctcactttgttgcccaggctggcctcgaattcctcgcttcaagcagtccttctgcctcaccctcccaaagtgctgggattacaggtgtgagccactgtgcttggcctctcctgtcttaaagaatttcttcctttggtttatttcatctttctactaggtcttttccttcagaattcacacttgccctattgtctcccattttgaaaaccctgtcctttgacctgcatattttctgttgctgtcatgtttttctattctctttcacaggcatgcttcttaaaggagttttcagtacatgctatatgtgcttttttcctctcatgaattccttaactcactcctgctataatattctgtttaaccaaaacaaaaccctcttgctaaagttgttgatgtccattagattgggaaacatgggggtcttttttttcagtcctcatcttcttggacctcttagcagcatttgacattgactccttgtgaaacactcttttcccttggcttctgtgacaccgatctttactagcttccatcttatttctctagctgctccttctcattcttcttctttttttttttttgaggcagatctcactgtgttgctcaggctggagtgcaatagtatgatcactgtaaacttgaactcctgggctcaagagaggcttccacctctgaacctaaaggactaggattacagacatgtgccacctcatccagcctccttctcattcttcttcttcttctttctcttgagacagggtctcactgtgtcacccaggctggagtgcagtggtaccatcatggctcactgcagcctcaacttcccaggctcaagcaatcctcccacctcaccctgtggaggagctgggactacaggcacatgccaccatgcccaactgatttttgtattttttgtagagatggggtttcgccatattgcccaggctggtcatgaactcctgggctcaagtgagctgctcacctcagctttccaaagtgagttttataataacttgtacataaataaaagcatactctctatacattgttttgcaggttccttttttattcagtagcacatsttagagctctttctgtatcagtacctatagatctgtctcatattttttaactgctcaattaatttcctaagtctatattgttgtttcttaaaccattcttccattgatgcacatttaccttaacttgttttttctttctttatacatggtgctgcagtaactatctgtatgcatttttgtgtgtgtacatgtagaagtgtttctctaggatcaatatctaaaattttaattttgggatcaaagatagccttttttttttttttttttgagagttttttgagactctgtcacctgggctggagtgcaatggcacggtctcagctcactgcaacctccacttcctgggctcaagcaatcctcccatctcagcctcctgagttagctgggactacaggtacackctgccacgcccagctaatttttaattttaattttaattttttttttttgagacagtcttgctctgttgtccaggctggagtacagtggtgtgatctcagctcactgcaacctccgtctttcaggttcaagcgattctcttgcctcagcctcccgagtagctgggattacaggtgtgtgccaccacccctagctaatttttgtatttttcatagaaacgaggtttcacggtgttgcccaggatggtcttgaactcctgacctcaggtgatccgcctgcctcggcctcccaaagtgctgggattataggtgtgagccaatgtacctggcccagctaatttctgtgttttttgtagagatggggttttaccatgttgcccatgtgggtctcaaactcctgggctcaagcgatctgcccgcctcagcctcccaaagaggcataaaacacagtgcttggccgtgttttaaactaaatgcaaaatgccatgttgtctttaaaaatgtagtaccattttacatatcagctaacgatacacgaaacaactctttcaccatacatttaccaatactgagtatttttccatctttgggggaaagtcttttactggtctttttataatatctgcattcttctgacasaatgaggctgagagtattttcatgcatatattggcaatttatattctttttcttgtaattccctgttcatattcattaacaaattatttattgattgactactgtatgccaagtgctggggatacagcagtaaacaaaacggataaaatctctgccttcgtattggattttttttttcatgttggttttaggaattctttatatattctggatattaattatttgtgtatatgttgcaaatattttttcctactccatttcttgtttcttgtaacattgtttattattttcaaagtttttataaacttggatttaccagtttttttcctttttsgcttcaacattttgtgtcttagaattgcctttccaaccccaaatttataaacaacatctgtgttttcttcacctgtttatatggttgtatttattatattttggtcttcaatccatctggaattaatttttgtttgtaatgtaaaatagggactatttgtaatatgagatagctctatttgttcccaaataaaatatattttacctttttctggtttgttctctgattgtttctttaacttgtctttcttaactatttttctttcttaactcttagtttacatgtagaagaaacttgtgattgaagactgtgcctatttatyaacgcaaatatgacactaaaaattagcatcctgatactactgatttagtgtttacggtgaattattcatagaaatacttgctattttagcgattttttttttttgtttatgtagattagtttatgttttgacggaaattggagccccaatgatatctcggatacatgtcctatgcagtggtagcctacagagaaactcatcttctgcattatactaagttagaaaaatgtgatactgtgtggtccttttccaaaatgacactttattaatattattattctgagacagagtcttgctgtgtcgcccaggctagagtgcagtggcaccattgggtcactgcaacctccatctcccgggttcaagcaaccccagcctcccgagtggctgggattacaggtgcccaccactgcacccagctaattttttttgtagtttttaatagagacagggtttcaccatcttggccaggctggtcttgaactcctgaccttgtgatccacctgcttcggcctcccaaagtgctgggattacagatgtgagccaccacacctggccaattattatgattttaaggccttgtcaggaattgagtatgtgtgatgaggctctaggacgaaaaatttttcccgggttaggtaggtgtggtcacctatctttcaaagttgacattaactgcgttagcttaaagaagaaattcttttcctggaaggcaaataaagattcttcttcaacaaagctttattggatatacagctcaactgagtctagtcttgggtcactgagctcagggaggtagaaatggaataggaattgtactaccttaattcatgtctttcatttctgtaagggagaaaagatgattggcctaatgctattttttttatgaccgatgctagactgtattagagaagtaacttaactgcttctggatatttgcctaataatctccctaatacattgtgagcttcttttttgcaaaaaccgtttatttgttgggtgtcaaatactgctaagtgctagagttataagttagcaagataccattcttgccctccaggagaggatagggaatgtagacacagaaataactaaatacagtgtagtttgatataagcaatactggaaacaggaattgtagtttgaagaggtcagcactgaaattgaggtgaaacccaagaggtttcaccatgtgtcagaacctctgtggccgggcgcggtggctcacgcttgcaatcccagcactttgggaggccgaagcagcagatcacttgagctcaggagtttgaaactagcttgaccaacacagtgaaaccctgtctctactaaaaatacagaagttagtcaggcgtggtggggcgggtgcctgtaatcccagctgcttaggaggctgaggcaggaaaatcgcttgaatccaggggtggaggtggcagtgagctgagatggcaccactgcactccagcctgagcaacagagcaaaactccgtctcaaaaaaaaagaacctttgtgaggtttccttgttccagctttacaagtctagaaattcacatttttgtgcaatcagggatcatttacctgttaggactggctcagactaaccaaaatcatgggagactcatatttaaaacaaaatggtaactcttaatttacagtcatgtataacactcaagctaatctgataaacgtgtaaatcagaggatattctggaaaatctatatgggaggtctaattatagttagagacagtttattaagtttggaatcatttagatccttgctattcaaactgatccttgcttttcaaaccagaagcattggttatcacctgggagcttgtgagatatgaacaatatcaggtaactctggctctgtactagcatatatctgtcagaacctcaattttgtattcgttgttgagtagatgttggcttagcaattagtctcatttcatgtttctcatttttattaattttttttttttttttagagatgggggtcttgctttgatacccaggctggagtgcagtggtgctggagtgcaatggtgtgatcatagttcactgcagcctcaaactcctgggctcaagcagtcctcctgccttagcctcctgagtagcttgggattacaggcccaagccactgtgcccagcttcatgcttctcttttatgaaacctcagagtagaaaagcaagaaaataattttagggttttatggaaaggtggaaacttacagtaaaacctgttataagacttataacaaaatactcaatagacacaaagacatagaaaaataaacaggcacagatatatagagacagacacaccgagacccagagggagagttacacacagactccctacacacagagacacttsccccatatatacataacagaacccctgccccaccatgcccaagcctctacccagtcccttcccacacacagagaccccatacccacagagagaaccccacggctggccggacgcggtggctcacgcctgtaatcctagcactttaggaggctgaggcgggtggatcacctgaggttgagagttcgagaccagcttgaccaacatggagaaaccctgtctctactaaaaatacaaaattggtcgggcacatgcctgtaatcccagctactcgggaggctgaggcaggagaatcgcttgaacccgggaggtggaggttgcggtgagccgagatcgcgccattgcactccagcctgggcaacatgagcaaaaaaaatccgcctcaaaaaaaaraaagaatcccatggccatctccacagagagtcttctccatggttacagagacaccccacacaaaccacacacaccctgagacccacccacacacaaaaacacgggctcccacagagagaaatacatacacagacacacacactgacatccaacaggtaatgcttaaaactaaggttttcatggagcgtgaatagtgttctccacagttattttgaggagaaggagcaagtgttctctcaaaggtacttttaactgagccagaaaatgaagcaaaaacagacgggctgccattgggtctgcagaacagtgaatgctacaaagccagtttgatttggattcctgtttctggaactgcttgttcctgggcattgttttcagtttgatgcactcagcatgcttaggtggaaagtcattctcttattttctctcaggagcttgcatcctagattgctggttaagcagagttttatgctcagtctcctttggcactaattaacacactcccttggtgctccctgagtcatataagtctgcccaggattggaagatccagaaacactgtgcccatgtggaggaactcatactgagtcctctgtgggtgcgtgggaccgaggaatgtagggggaagattatgtattagatatagaaagagatgtaattttcatttttttttaacctgtgggtcattcatggtataggtttgcgtagagagcttgatggaacttaagaatgacttaggaattatttagttgtaaattaaatkatttttaagctacattaatgtgggcaggggatggcgctttggattattttggttgagagagaacactgaaactacatagccagatttcttgtgactcgggcagcatcttctgagaattatcttgttaggaaaaagagttgacacatgcagcatgtttgtgtgtgtaaatacttgaaagtttctatcacaccaagggagccagacaccagagacatcagaatagttttataaacgttaagttccaaaaagaactattttctcttgttgcctggcacacgtatatgtattcctttgactaaacctgtttaatttcaaacaggctaggcatggtggctcatgcctgtcatcccagcactttgggaggctgaggcaggtggatcacctgaggtcaggagttcgagaccagcctggccaacatggtgaaaccttgtctctactaaaaatataaaaattagccaggtgtggtggtgtgcacctgtagttccagctactcgggaggctgaggcaggagaatcactttaactcgggaggcagaggttgcagtgagctgagactggccactgtacttccagtctgggtgacagagtgagactccatctcaaaaaaaataaaataaaataaaatttcatttcaaatagatggaagagtcatgagaaaagtgtactcattatccagtttaacaaatgttttcattttgcaaratttctttattttttaaagatgtaaaacattggataaaattgaagacgcagctggccacagtggctcacgtctgtaatccctttgagaggccaaggtgggaggatcagttgaggccagaagttcaagaccagcctgggcaacatagtgagaccctatctctattttttttaaaaaagggagacagaaaaaaaaraaaaagaactctgtgtattccttctctattcattctcctttatcccttctctccttcccataaggcccacaaaggtaactttgtgtttataactccccttcatgtttagtacttttgctatatattctttatcagtatcaattgtatgtcagcagataatatatagcattgttttgtttataaactttacataaatggtatttatgtattctgcagccctcttttttacttaactttagagttttagccagtttgatacatgtagattttctaattgatttaactactatgtggtatttcacatgtatgaatatactacagtttacacattcatctcactgtgttgcccagtctggtctcaaactcctcctggactcaagcgatccctcctgctttggcttcctaaagtgttgggattccaggcaggagccaccaagcctggcctttttttttttttttaactgaaatgaacaaccttactcatgtttccttatgcacatgtgtgagagtttctccaggatgtatctctagaagcaaaattgcttatggtggccgggtgcagtggctcacgcctataatcccagcactttgggaggccaaggggggcggatcacgaggtcagaagtttgagaccagtctggccaatatagtgaaaccccgtctctactaaaaatacaaaaaattagcggggtgtggtggtgtgcgcctgtaatcctagctactccggaggctgatgcaggagaatcatgtgaacccaggaggcggaggttgcagtgagctgagatcgtgccattgcactccacctgggtgacagtgtgagactctgtctcagaaaaaaaaaaaaaaaaattgcctgtggtatgttaatttatatcagcttgacaagatatttccaaattgctttctgaagtggcttgattcctgttttcaaatccttactaatatgtggtgtcgtcagacattaaacttctgtcaggtagtatctctgttgttttaatttgcatttccttggatagtgagattgagtttcttctaatatgtctgtagttcatttggatttccttttttcatatcctttcccatttttctgttgggatcccagtggcgttttcttatcgactatattgtttctcttttttttttttttttttttgagatggagtctcactctgtcgcccaggctggagtgcagtggcatgatcttggctcactgcaacctctgaagcccgagttcaagcaattctcctgcctcagcctcctgagtagctgggattacaggcgcctgccactgtgcccagctaatttttttttgtatttttagtagagatggggtttcaccatcttggccaggctggttttgagctcctgaccttgtgatccacctgcctcggcctcccaaagtgctgggattacaggcgtgagccaccatgcccagccgactatattgtttctaattccttatcagatatgtgtgtgtgttgaaaatatcttttggtctgtggcttgtggctttacttatgacttttattaaaaagttaaaaattttaatataaaattgattttttaaaatcatttgtcctttttgagtcttgttttagaaacttgtacctatcctggggtcatattttcaatatagtcttctaaaatgtttagttttgtgttttcagttatgtcttttgtttgtttttgtttttgttttgttttgttttgttttgagacggagtcttgctctgtcgcccaggctggagtgcagtggcaccatctagactcactgcaagctccacctcctgggttcacgccattctcctgcctcagcctcccgagtagctgggactacaggcgcccaccaccacgcccagctaatttttgtatttttagtagagatggggtttcaccgtgtaagccagcatggtcagccaggatggtctcgatctcctggcctcgtgatccacctgcctcggcctcccaaagtgctgggattacaggcatgagccaccatgcctggccttcacagtcatgtctttaatccaactgaaattaatattttatatggtatgagatagtgatcttattttattttattttattttatttattatttttttctttttttgtgcttttttttggtggggggacagtatcttgctgtgttgcccagggtagagtgcagtggtgcaatcatggttcactgcagccttgaactcctggactcaagtgattcttcagcctcagccttccctgtagctgggactacaggtgtatgggccatcatgcctaattcatttttttttttttttctgtagatacagagtcttgctatgttgcccaggatggtgttgaattcctgggctcaagcaatccttcaaccttggcctttcaaaatgctggaattacaggcatgagccactgtgcctggccttattttattttccatatggataaccagttgtcccatatgtttccatatggacaaccaattgttgactgagtatgtcttttctctgtgatacgtgtcatagtccactcaggttgctgtaacaaaaataccatasatagggagkcttataaacaatggaacttgctttctcatggttctggaggctgggagtctgagatcagactggtgatcagattcaatgtctggtgtggcctagctaactggttcatagatgacagtctttttgctgtgtcctcacttgggggaagagggaagggaattctctgggaccctcttttatgagggcactaatctcatttatgaggactccaccctcatgacctaatcacctcccaaaggcctcaccaccaaataccatcacactgggggttagatttcaacatacgaatcttttgggggaacacaaacattcagtctagggcaatatctaatgccgccttctgatatccagatcctttctgtttctggattctcccttttgtttcactggtgtctttgttgatgtctttaccaattgcatgctttttaaattgttagaactttataacaactcttgatattttggttgggcaagttcttcctaatgtattccttattttaaacagcaagaggtaaaatttgcatagtgtaaaatccacccattacaaattacaattcaatgatatatatttgtagaatattctttttttttttttttttttgacagagtctcactctgttgcccaggctggagtgcagtggcacagtctcggctcactgcagtctccgcctcctgggctcaagtgattctcttacttcagcctcccgagtacctgggattataggcgtgtaccaccatgcctagctaatttttgtatttttagtagagatggggtttcaccatgttggtcaggctggtctcaaactcctgacctcaggtgatcgacctgcctcagcctcccaaagtgctgggattacaggcatgagccactgcacccggccagaatattctgtttatggtaaaatatatataacatgcaatttaccattttatgcatttttaagtgcatagttcagtggcattaagtacattcacactgttgtgcaaccatcactactactcatcttctgaagttttttcatcttcccaaaccaaaactccatacccattaaacagtaactctccattccttcctcccccagcccctggaaatcaccattctattttgtcttttatgaatttgacttctctaggtaccttwtataagtagactcatacagtatttttccttatgtctggcttatttcacttagcataatatcttcaaggttcatccatgttgtatcacatgccagaatttcattcatttttcagggtgaataatattccattttacatatacgtaccacattttgtttattcatttgttaatgaacagttgggttgtttctaccttttggctgttgtgaataatgcttctatgaacattgccatacaaatatctgttgaagtcaatactttgagttctgttggttgtatacccagaaatggaattgctgggttatatggtcattttatttctgacgttttgcaaaactgtcataccgttttccatagcaactgcactgttttacatttctatcatcagtgtacaaggattctaatttttatacatcgacaacacttatttcgttttttgataatagtcatcctaataggtgtgaagtatgttggatttgttttttttttttttgagacggagtttcactcttgttgcccaggatgagtgcaatgatgcgatcttggctcactgcaacctctgcctcccgggttcaagtgattctcttgcctcagcctcccgagtagctgggattacaggcatgtgccaccacgcccatctaattttgtgtttttagtagagacagggtttctccatgttggtcaggctggtcttgaactcccgacctaaggtgatccacccgcctcggcctcccaaagtgctgggattacaggcgtgagccaccacaccctgccaagtatgtagaattttaaaatcacctccacaatccagtttcagaacattttcatttcccccagaagtcacttttgcccatttgtggtcagtccctgatcccaccctctgccccaggtaactactgatcagctttctttctgtttatttttatttttttgagacaggatctcgctctgtcactctggctggagtgccatgctgtgaactcggctcactgtggtcttgatctcctacgctcaatcgatcttctcatctcaccttccaagtagctggggctatagttgcgtgccaccgtggctggctratttttgtattttttgtagagatgggatatcatcttgttgcccaggcaagtctcaaactcctgggctcaagtgatccacctgcctcagcttcccaaagtgctgggactatagttgtgagccaccatgccttttctggaaatttcatataaattaaattatacaatatggggtcttttgtgtgtggcttttccacttgatgtaatgtttttgaggttcattcatgtagtaggttcattcagtagttcctttttattgctgagtagtatttcattatatggctataccacattttatcagtttagtagttgatggacatttagattatatcatcttttagctattttgaataatgcagttatgatcaattatggtaaatcttttggcagacatatattttcatttctcttgggtggatatctaggagtggaatggctgggttgtgtgttacatttatgtgtaattatttcatataaatgtaactggcaaactgttttccaaagcgattgtatgatgttagattcccaccagcaatgcatgaatgtttcattttctytacatccttgccaatacttggcattgtcagtctttttgatgataaccatcgaagcagttgtatagtgctatgtcattatggttttaatttgtgtttcctcatgactaatgatgttgagcatgtgcttattagctatttgtatatcttttttgctaaaatgactgtttacatcattttcccatttttaattgggttgttttattattgagttgtaggaattctttatacagcatgttctgaatacaaaagatttttcagatatgtgatttgcaaatactttctcctagtctgtggcttgtcttttcattttcctgatgatgtattttaaagagctaatctttttaattttgaaaaagtccaatttactactttttaaatagattgtacttttttttttccccccaagacaaggcctcattctgtcacccagtttggagtgcagtagcatgatcatggcttactgcagccttgacttccctgggctcagatgattctcccacctcagcctcctgagtagctgggagtacaggtgtgtgccaccatgcccagctaatttttctatttttcgtagagaaggggttttgccatgttgcccaggctggtcttgaactcctgggttcaatcaatctgcccacttctgcctcccaaagtgctgggactgcaagcatgagccactgcacttagccttagattctacttttggtggtataacaaagaaatctttgtgtaactcaaggtcacaaattttatctcctttgttttcgtctaatggttttatagtttaggttttgcatttagatttttgggcttggggtgaaaaaagtccccattttttcccttcatatggatatccacttatcccagcaccattagttgaaagaactatcctttcctcattgaattgctgtgatacctttgttgcaaatcagctgtctgcagatgtggaggtatgtttctagactttcttctgttccattgatcagcttgtctgtcttgatgccagtacagcactcccctgatttttgtagctttattgtaagtacagttatcccttggtttccttggggaattggttccaggaccctcatggatataaaaatcctgggatgctcgagtcccttatataaaatggcatagtattgcatataacctgtgcatatcctcctgtatacttaaatcatttctacattacttacacctaatataatgtaaatgctatgtaaatagttgttacactgtattttttatttgtattactttttattgttgtgttgttactattttttctttttttctttttttttttaaatatttttgatctgaggttggttgaatctgtggatgcagaacccatggatatgagggctgactgttggaattgggtagtataaatcctggatactatttttttttttttttcaaaattattttgggtatccaagtcctttgaatttccacatagattttaggataagcttgtcaatgtytacagaaaaagcttgctaggattttgatagggatttcattgaatctgtaggtcaattcgggagaattcccatcttaatgatactgagacttctgatacatgaacatggaacttctctccatttatttarattttctctagctgctctttagcagtattttgtactttacactgtataggctattgtaaatgaaattgttttcttgattttactttcarattgtttattgctagcataaacaattgtaaaaatacaattttttaaaattgtggtaaagtttactaacaataaactttttttttttttttttttggagacatagtctcacttcctcacccaggctggagtgcagtggcgcgatcttggctcactgcagcctcaacctcctgggctcaggtgatcctcctactgcagcccccggagtagctgggactacaggcaggcaccactgtgcctggctaatattcatattttttgtagagacaagatcttgccatgttgtccaggctagtgtcgaactcctagactcaagcaaccctcctgtcctggcctcccaaagtgctgggattacagacatgagctgctgcacccagcccattttaaccattttaaagtgtacaattcattggcattaagtacattcacaatattaccattaccactatctatacccaaaactttttcattgcctctaacaaaaactatgtattaaacattatcttctttttttttttgagacggagtcttgctctgtcgcccaggccggactgcggactgcagtggcgcaatctcggctcactgcaagctccgcttcccgggttcacgccattctcctgcctcagcctcccgagtagctgggactacaggcgcccgccaccgcgcccggctaattttttgtatttttagtagagacggggtttcaccttgttagccaggatggtctcgatctcctgacctcatgatccacccgcctcggcctcccaaagtgctgggattacaggcgtgagccaccgtgcctggcctaaacattgtcttcttttccccggtcccccagcccttggaaacctctattctattttctgtctctatgaatttgcctattctgggtaccttttctttttcctttggtgtctggcttattttacttggtataatgttttcaaggtcccttcatattgtagcctgtattagaatttcattctttttaaggccgagtaatattctgttgtttatccattcatctgttgatggatattatggatatttgggttgtctctatattcttttggctattgtgaataatgctgttattggggtacaaggctggacgcagtggcccacaccactcccaacttctgggaggccagtgtgggagtattgcttgaggccagaggttgagactagcctgggcaacttagcaagaatccatctcttccaaaaaaaaaagttagctgggcatggtggtgtgcaattgtagtcctagttacctgggaggctgagttcgaggccacrgtcagctattattgcaccactgcactccagctgggatgacagagtgagaccctgtctcaaaaacaaacaaaccaaaaagttggtatgcaaatatctgttttgagctcctgctttcaattcttttggatatatacctaagagtggaattgcttgattacagttgattattgtgttgatcttgtattctgcaattttaataaacttgtgtatttagttttttgaagattctttaggattttctttgtacaggatcatgttatctacaaatgaccattttacttcttcttgtccaatgtatgtgcctttaatttcttttcttttcatattacactgtctagaacctccagtacaatgttgaatagaagtggcaacagtggacatgtttgccttgtttccgattttagaggaaaagtattcagtctttcatcattaagtgtaatgttcactgatagttggtagggcagatttctcctaatatatcctttataatgtcttagttttggctgactaagggactgaataaattggcatgtgttagtgaatatcacctcttgacatttatatgtctcttagctaagctataagattaaaaatccctttcttccttgtagaatggagcaacccttatgataccctgtaagtttctactttgagtccttcagtttttgaattagtcaaattactcatctaaatttgcagttcatggtctgcttgtccatattaaagtctagggtgtctagattgtgaccaaaaccgrtgaagcctttgtgttttctgatgctgttttaaagcttattataattttcccttctatggggaaagattctgtgctgttttctcttaaagtgaaatgtatgttgttgtgtgtttttaaatagatgtagtttattttacagtccaaacctgttgtttcatctattcccataagatccacaggcagcatccttctccatttggatggggacagtgaggtttatataccttgattggtaagcctgtgtctgatgttttaagtgccttatcccttaaattgtaaactctacaggacttagaccatgtgtgtcttgttcactgtattgttaacagctggcagatagtaaagattttttttttttttttttttttaaataagagtgattaaatcagtttgttttgtgatgcttgtgtgaagagaagtgattagtgtaaactggctttgctttagggttttcattctctaaattcttgaagcattctagagtaggaattgttgtctatttagtttaaacaggatttttttccagtttcttcttagtaattaagctattactaggtttattattctcttacatgtgtgcatttaaaaaatttgaaacacatctcgcctcctttacagtttggtaaaggctgccttggcgtcccaaagtggtgagattacaggtgtgcgccactgtgcctggccagctgaagtttttgattcccagccttattctctgtctttgcacctcagtgatgctccagtaagcatcatctgtttttctcaaactgcttgatataatggtaactcatatagtttgataatgaggatatctaaaaatgattatttccagttcaaatacgtycattaatctgcatgcttaatcctaatttttttcttgtcacactgccttctgagttattatagtggcttatacattttatggtttctagaatctttttgagtgagaatcattgagaatatttgtgtttttaatctcttctgtttatctcttctgttgatgtgctttttgttaattatttggctggcttttagtggatcttgcacaatttaatgctggcacatgataagttcataataaatgtttctgattatcgagctgagccccagtcatgaaccattgatttctaacatactctctccctttagcaacctggttacctctgcccttaaatgaacataacccctgatgccatgacatacatggagacttcagtattaatttttcagttcttgtatgtaacactcttaggtagagtctctgtcagatggcactgataattaatcctttggaaagatcccaagggctttcaggctctctggctagatgttaacaacaggaacagtgagtagtatatagcaacatgatacttgacagttttaaagcaacactggttttatttaagatcatcgggttaaaccagctaatactcctttggcttaaaacctacttgtagtttttactgtttggtattctcttctcagaattgttctttatatatgtagcagaggctgcacgtgatggctcacctctgtaatcccagcactttgggagggtgatgcaggaggattgcttgagcacaggagtttgmgaccagcctaagcaacatagtgagaccctacytttccaaaaaattaaaatattgtctgggggtggtggcacatgcctgtaatcccagccacttgggaagttgaggtgggaggatcacttgagcaaaggagtttgaggctgcagtgagctatgatcgtgccactgcactccagcctgggtgacaaagcaagaccttgtctctgattgattgatagctaggtaggtaggtaggtagatagatgattgattgattgattgattgatagataaatagatagcagagatcatgacaagtctgtgtcccacttgaagattagaagactcagcaggtgggctcttggcttaaaaagaaggcaaaggtagccgggcacggtggctcatgcctgtaatcccagcgctttgggaggctgaggtgggcggatcatgaggtcaggagttcaagaccagcctggccaagatggtgaaaccctgtctctactaaaaatacaaaaaattagccaggtgtggtggcgggcgcctgtaatccaagctactggggaggctgaggcagagaattgcgtgaacccaggaggtggaggttgcagtgagccgagattgtaccactgcactccagcctggccgacagagcaagactctgtttcaaaaaaaaaaagaaggcaaaggtgataggtgttttgggactcacagtcagactcatgaaggctttgtcccaatcttgagaagaagaagggacccttaggaagattgggaccttgccaagacgtagcatgtagcagagtatcgaagaatactctttttagagcacttacaaatatgaattaattcttacggtagcactgtgataagcaattgtagtttactaatggcaagaccaaataaagtgaaattcaattaatgtttgttaaatgacgtygagcactatacttagtgcttgtccaaggcttcagagctgtaaatgcaaatggcaaacactgtattttgctaagacagcacctcagtttctctgtctgtaaatataatcccagagttataaggttgtaattaagaaattattttttatttttgagacaggatctcactctgttgccctggttggggtgcagtggwtcagacacagctcactacagcttcgaccttctgggcccaagtgattcttctgcctcagccttccaaagtgctgggattacaggcataagctgctctacctggtcaaaaaatattcttcttgaatatttagagattagaatgcaaatgtttcaaaatatacttgtttaggttttcatgtttcatgcattttcaaaggagtaaaaataattacagaaaagagaaacaaatgtagtttatarttatatcttttctgcttaactattatgatttagttaatcaaacacaaggtaaaaagctgaacttgaattcttgttctgtagtactttaaccaagtgtttatttcacaaaatcaaaatatgagcacttggtttaagtattacagaataagaattcaagttcagttttttacctgtctttgagatgttagtataacatctaaatgaagatgtcttgcagatagttagaactggattcatagtggaagtggggaagaaaggatcaagaaatagctttggaaggtatcagaaaggtcccaatcataatggtagctatactttgattgatatggaggacaaagatggctaattagagtaccttaggtacaaagcaccattaatggacagaaagaagaaaaggtattagcaaaattacattattatcctacaacaacataattttacctttgtgtaactgcttatacctttcaaaccagtaatatccattatcttacttgatactgaaatagtttgaaataaagcaggtgacttcttagtacaacatgttaattttagagaaactagctagtactgttttttctagaaactctgattatattataaagacaaaacctagatactttacattgaattattttgtacttgattggtacattgttaatatttttcaaagaaatagcaattttgttgaactagagccaggtctcaattttctctctggctttctttgtggcaccatactcctgtaaaaccatcaatgctcattaagctrtggatcactttggcttttcttaacctggctaaagcagtgttatccacaagtttcatttcagagaagatagaactttgtaaataacctgaaggcacctttatagctacctttctattgtctctgagggtaggtcacaggctgtgatggggaagaagaaaagcgttctgaggtttgagaaaaagtggtgagaatttgaatagttttttgtggagtgtgagcaactgaattaatcagaaatgtggtaggatttctgaattaattagaaagtaaagaattaaattttctaatagtagctacattaaaagtaaaaagggccgggcgtggtggctcccagcactttgggaggccaaggcgggaggatcatgaagtcaggagttcgagactagccttaccaacatggtgaacccccgtctctactaaaaatacaaaaattagccgggcatggtggcacgtgcctataataccagctactcgggaggctgaggcaggagaatcgcttgaacctgggaggtggaggttgcagtgagccgagatcacgccattgcactccagcctgggtggcagagcgagagtctgtctcaaaaaaagaaaaaaaagtaaaaagaaacaagtgaaattgattttaatatcttatacttaacccagtaaattaaaaagttattattttaacatatcaatataaaaattaagatatctttttaattttgtacttgagtctttgaaatctggtgtatattgtgtgttgacagtatatctgaatttgactagccacatttcaagagttcaacagtcatatgtggttagtaactatctattggacagtgtgggtcgaaagtaattaaaaataaattttgaactgcatagacacgtcatctatttacatgaatgtgtgtgtgtgtgtatgtgcgtgtgtgcgtgcgcacgcgcatgtttagcaattcttagggttaagacaattcatttgataggcctgggttgatgaactcaacggaagttgatgtgaataaaaatgaaaatgagggcttggcgcggtggtccacgcctgtaatcccagcactttgggaggccgaggttgggagttcaagaccagcctgccaacatggtgaaaccctgtctctactaaaaaaaatacaaaaattagctgggcctcgtgggaggcacctgtaatcccagctacttgggaggctgaagcagaattgcttgggcctggaaagcggaggttgcaatgagctgagattgcaccattacactccagcttgggtgacagagcaagactgtgtctcaaaaaacaaaaaaaaaaagaaagtgagattgagttcaaagggaagtcattgcaaggaggcagtgccagtactaaacttaatacctccgtcctgtgtagacacatccactttgttgaatggaaagctggcctcttactacccttcaactactttattttttctgatgacttgtaataaataccgtctacctggaagtcagtgtgttacaattagaatgtgaggattagaagaaactaatataggtaggactaggaaaaaataataggttagagtgataaagtaaaaattttaagaatacatgcaatagtataaaaatcaaaagatataaaaagattatgtatcaaatataaagctcttatcctctagccatctgattcccttccttgagagtaactagaatagtttcttatgtcttatttatcttttaggagtagcctatgcatttacaagtgtatacatacttttttgtctttccttgaataaaccaataaaatacttatatccttttgaaaatatacaaaaggtagcagcatacaatacacaccatttaccattttacatcttgcttcccgccccccaccccccaccccccccccgccttaatctwtcttgtagctgctttgttgtttttaaagtctatataatatttcattgtatggatgtaccataatttatgtaaccagttttttattgttggttatttaaattgttttcaatattttgcccttacaatcaatactgtaatgaatatctttgggtatatctgttgaacacctatgtgaattatgtggaataaattctcataagtagaatttcttgttcaaaaggttttttttttaattgtataaatattgccaaatgcaatagaggtttttaccagttaacacttccaactaataatgtgtgaataaactttttcttaaataaaactgattctacaaaccgagtcttaggagaaaataaaatttataaataataaaatttttattgtgctgttgaattgaagaggcatagataacccccttttgtcttgacatgatccttttgagcaacctcagaggagcccctagagttgcagaggcatagactgaaaacaccgataaccagctccctttattttatctatgaagaagagagctctgaagggatgaagctgttcctccaagaccacccaaaaaacagaaaaacatgaactatagaaccctcagataggaataggaatggcttggaaatgtatgcagaagtgttttgtgtaacaggtaaaccccaattaattactttttgagaatcaaacctttttaaaataacatttgctgtttgattttgttttagtaagcttcatggttagtggagccttggcagcctaagggatccttggagtggaaaagggaacttggtggtcagagacaagggaggaagtcctaccttcatatttctgacatggtgacaactgatatgaagagcaaaaggggcaaagactagcagaagagaatgaggggtggaggggcaaaarggtctcaagtacctacccagtgccyggtgcatggtggctgctcagtaatggtagttccttactggtggaagtatggactggtctgaccattttgaaggatggtacttaatcagattatgcattatgtataccttgtaacccagcaacttttttcctgtatatatacgtgaaagaagttctcacacaggttyataaggggtcattcatttcagtgtatttgttcttgtggaaagtaatttgttgtccataccctttccccagtgatgggtaaaatgtgatcatagatttatacctcagtttgaagtaatggtctagatgtgcacatggcagcctaaggatcttagagacatagtgctgagtaacaacagaaagaaaaggaatgagatatgtaacacaatagcatttatatacattttaaaatgtatgtaagtaaaacattacatactttacaagaaaacatgttaacacattaaacacattatagtgattgcctgtgttgtggatgataggagtggaataaaagaataagcaaataagagtaaaaatacacaaatgtaaaacttcatttctgtatggaggtgatctttaaagcatctgttggataattaggaggacacctacagatcagtacccctgtgtctcccattctcccattgtggttacctttgggagtaaaatttctggtaacgaattaccattggaatattttttgttgttaatttaactgaaagtaaatcagattcacagttctcaatttttttttttttttgcctttaaaaggaaaaaaaaaaagaatcccccatccttcactttttctgttactgtgtattctgttggattgttgcttaaatacaaaatactaaccttatgcctaatttaggtactacgtgtataccaggactacatgatatccttcttagaagataatacttagtgacattaataattcattgggagacttctccatgttcttttagataattgccttttctgattaaagcttggaatgccaatagttggaataaagcagtcacttctttgatctgttacccattataaaatttatgttatttatcttgctttttttttttttttttacaagaatctctgcttatagcagataaaaatactgactgacttccagagagttccctgagataccaggtaagatcttggatagaatggagtgtaggaaacaaacagttcctatcgtaagcaatttttgttgctagaacaaaatccttttgtaggtcatgaacttttgagtagcctgagttttgagttagcctcaattaaggtttttggttgttttaccacccaggctccagattagcaactggagacaggagctgtgatggaattaaagtaaccgtggcaaccattataatgtaaatgagccttcttgggcaggaagttgagagcgtgagcacttgttagggcattcctttattacatctacaactagagctgagtagcattttgctattttaaaatcctgctccttggacaccatcaagtcctgtgttattccaaccttcttttagttttctgagaaactaacaccaaactaatatgtatataaaataggaaatgaatctctggtgtgcctccttcattcacattaagacctcttcttcctttaataacattacctttttcccactgcttctggcaataacactcagcaccaagtctctgataaacaaagaaggccacttaggttttgagagatgtggtgtgtacctagtatactctgatggccaagatttggcttatggtggaacaagtggtgccagggccccttcttaagcagcacaggagcgacaaatctttggtctcaaatcttaattttttatattagtctttaaaattttaaattattttaaaatttttttcaataagtcttttgtactcctaacctttgaatttcaagtcataagattgtaagttttagagtattaatgtaggcttactctttgtggatttagagattagatgactggaggagaataataaaagtgaaactgaagtaattaccaaatgaggttgagttctaagttaagtactgtacttgtttactaccccacaatgagtccagtgattttaacaacaaggcttgtaagcgagaagcttaaggttcctattcaaggttaactattgttatgatgttggtgctaggaaaataacttccctcaacctcagtttttctctttgtaaaggaagagtgaaaacgacgactcactctgttgtggggaaatacttacaaaaggaaataaaatttaactagtagtatggtcaagaatgtcagctgaggttggccaggcgaggtagctcacatctgtaattccagtgctttgggaggttgaagcaggcagatcatctgaggtcaggagttcgagaccagcctggccaacatggtgaaaccctgtctttgctaaaaatacaaaactagctggkcatggtggcatgtgcctgtaatcccagctacttgggagactgaggcaggagaatcgcttgaacccaggaggcgaaggttgcagtgagccgagatcatgcctttgccctccagcctgggcaacgtgagtgaaactccatctcaaaaaaaaaaaaaaaaagctgatataagacaaattctgatttttaaggtaatgtgccttagttwtgcctgcttagcttgtgccagttaaggctttttactttgattttaagtttccttcctcctacttcatccttttgttgagttgtcattcagatcacaacagatactcttgtataactgtctttgttggcttagtcttcaacaggtggattgatcttggacttcaaatatttgagcatttactatatgcaaagcttggaactgggtgcatagggaataaatataaaatgtatacaagtgtgattcctgcccttcaatatacaatcattcaaatacttgtagacagttctgctcttacttttcctaccccagatagtctcttctccatggaaatcattcctgcttctcttaatcattcttcatatgatgtagtcggccaggccattactaccatcctggctatcagcatcacttgtaagaggtcatgtttcaaattataattctcagggtgttgcttgacmtgtttcatatttcaaattataattctcagggtgttgcttgacctgtttcaattttcttccttgttcaggtcactgtactgttattttattacctatgaatttgtattaacttttaagctgtcaattcagtacaaaggcccaccttgagcttacagtcaactgaactctcatcaacacatgttaaaattggtttcaattttttttttttgagacggagtcttgccctgtcacccaggctggagtgcagtggcacgatctctgctcactgcaacctccgcctcctgggttcaagtgattctcctgcctcagcctcccgagtagctgggattacaggcgtacgccaccaccctcggctaattttttgtatctttagtagagacagtgtttcaccatgttgggcaggctggtctcgaactcctgaccttaagtgatctgcccatctcggcctcccaaagtgctgggattacaggcgtgagccaccgtacctggcctgaaatggatttcttattcgctgtatacttctaaaaaataaatgcatgtatatttacccttgataaattttattttgtattttcagcacgttgtttctatatgttcagatatttgatcttttataatctttaatgatatctcttatatctttaatggtattatttaatctttatagataggtttagatcaccagaaaatttataagctaccatttaaatcttcacaatattgataaacatctactaagataaggccaaatagagagttctgtggcaactgttagttacttctttccagatttacattaaacaattgattaataatcttagaatcgttgttcaaccaattgtaaatctatcacttaactagcataagaaagttaatcttgatttcagcaatatgtattggacctactttatgttatttctctgatctcttagtctaatacttttgtcaaaagtaaaatgaggttagcatgattgtttttcttggtgaaccccattctgactcactgtgttctctgtaccccttccctaccccaccgtaggctaacataggaaatctttgttaaacccttaatctatgatttcaataatctagtctctttttttcctttgaaattgagaaaattaaaattgcactttattgtttctagtcttctagcttctcttccatttttcatgagagatcatggagatcttaggctgtaatttatctggttctagatatttgcatttactaaaagctactgggtgctcttttattatcttttctcctatttcaggcttcagtttcctcttaaccatttgcattctcttttcagtatggaaagttactctggataaagaaaatgcaagcaaaataagagttgaataggtttgattttctgtattattttttaacatggtagaagggcctgtctcatatttttgcatataacatcactgaaaaaagactatatgtttgcacttttcataagcttatattgatattctattatgtgccaggcactgcattagattcttgggctccaaatataaataagatatggtctctgttctcaaggaggtcacaatataattggagagatacgtatttatataaatatttactgtatagcaagagccgctggccaggatcagaaaacatactttgagggttagaaaaataagacagggatttatgctgaataaggtggcgaaatgtacattttcaataagctataggaggagtcatgaatatttatgaaaggagaaacatgtacatgcacagttgagcttcttacccctttatgggttgcatgtacagagaaaaggcagtattagcatgatccaagggtggagtttttgagcctctggcctcaaaaggtgaagcagaggacatgaaaagcctcactgcgcatcctctgtagactggccagaaccactccgtggttggtggtctcctattargaaggaatgctggttggtggttgtgaggaaaccacaagagggaggggcaatgtcaggaggttggtttatattagcagtggagcaagtaaaaaggctggtttctgtttaacccttaggaaagaagcctaatgctgggcagcaagggatgggtataatgaggtgtgtctgacctttcacttggtcatggctgggaactcagatttcaggrcttctctggggtctccttggccaagagatggtcacttcagtcagttggggggcttagaattttatttctcaggaggaacaacattcctttttatgaagaatagcatataataagctgacatgaaaatggagggtaaaggctacctgatgtgtttagaaatcttaaaataatccaggatggttggaatacggaataggagtcccaagaaatgaggctggaggtgggaccataaaagaaagggccttatattctttgctagaatttggactccaggaggcacaggagtatcaccgaagggttttaagctggggatgtgatcaaaaccaagcctgtctagtcagtccttccttatgacatactatataattaagtttagtctgttatgttgtggtwacaaacagtccccatattttagtggcttacaataacaaggatttattttttgctcatactgcatgtccattgtgtagctttgttccaagacttaggctagatgctcatatctgagacattttctcttgtattagagataaataaggcatggtagaaccacaccatttctctgaaagtttctgttcagaagtgggatgtgtcatttcctcttacttcccagcgtcattggctaaagcaagtcatgtggccaaacttgatatcaactggaccagttgtctaattctccaccaggaaggagcagtgatttttgaataataatggcatctatttacatgtatcaaattttatttctttgctttccgggattacctgggagcatctggtgactgtgttcccagtgacttgaagtagcttgagggaataaagctagttgtaggcagagaaacgagagacaagaaaatgtcctggcagctttaatttgtttctcttctccctgaggctgtcctggttcctgaaattttcctttgtgtctgtaagctaataggagagtgtcatgatcagatgtgcattttagcaagattacttcagatgcaatatggagaatggggagaatgcattcgagtaaaagcaggaagaacagttagtgccttgtgtagaaagaatttttagtaatctgtttcagatatagaaggacaaactaagggcctggcaatagaaatgtgggattcttttagagttacctctgagtcctggctattgtggggagaaataaaagagaaggaagagagttatgtccaggtaaggcatttgagtagatggtggtgccattcaccaacataaggggtaaaacaggtcagaggagaagatattttattttattttattttttatttttttgagacggagtcatgctctgtcgcctaggctggagtgcagtggcgccatctcggctcactgcaagctccacctcctggcttcacgccattctcctgcttcagcctcctaagtagctgggactacaggcacccgccaccatgcccggctaattttttgtatttttagtagagacggggtttcaccttgttagccaggatggtctcaatctcctgacctcgtgatccacccgcctcagcctcccaaagtgcgggattacaggcgtgagccactgcgcccggccagtagaagatattttagacattgagtttgaggtgtctgtggaacatctaagtggagatgactagtaggcaaattggataaaccggtatcgagctcacgggatgtaaagagtgttattaaaatgatggttcatggaatgtaagggtaagaaatcatggataagaaggaaaggaaraaaggagatgaccgagagattgaagtaaaagaattagtgagctaaagtctgtgaaattatagtagagaaaattaaacaagcaagctaaaaagaagtcagagaacaggatacccaaattagccattatggagatggaacagtttctagtggtgataaggtctggagtaaccttggttgtgcttagctgarttagaatggagcagaacgtcattgaagatgacatcaaggaactcgaaggctaaggtctttatgggccacccacgtggattgttgcttgttcagtgtgacagagactcctagttgtttactcagtatccagtttctacttcttccttactagcagaacgctaggcaatatgcattggaaaaactatacatagaattaaattcaactgcatataacagtaacccccaataacaatgccttatattgtatatgagtttatttttattaaaaaatcagcttygtttcacattttttacagaatttatggtatttattagattctaacttgagtaagttatatacatgatttattaaatctggtcaattgtaatccagaatgtatgtactgtgttttatttataaagaaatatagagagaaacatttacaagattggtgtgatggctcctccacagggattagagacccagactcctgtcatttttctctccattgttcttagtatgctgcttccatcattagggatgctttcatggcttaagatgactgctggagctcagggcattatttcagcattatatgaagcaagaaggaggaaggggaaaaaggcaaaaagggcatcccagaagccccacccaacaacttccgcttccatttcatctgataaactcaggttgatggtgggatttaggatgactagaatctgagagaggaatttgataggtggcagtaactagggaaagagatgagggagttgaatggcatgaccttaaaggggctgctttattataagagagtgaagtagtattctggcagagtgtggcaagtgcacaggttctgagggggtgtgtgtgggtgaaggaagtttatcagacatttttcaggaattagcaaggaggcacgtgcagctggagtagagtaagtaagggggagagttgtggagattaaggctggcaggtaatgagccagtgtcatgtatggtgttaataggtcatattcaggattatgctttaacttttgctttaaatgagatagaaaaccattggaaagttttgagcaaagaatgacaggatcatatttaagttttgaaaagatcgctctggctgtagggttgagaatagactgaaggggtcaggagaccagttaggaggttactgcaataactagagaagagacgatagtagtttggagcagataatagcggtgacgatgagagaagtggccagattctgcatatatagtagagcaaaaaagatatgctaatgtatttgatgagtgtttgaaagagaaaagttttggatgacttcaaagtctttgtccagaacaactgtaagtataaaaacaatagggagaagttgtccaaaatgaggataattgtattgctacagtgaccttctgtaggtgtaatcagtgtcttcctgttttagtatattcctgtttcttgtctccttttcttttttctcagtgcacatttaactagttttcaatacattcgctattttgctcagccaacaaatgactgttaacaattacaaagttgtttcagcctttatcggttaggcttctttggttgcaaaacaaaccaaaattgactttgttcaattgacttaagcaaaaaaggtagtggatgagaaggagggaggggaaaggataatagaggtaagtcacagaataaggaaatgctaaagaattacaccttggggctgggcgtggtggctcacgcctgtaatcccagttactctggaggctgagtcaggagaatggcttgaacccaggaggcagagaggttgcagtgagccgagatctcacaattgcactccatcctgggcaacaagagtgaaactccgtcccccgccaaaaaaaaaaaattacaccttgggagaaccctgaactaaagtatctcactgagatctagatagcataatggacataatggtttttatcagggtaacgtcttctggacaaatcactcatataattgagtatctaatttaataatggtactgagctagatactgagggcggggaataggaggggcaatccaaagctgaataaaatatattacatacctttggaggattataatagagtagaattaatgaatcatgtctatcacttattcaaattagaatgtaataaataccataaatgctacaaaagatattaaacaaagatgattagatgattttgtatgactaaccatagcaatattttaacattttagatacaaatagattttaaaggaaagatagacataagaaaatgtcagataaattttttttttttgcccactaaacgcaaaatatttatgttgtggagacatagtaaattatgatacattcatagagcataatactaagcagccatcagaaatgatgttgcacaagtatgcctaatragaaggggaaatgatcattttgttttaagtgaaaacaaaaaaagattatgaaatcacacaaatagaaaatctgaaatttaacatgagtggggtgtgtggtgtatgtatgagagagagtagtacaccctccaagttattgagttcactcaaggggtgtgtgtgtgtgtatgtgtgtgtrtgtgtgtgtgtgtgtgtgtgtgtgtacaccctccaacttattgagttcaatcaagccttattaggtatttttttttgagacagagtttcactcttgtcgcccaggctggagtgcagtggcgtgatctcatctcactgcaaactccacctcccaggttcaagygagtctcctgcctcagcctccctagtagctgggattgtaggtgcctgccaccatgcctggctaatttttgtatttttagtagagacagggtttctccatgttgtccaagctggtctcgaactcctgacctcaagtcatctgcccaccttggcctccaaaggtgctgggattagaagcatgagccactgcgcccctccccaagccttattagatttgaatgttagcatcaatagtatattgaaggtggaggtgaggctagtattgaaagtgaagagagaataatcaggctattgtaattatctaagtaagagaggataaggacctgaccctaagataggaagtagaaaagagggaatcttgtgggagagatggtaagatgatggaattgatagaatttggtgactgacttctgtatgtgtgtgggagtggatgctctgtgtgataacagagagatgagtttctagtcttatatgattgggtaaatggtcatactcctatttatttaaaagtacctataacatgggagtagaaagctctgaaaatgtggcatatgatctgttttaagaaaaaagaggatgaggggaaatagagagagaggaaagtgaggaatttcttttgacgactttttggacaaacttgctattttagttcactccctttttactcctagttctactaggagtaaacgtagtagtttaaactagtaattagtaatttagtaaatttaaactaataatttccaagtcagaattttaacagtcatgactgatttttaagcctctatgttatcttgaggatcttgtttttaccagctataccttaaagaagctcagctttgaaagggctttgtgacataaccaggttttggaaagatcaaggtatgaaaatgctgtaactttgaaggcagcattagggagtttgcttgtgctttctttttttgtttttgtttttgttttttgagacggagtcttactctgttgcccaggctggagtgcagtggcatgatctcagctcaccacaacctscatctcccggattcaagtgattctcctgcctcagcctcctgagtagctgggactacaggcacgggccaccatacccggctaatttttgtatttttatagtagagatgaggtttcactatgtaggccaggccagtctaaggccagatcctgaccttaggatccacccgcttcggcctcccaaagtgttgggattataggcgtgagccactgcacctggccgcttgtgctttcttgggaacgacattaatgctgtggttgaatctttcctttgtttaaacaaaccaaaagtaagatttgaaggctgcctggtgggctgaatttctcttttggtagaatgttttagctttttgaaaataagtagacctctttactttttaaaagtaactttattgagatataatttcatactgcgaagttcactcatttaaagcatacaattcagtgagtgattttttttcatatttacagagtgtataaccattactgtaatttaattttggaacattttcatcatcccagaaagaaaccttgtagtaatcattccctaggcaaccacgaatctattttctgtctctggacgtttcatataatttgcctattctggacatttcatataaatgggatcataaccatatgtgtagaccttttggctttcaaagtttcttttttttcttttctttttttcctaartgattcctgtttttttttttttcacttactctgttgcccagtctgaagtgtggtgtggcacgatgatggcccagtgcagcctcaacctcccaggctcaagccatcctcccacatcagcctactgagtcctactgggaccaccatggtgtgcaccaccatgcctaattttttttttttttgagacagagtcttgctctattggccaggttggagtgcagtggcacaatttcagctcactgcaacctccgcctcctgggttcaggtgattctcctgcctcaccctcctgggtagctgggattacaggcacgcattaccatgcctggctaattttttttttattttgagtagagatggggtttcaccatgctaaccaggctggtcttgaactcctgagctcgtgattcacccacctcaacctctcaaagtgttgggattataggcgggagccactgtgcyggttttgttttgttttgttttgttttttaatagagatgggggtctcactatgttgcctaggcttgtcttgaactcctcggctcaagcagccctcctgcctaagcctctcaaagtgtagccaccatatccggccctaaatgagttctttttgtattccgtaatttttagagttcaccttaaattttacagtgtctatagattgataaatttgcttgatacttaattcatgcttatatccttatcactaaatgcataatatatgtcaaataaattatttgtaatggattttttatggacatyaaaatatattctttattgatattgttccagtgtctgactttcatttataatttcatattaccatttttgctcctatctactactcactttctagctaaagtgtttatacttacagtgatggaaagtttttgacttgggccttccttattcctgcgtattatttaattttacagtgtttggtagaagcaaggtcaaaagtttactgaaaagaaaatgaagcccattaggagactattaggtatatcttaatatttcctttctcagttcctttagatccttcctcattgtattatctgggtcacactggttgagggattctaccttcctaatgtaacgtcagttgtgtttagaactgccttgacatacgtacctgcttgattggcgtcctcttctattagtcaccagagtacagagatactcagttccaatgataaaaatagtatacattccctttagttagaatcttcttagtgcaaataaccttggacctatgggtcctgtccatgataaaaggcagaacatttttcacttttttctttgagtttctcttcctgtgacttccccctccttgttatatgttttacatttgacaaagggggaaagaacactcaagattcctagtcatatgccagataaatatataatagacattattttaaatctatagctgagcttgtgaaaaagtaaggaaaatccttaggggcaaaaaaatgatgagggcattgaaaatcagtgttaagtacataagctaaagttacggctgctctggatgactaagagacttagttttaacaaccacatgggaataagagacttttttactcccytgcagaaagctaagttcctcaaagggtttccacattattgaaaagatgatctagaaaaaacatttgccccatggcatagagaaatgtcaaggaagtttgtccactccgtgtgggctttaggtgagaaaggtttctctgagaatttgttacctggggttgtcttcacataggttcagtttagaatgttcctctttttctgcagtccaggaaacccaaagccaagaaattaacatataaagtagtcttgaatctgcaacagtcctacggcatcaggctgaagcaagtgcaaaacttctctatagggatatcctcaatctaggccacaccaaatctcacagctaaaggtgctctaaaaaaaaaaagttttggccgggcgtggtggctcatgcctgtaatcccagcactttgggaggccgaggcgggcggatcacgaggtcaggagatgagaccatcctggctaacacggtgaaatcccgtttctactaaaaatacaaaaaattagctgggcgtggtggcaggcgcctgtagtcccagctattcgggaggctaaggcagaagaatggcgtgaacccgagaggtggagcttgcagtgagccgagatggtgccactgcaatccagcctgggcaacagaacgagactgtctccaaaaaaaaaaaaaaaaaaagagttttaaaatagaccttcaaaaaatatagtcactgaaacttaaaatttggtggacaatatcaatggtagaatggatacattatggtatattcatagaacrgaatactattaagcaatggaaatgaataaattgctgctatgcataagatcatggctgaataacaataatgttgaaggaaggaagccagatgtaaaataatatatactatgttattttatttatataaagctaaaaacccgggtgcgggtaacattggatttttgtcctgggtgatagttacrtggctgtttcactctgttataattcattgaatttataatttgtatacttcctccatttaatagaaagcagataaggaaaatgtaataaatgtcatagaaaagataggataaatagaaagcataataaaagatggtagagataaatccaaatgcatcagtaatcatactgaacataaatgaattacacttattgaaacaaagacagattgttgtagcrtgttttcaagatggctgatgttagttccttccctccacatgtgcaccacccccatctagtggtggagtttattcctctgttcataccaaatctgggctggccttagtgacttgtttggtgaaatgtggcagagataacattctgggactttcaaggccaggtcatgaaaagttttgcagcttccatctaggcctatttgaacattctcttttggattgctgtgctatggaacatttagtcttggaacctagctgccatgctgtgaggagtccaagccagatggagaggctcagctgagctcctagccaacagctagcatcacttttcagctacgtgagttccagttccagtgggcatcatatggagaaaagcccaggccctaggcatatggctcccagtctagttatcctcaatcaatggagccaccttacctgaggccccagatgttatagagcagacacgagctgttcctgctatacyctgtctgaatcagaattgtgagtataataaaatggttgtagttttatgccactaagctttagggtagtttgtagtgatagataactgaaaccaaatttggtaccttgaaataaggtgctgccaaaacctacaatttgcattggctttggaatttggtgagggttaaagatggagggaccttgagaagacagtgaaggcttgaaacacagagagaaaagtgttattggaggctgggaaaagagtgaacctttgttatatagtgattcaaggtttattggtactgccacatgtggttacatagaccatagaaaatgtatctaatgacttcagtgtatctaaggagatttctaggcagaatgttgaaaaaatgttacctagttttttctaagtatgataaggtacaaattgataaatgaactaaaaaatgaactactaagttttaaaacagaacttagaggaaatatttctaacccaggaatggttgtgttattatagaaaataaaactttttytcatctctagttgcttcaaatggccaatgacttttattttwttattattattattattttgagatagtttttctgtcacttaggctggagtgcagtggtgctcactgcaacctctgcctcccgggatcaagtgattctcctgcctcaacctcctgagtagctgggattacaggtgcccgccatgatgcccagctgtttttttgtatttttggtagagacagggtttcaccatatcagccaggctggtctcaaactcctgagctcaagtgatccatccgccttagcctcccaaagtgctgggattataggcatgagccactgcgcctagcctgaccaatgacttctaaataaatggcttcagaggaaagataaaattcaagatgctaccaataaaatatggcctcaaagtaaagatctcagtgatgcaactgtaaatccctttgctaagacttttttttttttttttttttttttgagacggagtttcgctcttgttgcccaggctggagtgcaatggcatgatcttggctcaccgcaacctctgcctccctggttcaagcaattctcctgcctcaacctccctagtatctgggattacaggcatgcatcaccacgcctggctaattttgtatttttagtagagacgaggtttctccatgatggtcaggctcgtctcgaactcccgacctcaggtgatccgcccacctcggcctcccaaagtgctgggattataggcatgagccactgcgcctggccgacttcagaaagatttaagacaatgcctcacaaaacctttcaattagataaagggatatctagaggtcttaagggaatacttcttaggcttactatgttaaacaatagggcttctagggatcttaagtgtgttttctcacagtagcctcacataagacttgygatagaaaaggtggatgtggcttttgtctgctggagtgaatcccaataagattcataggaaatccacaagattttaaagaaatcataataataaaagaggaacagagacagtagaaagtgaaaataggcctttagatttccaatcatctataggcaggaaacaagcttataaggccactccattgcaaaaattaacccatctcttatgtaaaaagaaggttaattcagaaacttagagggtggagccaagggttgtggagagtcattctcaaggtgtaggacttggctgtaatagaggaactggtgatatgtgtctgattagatttcagaattgttttgggccagtaactgttatgtgtctcctgttccttctccctttttcctcacattttgaatgagagtgtctattgtgcttatcttaagtcagtctcactattgtatgtttgtatgttgggtgtgtgggagcagataatttgtttctttaattcagatcaggaggaactatactgcagtagctgtacctgaggaactgcatctgaggagcctcaaccacatctggacctgatttagatatcgagattctggacatcaagctgatgccataatgaaatgagacttttgaaggtcttagaagagggtgagtgtattttgcatgtgggagggccttgttggggccagagggtggtctgtggtagcttgtatccaaagtggccgccaccaatttcttcccttcttgctattcagtggtggagtctatttcccttgtccccttgaatctgggctggctttagtgacttgcttaaccaatagactgtaactttctgggacttcagaggctaggtcatgaaaagccttgtgtcttctgcctgtgcccgttggaatcctctctcttggactgcttgcacatagaacccggtcaccatgctgtgagaatccccagccagatggagaggacacatgtaggcactggttgatagccccattgagctaccagcaaagagccagtatcaactgtcagccttaggagtgagtgaaggaaccatgttgaataatccagccctagcagacaccatctggagaagagccaaggtttcagacttatggcacatgttaagacatctcagccatcttcatcctttcagggcatcccacctgagtttcccagacatcgtcaatcagagacaagcggtctctgctgtgccctgccagaatttgtggcccacagaatcatgagaataataaaatgattattgtttaacactactaagatttagaatagtttttaaatttagccgtagataactggaacatggccaggcgcagtggctcacacctctaattccagaactttgggaggctgaggcgggtgggtcacctgaggtcaggagtttgagaccagcctggccaacatattgaaacccaatctctactaaaaatacaaaaattagccaggcatggtggtgtgcacctgtaatggttgcaggcgcctgtaatcccagccactcaggaggctgaggcaggagaatctcatgaacccgggaggcagaggttgcagtgagctgagattgtgccactgcactccagcctgggtgacacagcaagaccttgtctccaaaaaataaaaaaataaaaaaataactggaacattgccaaactgaatagaaaataatccaagtctatgcagtttgtaagaaatacacctaagacataaggaatgagagagactggaaataaagatatggaaaaatctattccaaaagaaagctggcatagcaggttaatagtagccaaaactgatttgaaggcaaaaatcattatttgcrttaaaaattatcagaaaaaaattgtaaaggaagaattaagcaagaagctataattccaaatcagtatgcatcttatagcatggccttaaaatagatagatagaatacaaaatatgtagatagaatataggaagaaaatatatagatacaaatatgaataaatttataaatctataaaatggaaaaatttaacatgtctttttgagtaattgatggtcaaacagacaaaaacaacttgagaagataacagaagatttgaacaaccaaccaacaggcttcattttttggatatgtaccaagccccacgcttaatagatgagaatatacattctttttagggagttttaaaaaaattgaacacacactgaattcataaatcaagtctcaacaaaaccaatgaatggatattatgcaaactattctcgtactcaattcagttaagactgaaattgagcaaaaagataaccaaaataattttatatatttggaaatttaaaagcatacttctaagtaactcatagatcaaagaaaaaataataatggaaattataagtaaagccgaatgataatataaatactgtgtatcagaattatgggttacaactaaagcagcatttagagggaaatttatatcatcacaaagaagatgagggtaagaaaaactaattaagaacattaaaaaagccaaagggaaatttacagccttacatgcttatattagaaaaaaaacagagttcattatttattagtcttagtatttgactgagaagttatttttaaaaagaaatgaataaaaaccaaggaaagtagaagggaagaataaaaaaaaaaaccagaactgaatgaaattgaaaacaggctgggcacagtggctcatgcctataatcccagcactttgggaggctgaggcaggtggatcacttgaggtcaggagttcaagaccagcctggccaacatggtgaaattccgtctctactaaaagtataaaaatgctgtgcatggtggtgggcacctgtaatcccagctacttgggaggctgaggcatgagaattgcttaaacctggaaggcagaggttgcagtaagttgagatcatgccactgcactccagcctgggcaactgtctcaaaaaaaaaaaaaaaaaagaaaaaaaccacaaagatataaaagaattaacagcaacaaaagttggttttctaaaaaaaaagattaaaataagacaaagccctgcaaagattaatcagcaagacagagtgaagatacagataccactaagattgaacaagaagacatatctacaaatacagcatagattatgaaataacaaatgtattattaacaaatctatggtgctaaattgtacagcttagataaaaagaacagcgttgtgaaaaatatatataacttaccaaaattgactcaaggaggaatacaaacctgaagagacctataatcattaaatattttgaattaataagtaaaatactacctaattgaaaagaggcacagatgcaatttttacaatagttttataaaggggtataattgacaaacaaaaaactgcagatatttaaaggttacaacttggaaagttttgacacatgtctaaaaccatgaaactattgttacaatgaagataaagaacatatttattacctctaaagtctctctcktttttttttttttttttgagatagagtcttgctctgtcgcccaggctagatggagtggtgccaccttagctcactgcaacctccgcctcctgggttcaagcaattctcctgcctcagcctcctgagtagctggaattacaggtgcgcaccaccacacccagctaatttttttgtatttttagtggagacagggttttgccatgttgcccaggctggtctcgaactcctgggctcaggcaatccacccgcctcggcctcccaaagtgctaggattacaggcgtgagccactgcgcctggcctctcctgtctctaccacccagtttcatccctaggcaatcactgatctgcttcatataataatagagtctgcattttctaggcttttaagtggaatcaagtagtatgtactctttggggagaggggagtggggtaattctggcttcttccacttagcatcattatttygagatttatttatgttgttgattgatcaaaggtctttttcattgcatagtagtaccatcgtatggttagaccacatttgatttattcgttcacctgttgacagccacttgggttatttccagtttgaggctatcataaataatgcttctgtgaacatttattagagatatgtttttgttcctcgttgttaaatatctggaagtgtgatggttggattatataagtgtacggtttaatttttaagaaaccgccaaactgttttccaaagaggttttgccrttttacattcccaccaggtttgaattcctccacatcctcatcaacatttggtatggtcagtctttatttttagccattctgattagcataaaatagtatttcattgtggttttaatgtacttaagtgactaatgctgagaatcttttcatgtactttttgtcatttgtatgtctcttgtggtaaagtgtctatttaaatattttgaccattttattttattttttatttttttagagatggggtctccctgtgttgcccaggctggtctcaaactcctgggttcaagtgatcctcctccatcagtctcccagtgtgttgggattacaggcgtgagtcaccacatccagtctctttttaccatttttaattaattgggttgtttattttctaattattgagttttgagagttatttatatattctagatataagtcctttatcagatagatgatttgcaaatatttcctcccagtctgtggcttattttttttattctcttcacaatgcctttcgaaaagcaaaatctttgtattttcatgaagcccaatttatcaatttgctgttttatggcttgtagttttggtgtcatatctaagaaatctttgtccaacccaagattagaagagctttctcttatgttttcttctagaagctttataattctggcttaacattttataccaatggcccattttgagttaatttttgcatatggtacaaggtttgtattgaagctctttttttttttttttttttgcatatgaatatctaattgttgcagtatcatttgttggtaagactcttctccactgaattgctcttgcacctttgttgaaaatcagttgtctacggatgtgtgggtgtatttttggactttcttctgttccattgatctgtttgtctaacttgacacaactaccacattatttttatagctatagtttttataagtcttaaaaactgatagaggtagtcctccagctttgtatttctttttcaaagttgttttgactcttctgcgccctttacatttccatgtgaattttagaatcagtttgtcagattctacaacaaagcatctgggatttttattggaattgtattgaatctgcatttggagagaattgatagcttaacaatattgaatcttttggccatgaatggcatatctgtaccatcttgtggacatcttttatttctctcagaagtgtttggtagttttttttttttttcctgcctcagcctcccgagtagctgggattacagacgcacgccacaagacctggctaatttttgtatttttaatagagatgaggttcgccatgttggccaggctggtctcacactcccaacctcaggtgatccccccaccccggcttcctggccagtgtttaatagttttcaataggtcttgcatatcttttgtccaatgtatcgatgtttcatgttccatgtttcatgtttttgttattaccctggaaaggggtcctaatctagaccccaagagaggattcttggttctcatgcaagaaagaatttgtggtgagtccacagagtaaaatgaatgcaagtttaagaaagtaaaggaataaaagaatggctgcttcataagcagagcagccctgagtgctgctggttggctatttttgtggttatttcttgatcatatatgttcaacaaggggtggattattcattcatgagttttgcaggaaaaggggaggcatttcccacaactaaggggtccccttccttttagggtaacttctgatgttgccatggtatttgtaaactgtcacggcactggtgggagtgtcttttagcatactaatgcattatcattagcatataaccagcagtgaggacaaccagaggcacctcttggttttggtcagcttctttaccgcatcctgttttatcagtggtgtcttagttacctgtgtcttgtgccaacctcctatctcatcctgtgactaagaatgcctagcttcctgggaatgcagcccagcaggtctcattttacccagcctctatttaagatggagtcgccttggttctaatgcttctgacaatatggttgctttttgctaatatacagaaatatcaattgacttttataaattgatcttatagtctttaagtttgctaaatacttttttttttttttttttttttgagagagtctcgctctgttgcccaggctggagtacagtggcacgatctcggctcactgcaacctctgcctcctttgttcaagcagttcttctgcctcagcctccctagtagctgggattgcaggcgcccaccaccatgtccagctgatttttgtattttagtagacacgaggtttcgccgtgttggccaggctggtctggaactcctgacctgaagcaatccacctgccttggcctcccaaagtgttgggattacaagcatgagccactatgctcggccctaaatttgctaaattcttgttttagttctagtagcttttttgtagattccatcagattttcaactgaggcagttttttgtcaactatgagtaaagacagttttacgactcgctttctagtctagatactttataagttcttattttattgtacttttcagatgatcccatacaatgttgaatagaagtggtgagagtagacaccaataagtatgatattagctgttgttttttttttagatcccctttatcatgttgagaaagtttccttgtattcctagttttctgacagttttcatcaggaatttctggtggattttgtctaatgcattttctgtatctattgaaatgatcacatgatctttttaattttgttaacatggtgagttacattgattctttttttttttttttgagacagagtctcgctctgtcgcccaggctggagtgcagtggtgccatcttggctcactgcaacctctgcctcctggttcaagtgattctcctacctcagcctcctgagtagctgggactacaggcgcccgccaccatgcctggctaattttttgtatttttagtagagatggggtttcaccatgttagccaggatggtctcgatctcctgacctcatgatctgcccaccttggcctcccaaagtgctgggattacaggcatgagccaccacacccggcccattgattcatttttaaatgttaaactcaccttctattcttagggtaaatttcacttgattgtgatgtattctttttatatattgctgggcttggtttgctgaaatttttaaaatattttttcatctatgttcatgagagttattagtatgcaattttctttaggtctttgcaaggctttggtattaggataatgctgacatcataaaatggggtaggaaatgtttcttcttttcagtgttctagaagagtttttatagatttccttctgatctttattttctttcttctggttgctttgtattttattagttcttctgtttctagatttttttttttttttttttttttttgagacagggtctccctctgtcacccaggctagagtgcaatggcgtgatctcggctcactgcaaactccgcatcctgggctcaaatgatccttctgcctcagcctctcaagtagctgggactacatgcctggcaccaccatccctggctaatttttgcattttttgtagagatagggttttgccatgttgcccgggctggtcttgaactcctgtactcaagtgatccgcctgccttggcctcccaaagtgctgggattacaggcgtgagccactgcacctggccatgtttcttgattcttgaaatggaagctgaagtcttttatttgagaccttcttttattaataggaatgtttagtgttatacatttcctttagtgctgctttagcaacattccacaaattttgatgtactttcattttcattcagttagaaacacttcctaatttcccttttgatttgttctttgacccatcagttacttaggtatgtattactttacttcctgatatttgggagttttgcagatattttcctttgttgattcctaatttaattccattatggttagagaacatactttgtatgactctaattcttttatatttattgaggattgatttatggcctcaaatatggcttatcttggtaaattttttatatgcactgaaaaaatatttttctattattggtgcatttttcttgtgttttttgttcttatggttcatttagcatcttagatctatgagtttattgtcaatatcaaatttggaaaaatttggccactatttctttaaatatccctgtttttcctctctttacttctgggaactctagttacatgtatattaaactgcttaaagtgttcccagaattcactcatggtctttttattctttttccactctggtttactttgggtagtttttattatgtgtcttctagttcactcatctcttatgttttgtctgatctgccatcagtcttatccaatgcatttttcatattagacattattctttttatctgtagaagttggatttaggccttattttctttctcccatgtttctacttagctttttgaatatggaataactttgttaattcccttgtctgctaattctaacatatatgtcaattttgttagcttcagttgattgatttttttcttcttcatgggtcatattttctttgcatgtttgataaatttttgtggattataaacattgtgaattttacctgtttaggtactggattttttttttatttgttctgtgtcacagttaatttattaatacagttgaatcctttccttaagatttgtttcaaaaacatagagagaagagggggagaaaaaaaaatatttgttaggtggggccagagcagttttccatctagggtagttactccccaggatccttggaatactctacctcgtgccttgttaattacggggttttccagtttggctggtgggaacaggcattgttcttgttctgtttgagtgccagttagtgttccctctagttttctaagtagttcctacatgcactcactggtcagtaccccactgagtacttaagaggagcccactgcagagctccaggtgctcccagcatgcagcgcgttttccagtactccatcctgcacactgtctctgccttggccttcccagactctcagctcaatctcttcaacgaagatagccctgggctctacttgggttcctccttcattaaactgcaccttggaaatattctcaaggcagtaagcagaagcattcacagaacttacttcacttgttttctgtctctcagggattgctgttcttcattgcctaatgtgcagtgtctttgaaaccatcatttcatgtattttctctgctttttttgtttgtttgtttcaggcaggtaggtaaatcttatacttgttattacatattggctagaaatggaagtccattattttaaatacttcttatgtgcttgaaatgtttcaggataaacatatagactaaatggatatatttgccaaagatgaggtactgacagaaattttctagactttaaaattaagtttcaccttcttctcttccatcattttgagactaaagttttatattttaagtgttttttggtatttgcttgtgctttgctttttatctataaaaaagaggtttaatatgttctatggttgtgtgactcaaacaatatagtactttttgtaccacaggccctgaggtctgaactcagcatcactatcttttttcatattagcttccaaatagcatcaggtggtcatttttaaaatttaaaaccagtctacctatcttgtttgatttgatcttgtgaccttagggaagaaacccacccaggaatagaataaagaaactttttacatcctgaggctttaaaaaacaaaatcaaaatccagctatttaaaaaatwttaatatctttaaayctttctacaatggagtcatttttttaaaagaaagcactgtcctttgcctggttaatgaataatgtgagtactattttattataaataatwgatttccaggacttcctggggtaggaagaatgtgtcctagctgaataaattaagggaagtgataaggactgaattctgttagtggaagtaataaacgaaagaaagttatgtggttggggttgactgtgagcagagagtgattccgtagttaagatgaagggatttgttagtcttctcagagaggaaggacaagcgtgaggaataggaaaatttcacctgtaggtgggatggaaaaagcttggaataattggccgggcatggtggctcacgcctgtaatcccagcactttgggaggctgaggtgggcggatcacctaaggtcaggagttcaagaccagtctggccaacatggtgaaacccccatctctactaaaaataaaaaaattagctgggcatggtggcatgtgcctgtaatcccagctgcttggtaggctgaggcaggagaatcgctggaacccaggaggcagaggttacagtgagccaagatcgcaccactgcactccagcctagatgacagagttgagacttcgtctcaaaaaaaaaaaaaaaaaaaagcttggaatagttgtttgggggccatcctgagacaatgtgattctcacatatgggagtatgaagataaggaatctcttggagaattctagcttgtgactttcactcctgctttctctttctcctctatgttcagtatgcaattgttgattaattgaaaaggagtggaaatgaaaaaactaaaaaatttttttttcaaactagaaaaatgtcttaagaaattgaaaatgaaatcattagtttctagagctttatttttggcaaactagaataatccaagttttattttactaattttatagaattatagccctaggaaggtaagcaaatttctgttttctgctacaatatttttgtaatggtgaaatctagttaaaatattttggagtataaaaaattagaaaacatggtacagaagaggccagtgctgctcaggggttaataaggctgggacagccagctctagctgtaagcatatgtaggttttaatatactaaaggccgtgagctacagcttttgctttctctcccatctatggcctccctcgtgtatttatatatgtagcctccctgatgtgtggatgtatggatgtatttacagctagcatcagctatggttagggctgcattcttttctttctctcccatctgaggcctcctggagtcattcttgcaagagttcacacaagtttgttgaactgaattaaacttcaagtttttgttagaagaattgggcagggatcagagcatagagattcctgatggagaatccatcaggcaaggaaatgaacagctctttgtgtcctgagatgaccagcttctcctacccagaccaggaaggattgttttgccagtcttcccatggtgtcagggaaccaggattgaggagtctaaatttcagttttggcaagttggaaaagaaaaaaaggtacaaaaaaaggaacttaggttgaacttactgccaatctttccccagagggaaatgttcttcctgaccttgtagaatccatgtgattaaagttcttcatgtcctttttagagttctgagcagtaatcctctattttctttctctctctctctttttttttttttttttttttgagatagggtctggctctgtcacccaggttgcagtgcagtggcacgatctcaacctccaccttgctaactgcaaccttcacctcccaggctcaagcaatcctcccaccttggtctcttgagtagctgggactataggtgtgtgccaccccacccagctaatttttgtattttgtgtagaggcaggggtctctctttgttgcccaagctggtctcaaattcctgaactcaagtaatctgcccaccttggcctccctaagtgctgggattaggggcatgaaccaccatgcctggcctaaatcctctatttaaaccagggccaccttcctacccccaacctccaccaaaaagaaattttagttatatcaaaccaactagttttaggtcacagtgtctttctttggagggtgaaaatgaaagaattgaggctacacaatataaaatgaaatggtaatgtgagcattaattagaattataggtgttttagagcagtagttctcaaacttttttgtctcggggccctttacactctttattttttatttttttgtgtgagatggagtcttgctctgttgyccaggctggagtgcagtggcgcaatctcagctcactgcaacctctgcctcccggtttcaagcttctctccatgagacttgccttggccttttgcttttttacctttacctggttttcaaagacaaatataaatatgagaggaggggagttagtttttttgtttgtttgtttgttttgttttgttttgagacagggtttcactctcatcacccaggctggagtgcagtggcatgcgcttagctcactacaacctccacctcctgggctcaagtgatcctcctgcctcagcctcccgagtagctgggaccacaggcacatgccagtgtgcctggctaattgtttgtatttttagtagagatgggtttcaccatgttggccagcctggtctccaactcctgacctcaagtgatccacctgccttggcctcccagagtgctgggattacaggggtgagccaccacttccagctcctttacactcttaaaaattaaggatcccaaagagtttttgtctctgtgggttatatctatatcartacttacaatgttaggaattaaacctgataatttaaaaatattgattgattgattgatttaaaatagctataaacccgccatgtgttatttattttaaatggagacatttaataatatttaaatattaataaattgaaaataataatcccactatatgttaacataaataatattttcatgaaaagtaactacattttctaaaacaaagacatttaatgggaagaaaagcattgttttatattcctgccaatctctttgatggccaaattcataaaaaactgttggattctcgtatctgcttttgccttatctgatgtgttgccacacatcttgtatcctctggaaaactccamtktacacttataaaataataagagtaaaaagaacaaatataatcttagggttatcatgaaaatacttttaacctcaagcaccccctccagggatacctcaagtagtttctggaccatattttgagaccactgttcccaaactgtttatgtgtgagaaaagagaaacacaagagttatcaccattacttctacagcagatttttccttgtgtttaatcagtactggctgtttagcctaattaagcagtataacatccagactccagaattgaagtgggtggtatagctgaaaactccaagcactgtaccgggagtaagtctcagtttaatgtgctttttaaaagtagttgttgttcagtgtttttgtaggctattgctaaccagtgrgagaggaaagttaaggcagctctctgggaaagaaaaaccaaggaattttagagattaaaaatgacctttaaagataatctggtcatcgaattttagactattggatttgaaagtcagatgctgagaggtcatctaatccaacccttaagctttttagtgattataattagtacttgtgatacacaggctaagttctttatgtagagctccttctccccacgtcattttgatgtttactgtttcttttgaatgytttttataatggaaaatgtcgatcatgtactccattactcaccttcaacaattgtgaattcatggccacttgtttcacatatagccctgtccacaccatccactccctggattattggatgcaaattgaagaattttatagcttcacctgtaaacatatcactatatctctaaagataaagaccttaaataacttcaattccattatcatgctaaaaaattagcaataatttttaatagcataaaaacccaatgttcacatttccctcattgtgttattcataaatgtatattttttcagtatgtttgaatcaggatacaaatgagtatcatatagtgcagtttattgatttgtctcttaacattagtcctctcttctcccctgctttttgttttgcagttttttgttgtagaaatcaagtcatttgtgttggcagaatttccctgagtctgaattttgctgattacatctctgtggtgtcttttaacgtgttcctttgtcttctgcaactcctgtaaatttgtatttgtatttattttaatttaattttattttattttattgagacagagtctcgcatcactcaggctggagtgcagtggcgtgatctcggctcactgcaccctccaccttctgggttcaagcgattctcctcctcagcctcctgaatagctgggattacagaggcccgccaccacgcctggctaattcttgtgtttttagtagagacagggtctcatcatattggccaggctggtctcgaactcctgacctcaagtgatctgcctgcctcagcctcccaaagtgctgggattacaggcgtgagccactgcgcctggcagtacttctatttagaagagtgctcagacttcttcatgagtggtgttaagtacttccatcagaaggtacataaatgtctgcatgtcttttttgttttaaaattttatctatttattattattatttttgagacaaggccttgttctgtcacccaggctggaggtgcagtagcatgatcatagctcactgcagcttcaacctcctgggctcaattgatcttcccacctcagcttcctgagtagctgcgactgcaggcatgcaccaccacgcctggctaatttttgtttgtttgtttgtttattttgtagagatagagttttaccgtgttgcccaggctggtcctgaactcctgggctcaagccatctgccagccttcgtcttccaaagtgctgggattacaggtataagccaccacaacgggcctattttaatttttattttacttttttgagtcagggtcttgctgtgtcacccaggctggagtgcagtggcacaattacagctcactgcagcctcaacctcctgggctcaagtgatcctcctgcctcagcctgcctaatagctaggagcacaggtgtgtgccacaatgcctagctaatttttaaattttttttgtagagatgggatctcactatgttgcctaggctcgtcttgaactcctgggttcaagcagtcctcttgccttggcctctccgagtgttgagattgcgggcgcaagccacctcgtccaacctgtctctttttgtgtgatgttagtaactattgatgatttttacttagatccattaaatcattaagagctatacaatgatgatattctagttctattattctttcatttattagctggaatacttctataaagagaaacctccccttttctaatcttcgatttacccagtggtataatacatattggaaagtcaggatgaatattttgttctttccccttgtttaccaattttcagaatactgtattggttcactagcattctccaattaggcattggttttggtgggggtttttttggtatcataaactcttgggtttaaacatttttgaatatgtttcaattcattgcatttttttccttttctagtgattttactgatatatttcttctttctttctttttttttttgagacggagtcttgctctgttgcccaggctggagtgcagtggtgcaatctcagctaactgcaacctccgcctctagggttcaagtgattctcctgcctcagtctcctgagtagctgggattacagccatgcaccacctcgcccaactaattttgtatttttagtagagatggggtttctccatgttggtcaggctggtctcgaactcttgacctcaggtgatcctcccgcctcggcctcccaaagtactaggattacaggcaccatgcccagtggcatatatatttcttctaataaactcagcttgatgatgaggacgtgtcttagacatctttctgtccatggtgcctagtgcgtggctttcaataaatgtcaaatgaatgagttgatattctgagcagcatttaaaaataagagctagtggctgggcacggtggctcatgcctgtaatcccagcactttgggaggccaaggcgggcggatcacgaggtcaggagatgagaccattctggccaacatggtgaaaccctgtctctactaaaaatacaaaaattagccgggagtggtggtgggtgcctttagtcccagctactcgggaggctgaggcaggagaatggtatgaacccgggaggcggagcttgcagtgagctgagattgcgccactgcactccagcctgggcgacagagtgagactctgtctcaaaaaaaaaaaaaaaaagttttggaggcatgacagaggagcaaagtccagtattactttcctgtgtgagctgaagaaagtgcagtataacagtaaaaaataatatggttgcaggtgaaagaaaaacatgttttttaaaaagtgaatgtggccgggcgtggtggctcacgcctgtaatcccagcactttgggaggctgaggcaggtggatcatgaggtcaggagttcgagaccagcctggtcaagatggtgaaaccccatctctactaaaaaatacaaaaattagccgggcgcagtggcgggcgcctgtaatcccagctactcaggaggctgaggcaggagaatcgcttgaacccgggaggtggagtgtgcagtgagccgagatcacgccactgcactctagcctgggcgacagagtgagactccatctcaaaaaaaaaaaacaaaacaaaacagttaatattatttaattgccatttgttaacagatgtggcattgtttccactattgtttccagtggatcttttaattatatttattaaaatataaaaaaaggagtaattcagagtccttgtctttacttcacttgctgtaagataagtaacatttaaaagccacctttcctcccctcaggttcttttctcttttaatataaatggcaaagagcatacatgtttatgacagacatgttccccataagtttattcatttattctacaaacccccccaaaattttgcagggaagtaaaacaaaactaagtacccacaatatgtgaggcaccgctctgaacatttttgcatggattatacatatcatttattcttaccacaactctataaagttggtaggattattatcatcgtctcctttttatagattaagtaattgaagcacagacattaagtaacttactgagggcatacaactagtgaatattagtgctaggattcaaatcatgcattcttttaccggagcctctgctgttaaattactttcagtgactttacccgagaccttttttttttttttttgcaggatggggtggtattcataaaagaattttataatcatgtgaataataaaatttattgccacaaagtcttttttttttctttttttttgagacagrgtcttgctstgtcacccaggctggagtgcagtggcgtgatctcagttcactggaagccccacctcccaggttcacgccgttcttccgcctcagcctcccgagtagctgggactacaggcacccgccaccatgcctggaaaattttgtttttgtatttttagtagagacggggtttcaccgtgttagccaggatggtctcaatctcctgacctcatgatccgcccgcctcagcctcccaaagtgctaggattacaggtgtgagccactgcgcccggcccaaagtctgtcattttatgatgacaaatatggctaagtttttttttaatggaactttattcctccaaaaaatgacttttaatttttcccaggccatcatttcatggttggtattaagacaaacaattatgaagtgttgaagaattaagttcctattattactgtatcatgtattactgtaaaaaaattagaattcatagaatttgcaaatcttgaacatttttagtaggactactgcttgtaacaatttgcttaccatcactttccctttgattagataattataacttgttttgtgtggttataaacaggttcataacattctcatacatgagtcctaaagaggcagccatcctagtttcttcatctgtctttgcttcattgtcatgaatttatgcgtggataaagataaaataagtcacaagcactataataatcagcagttgtcacagctgtgagtatagcatatgtaatagagcccactggttgtccaaaattgcttgctgactagggctatatatcattcctttctctcccactcagtaaagttaaatgtgacacaagaatgaaaatgatgttaaggctgggcacggtggctcacgcctgtaatcctagcactttgggagtctgagacaggcagatcacctgaggtcaggagttcaagaccagccaggccaacatggtgaaaccccatctgtactaaaaatacaaaaattacctgggcatggtggcacacaccagtaatcccagctagttgggaggctgaggcaggagaattgctggaacccaggaggcagaggttgcaataagccgagatcatgccactgtactccagcctgggtgacagagtgagactctgtcttaaaaaaaaaaacaaagaaagtaagttatgttaatagggattgaatttactttaacttattcattagaaaggaacttaaatattaggaacaagttatttgggacacagttttatagcttctagactgagaaacgttactcttraaagcatattgctttgggaatgatagtaagaggagtaaagaataaaagcatattgcttacccacttttaaaattatttatttatttattagagatggggtctcactgtgttgcccaggctggtctcaaactaccaggcccaagcactactcccacctctgcctcctgagtagctgtgattataggcgcttgccactgtgcctggctttctcaagttgatcagtgaagacagagtttttgggttttttttttggtatctttcaaagtatggcattgagaaactcatttgtaatggttgcggaaaaggaatttttaaaaaaggaagctaagaaataataaatgctaaacttattgtaataagttatagttgttggttttccaagactaagaggttaaaagtactcttaaagcacataaaagttatatacaaatatatgtataccccttcaactaataaccagagtctggccttgaaaatgttctagtagaagccacagattgattgtgactaaaactggctggacgcgggaggccaagaccagcggatcacttgagcccaggagtttgagaccagcctgggcaacatggcaaaaccccatctctacaaaaaatacaaaaaaattagctgggcatggtggcacatgcctatagtcccagttactaggggggtgggaggactgcttgaatccagcctsagcaacagagtgaacccttgcctcaaacccctccccctaaaaaaaaaaccccaaaaacttatttgaggaaacccaatacacacataacattttttcaaacaaaaatgataaaaattgcaacaattaatttaagttcttataggtcagggatctaacatgttcaaattgttcaaatatttatagcagtaatctcttaactgtcttttggaatatagtataattccaggagagagatggcttagtatgaatttgtatatagtattgagattaagacttggatgtgatttgttccaaactaatttagagattgttaattcacttttaggaactaatttcacagtcaacgtgattttttacttaytggttgtgaaaagtgctttatctggtttgtttggtagtaatggagaaagattatttagattaatgtttgtattatttcactttgtatctaatcagttattttgtagaaaaagaaacattcttctcttctttattgggagactgaaaggtgtattctagctggcatttaaatatatgtttagttggtagaacaattactttgtgtacctatgatgaatgttatttatttggacacatttrccttttcctatttttttcttaattggtttgactgcatctctaaaagctctctttagattgatgccaaaaaatcccacatgtctgacggaagtgccaggaaagtgttaatgcttcaatttccttgattcttgtcccttaatttttaggggtcattgaaatcagaagggttagactctctagaggctgttggtctgtttaagaactattccagagaaggaaattaacacttacatgcctgttagtattaggaatttgatgtattaactcatttaattcttagaattctgtgaggtagatggtatatcaatttttctgatacagcaattgaagccagttatcaatttaccataagtcacacaccttaagtggcaagagtgtaatctgaatccatatcggtctctaaatatctctctttctactacaccatgttaatctatatccaccacaacactgtagctgttcatctgaacaggatatcttttattagcaaatattttaataagatggggcaggtattgagattagtagacktgttaaggagattgcaatatgtgatgtatagaaaaatcctgggactataacttcataaattagaattttagatccactattaacgtgtaccctggataagtcatatgttgcctttgttgtagttttccagtctgtaaaaatgaagatgttaataatatctattctgccttcccagtggggtgtgttgaatgtgtgtttgctggctttgaaaatgataaaactttaccaatgtaaagtattaagtaatgtggttctcaggagttgtgtggcttgatggattggtaccattcttttaaccaagaaacaattagttgatcttggcagtaggccattggaactcaaagaaatagcatctgtcaatcacagtcatttcttggaaggaagaattgaaaaatggcacaggagttattctccttgacctctttctctgaaagggaatttgattaggcaagctggtttcataatagagtagagcttctctcttctctccggggaattgaagctgagcagccaggctggttctgtgaagccagagcaatctggttttaaaggatttaactaaattctctatgattaaggttttctgagggatgtgcattgctgagcagcagctttaaaaatgttacgtatgagtcagtctgtgtccctagactgagaacagagtagtggaactggtttaagttcagggaatagtcttcaacaagttcatagcatcttgaagagaagcctagactctgaaagctgaaaaaataggcagtaggagaccattgtatagactgtagaactgagaccccatctagtcattatttggtatttctccacacctttgttagtgagctgactcaagtactttataatatagaaaaataaaactaaaggtcaacaatcaacatacagtaggtgtgcagtaaggatatgaatatgtaataaaaatgattgtaaatttatgcctaattattgtcttacagtgaaggccgtgaatggccagagaaactacttaaaacatttgagtttctgaaactacaggcatcctcagagggttaatgcatgctcttagtagaactcaaatgtctctaattaggaagatcttaatcctttattcttccaacagttgctgactttgctggggagttgttcgtatatatgcagaattaaagccactggtttaagtaatttggccaaagtcaggataaaaatagattagtttctctaaagcttctctgcgtttatactgttacctttatttgctaaatagattttggataaatatatagctggttttagatcttggaatcttagtactgtagacagccacttgccttcgctgcttcaatccccattccagtatgtgttattccaactcattggagactttagaagtgtgattagatgagtctcattttggaggaatcatgtaggattacccctatgatagttacttaaaattcttatcactatatttaggagaaaacacatttagatggaagtaaaaaatcaaggaaataataggaagagtagaagagaggttgcataaagggagccagtgagtaacctctgtacaccttaatattccatcaaccacagacttttcttccaattaagtactttcccaaagaatcacaaacatcaggggaagaaagacaaaattattttctggtgttatgttggcattcattggatttaaatattttggggccaggtatggtggctcacgcctataatcgcagcactttgggagactgaggtgggaggatcactcaagctgaggggttcaagaccagcctgggcaacatactgagaccccatctctacttaaaaaaattaaaaaattagttgggcatgtaacacatgcctgtagtccagctacttgggaggctgacgtaggaggatcccttcagcccaggagttcaaggctacagtgagctatgatcatgtcactgtactctatcctggttgacagagtgagaccctgtctctaaaaaataaaaataaataagaaattttggcttcctagaatggtccatgcagttgatagagagtaaatgcctggtttattaaaatggaaaggttaggatgcttatacctatttttcacataatctggaaggtaaattaagtaaaaatttcaggacattctgatactaggtagtttaaaacaatactcaaatggtttctgaaaatagccttataaaggagaattaaactaaattggctcagttggagtccttacccttgcttggtgagttagagttttcggaagcttaaagtttatattctttttgagatttaatatatgtcaacctttctgaagtgggtagccaacttgtgaagactgtgtgtacacatgcacactgatctattgtagccttggcacattgtgtgactttaagtagggtgattggggatgtgaaaggtaaaaggattgtagagaggtggctgctccaaagaggaggaatttctgaaaacatcactgtttattccaattacaaattttttgtagtgctatgtcccctggttaatgatggtgtcagtggttgcctgtgagtcctttgcactctagtatgctttgctttgaagtaaacttcatcttaggaccgggctgagttgtgcatactgctgaaattaaaggtactgaaaaagcatagggtagacaggccccaagggagaagcgactgttgggagctttggaaaactagcgaacagctccagagcactggtgcttggggagcagaagtgtcacatgttgagataggaaatttagaatgcctttgcttgagacctaattggtctccttcctcctatagactgctagaaatttctacgtagctctggactacgggtcccgaagttggaaccaccattctattcctgtcatttgtagtatggaaaagtaacttttttcttgtttataaaatgagaaaaatttttgagaagaatttttttttaatgagtgaaagtatatggtgtttgatagggtaattgagagctgtaatcaaaatcattacctggctggatgcagtggctcatgcttgtaatcccagcactttgggaggccaaggcatgggaagatcctttgaacctgggagtttgagaccagcctggacaacatagggagagccagtctctaaaaaaaattaaaaattagcccgacatggtggtggactaatccactaatagtgtcagctactcaggagtcttaggtgggaggattgcttgagctggggaggttgaggctgcagtgagccatgatcctgcccctgcattccagcttgggtgacagcgagatcctgtctccaaataaacaaatcattacctgctgaaatagtcattcccagtttatataatcagatagctagagggtaactatagacaagaaagcctgtggtttaatttgataggaaagactctaacctcattgagagaaaacgatcagaaaatattccttttctaatkgcaagagaggaaaaacttataaattaggttcatattatatagggagtggggtattcaccagccagcctatttctgattccttagtgaaatctgatttaggaaatacaaggtagcctggttttattgttgaacaagggaaggagaaaatcactttgtcttatctagttaactaaatatttcaaggtaaggatatgaagatagtttaaatttccrttacaactggtatcaaattttgcttctctgctttgattagaaactgtctccacctgctggccgcaattcacttggcatttcatgaggacacctggttttttgttttgttttcttgaaacatataacagctatggaaagtacttaggcagggttgtagtgactaaaatacctctatgtagcttttcctaaaattcccagaaggattttggagttttttcctaaactttgcttgggggataatggaaaagaagcaacgtaaggccttacaagaaccaaaccaaagcagcacatttgcagtgtttgtttgatatttgtcattctaccaagtgatttgtctattttatgtattatattaaactgtttaagctttgttatttataattaaggtcattattttccaaattgctgttagtttcacctcttttgcctgtttggaaataattatcacaatcattactgaattatacaataaaataaaacttttcttggtctaaaggtaggcaagctttttctgtaaaggctcagatggtaagtgttktaggctttgcaggctatatgttttttgttgtaactactcaaacctgttattgtagcgaaaaaaagtatataggcaatacataaatgaatgagttccaaaaatacttaatggaaaccaaaaatttgaatttgatacaatttccatgtgccatgatatattgttcttttttaaattttttgacatttttggggggagaatcagggacagactggaaatttttcaaccatttaaaaatgtagaaactatggggcatggtagtccatgtctgtgatcccatgggaagatcgcttgaggctgggagtttgagagcagcctgggaaccatagcaagtcccctcctctaccaaaaaaaaaaaaacaaaaaactatccgggcatagtggctcacctgtagtttcaactattcaggaggctgaggtgggagagtccaacttgttttttttttttttttttttttgagatggagtctcgctctgtcccccaggctggagtgcagtggcgcgatctcggctcactgcaagctccgcctcccgggttcacgccattctcctgcctcagcctcccgagtaggtgggactacaggcacccgccaccacgccgtgctaattttttgtatttttagtagagacagggtttcaccatgttagctaggatggtgtcgatctccttacctcgtgatccacccgccttggcctcccaaagtgctgggattacaggcatgagccatcacgcccagccagattccaacttttaggagtacttccgtaacaaagaaaacttgtcagargggtgttgtacctgttccatctcatcaccaaccacatggcatagaagtacagaactttgtatatgtggaagatgattctttacccacacatgtaggatcatgacctgttgtggtttgattatatacccacggtttagataatttaagttcaaaacactgaaataattttttaaaggagaagactctttttaaaatttttgagaccagcctggaaattttatacatacaggagaaaacttgaaaaatttttttatttatttaaaatttttaattttcgtgggtacatagtaggtgcatatatttatggagtttatggaatatttgatacaggcatatgttgcgcaataattacatcaaggtaaatgagggtatctatcaactcaaccatttatcatattacaatcctattatactcttttagttattttaaaatgtacaattaaattattattgactatagttaccctgttgtgctatcagataccagatcttattcattcttcctggttttttgtacccatgagccatccccgcctcccccccagcctcctcactacccttcccaacctttggtaaccatcattctactctctatctccatgagttcaattcttttaatttttatctcccagaaataggtgagaatatgcaaagtttgtctttctgtgcctggcttatttcacttaacataaggatatctactttgattcatgttgttgcaaatgacaggatctcattcttttttatggctgaatagtactccattgcttatatgtaccacatttaaaaaaatctattcgtctgttgatggrcacttaggttgcttccaaatactggctgttgtgaacagtgctacaacaaacatgggagtgcagatatctcttcaatatactgacttcctttcttttgaatatatgtccaacagtgggattgctggattatatggtggttttatttttaattttttgaggagtctctaaattgttcttcatagtgtatgagggtttccttttctccatatccttgccagcatttgttattgcctgtcttttggatatacgccatttcagctgtggcaagatatttcattgtagtttttctatgtttttttgagatggagtctcactctgtcgcccaggctggagcgcagtggcacaatctcagctcactgcaatctccacctcctgggtaagggattctcctgccttggcctgccaagtagttgggattacaaatctgaataatttttgtatttttagtgaagatgkggtttcaccatgttggccaggctgatctcaaactcctgacctcaactgatctgcccaccttggcctccctaagtgctaggattataggtgtgagccactgcacctggccttgagcatcttttcatacacctgtttgccatttgtatgtcttttgagaaatatctattcagatcttttgcccattttttaattgaattattagattttgtttccatagggttgtttgagctccttatatattatggttattaatcctttgtcagatggatagtttgcaaatactttctcccattctgtgggttgtgtcttcactttgttggttgtttcctttgctgtgtagaagctttttaacttgatgtgatctgatttgtccatttttgctttggttcctgtgcttgtggggtatttactcaagaaatctttgcccactccaatgtcctggagagtttccccaatgttttcttttggtagttgcatagtttgaggtcttagatttaaatctttaatctatttttatttgatttttgtatatgtgagagatagaggtctagttttattcttctgcatatggatatccagttttcccagcaccgtttattgaagagactgttctttccccaatgtatagttttggcatgtttgtcaaaaatgagttcactgtagatgtatggatttgtttctgggttctctattctgttccattggtctatgtgtctgtttttatgccagtaccatgctgttttggttactgtagctctgtagtataatttgaagtcaggtcgtgttattccttcagttttgttctttttgcccatgatagctttgactattctgtcacttttgtagttctatataaattttaggattttttttttctatttctgtgaagaatgttattgggatttggaatctatagattcagtgcaatccctattattacactgattctgctttaggtaggatggacatttttacaatattgattgttccaatccgtggacatggaatgtctttttcttggtgcagggggtattcttttcaatgtcttgcatcagtgttttatagttttcattgtagatatatttcacttatttggttaattcctaggtatttaattttatctgtagttattataaatggsgttacttccttgatttctttttcggattacttgctgttggtatatagaaatgctagtgacttttgtgtgttgattttactgaatttgcttatcagttctaataggtttttggtggcgtctttaggtttttccaaatataaggtcatatcatctacaaacaaggataatgtgacttcttcctttccagtttgagtgcccttatatctttctcttgactcattgctctagctaggacttccagtactatattggatcatagtggtgaaagtgggcattgttgtcatgttctaaatcttagaggaaaggctttcagtttttccccattcagtatgatactggctgtgggttgttgtatatgttttattatgctgaggtatgtttcttctatactcagttatttttagggtttttatcatgaagtgatgttgaattttatcaaatgctttttcagcatcagttgaaatgatcatatggttcttgtccttcactctgatgataggctrtatcacattgattgattggtgtatgttgatccatccttatatccttgggatacatctcacttgatcatgatgaatgatctttttaatgtgttgttgaatttgatttgttagtatttgttgaggatttttacataaatgttcatcagagcctgtagttttctttttttggtgtgtctttttctgattttggtatcagggtaatactggtctcatagaatgagtttggaagtattccttccacctccattttttggaattgtttgagtaagattggtgttagttcttctttaaatgtttggtaaaattcagcagtgaagccattgggtcccaagcttttctttgctgggatacttctttgttttttgagatggactttcactcttgttgcccaggctggagtgcaatgacgtgatcttggctcaccgcaacctctgcctccggggttcaagtaattcccctgcttcagcctcccaagtagctgcgattataggcatccgccaccacacccggttaattttgtatttttagtagagactggtttctccatgttggtcaggctggtctcgaactcccaacctcaggtgatctgcccgccttggcctccgaaagtgctgggattacaggcataagccaccatgcctggccgactgagagatttttaactttgactttgatcttgctacttgttattgatctgtttaggttttaggtttcttcatgattcaattttgggaggttgtatgtgtcaagaaatttatccatttcttctaggttttccaatttattggcatataattgctcatagtagcctcaaatggtcctttgagtttctacagtatcagctgtaatgtcttctttttcatctctgattttattttggtcttctcatgttttttcttagtctggctaaaggtttgtcaatttcatttatcttttcaaagaaacaattttttattttgttgatattttgtattgttttcttcatttcaacttcatttatttctcctctgatctttatttattttctactaactttgggtttggttgggtcttgcttttctacttatttaagatgcattgttaggctatttatttgatgcgtttctacttttttgatatargaacttatagctataaacttccctctttggctgggtgtggtggctcacacctgtaatcatagcactttgggaggctgaggcgggtgaattgcctgagctcaggagttccagaccagcctaggcaacatggtgaaaccctgtctctactaaaaatacaaaaaattagtcgggcattggtggtgcatgcctgtaatcccagctactcaggaggctgaggcgcaagactcacttgaacctgggagctggaggttgcattgagctgacacaagactgtctcaaaaaataaaaaataaaataaaaataaataaataaacaaacaaacttccctcttagtactgctttagctgtatcccataggtttgggtatgttatgtttccattatcatttgtttcaagaaattccttcatgtttgtaccatttccaaaattcttgttattgatttctagttttattccattgtggtcagaaaatgcttgatattacttcagttttttgagtgttttaagacttgtcttgtgacctaacatataatctgtccttgagaatgatccatgtactgaggagaagaatgtgtattttgcagccattggatgaaatgttctgtaaatatctattaggtccatttggtttgtagtgcagattaagtccagtgtttctttgttgattttctgtctggatgatctgtccgatgctgaaaatgggatgttgaagtctctagctagctattgttttggagtcttatctatttagctctaataatacttcctttatatatctgggtgctccagtgttgggtacatatatatttaaaatggctacatcttcttgctgaattaacccctttatcattatataatgacctttttctgtctctttttgtagtttttgtcttgaaatctattttgtctgatacaaatacagttagtcttgctcttttttggtttccattgatatggaatattttttttcatcctttcattttcactctatatgtttctttaaaggtgaagtgtgtttcttgtaggcaacagatcattgaatcttgcttttttatccattcagccactctatgtcttttgattggggagtttagtccatttacattcaatgttattattaataagtagggacttactcctgccattttatttgttttctggttttttttttggtcttctctttcttcttttcttccttcctattttccttttagtggatgtgattttctctggtggtatgttttaatttctccctttttattttttgcrtatccactatatgtttttagatttgtggttaccatgaagtttgcaaataatatcttataacccattattttaaactgatgacaacaccgattgtataaacagacaagcaaaaaaactaataaaaactttatacttaggccgggcatggtggctcatgcctgtaatcccagcactttgggaggccgaggcgggcagatcacgaggtcaagagattgagaccatcttggtcaacaaggtgaaaccccgtctctactaaaaatacaaaaattagctgagcatggtggcacgtgcctgtagtcccagctacttgggaggctgaggcagcagaatcgcttgaatccgggaggcagaggttgcagtgaactgaaatcgtgccactggactccagtctgggtgacagagcaataatccatctcaaaaacaaacaaacaaamaaaaaaaaacactttatactttaacttcataccccccactttctaattttttgttgtttctatttatatcttattgtactgtgtcttgaaaagttgtagttattatttttgatcagttcatctttcttctgaaatatgagtttacataccacaattacctaagttcaaaaacacttgaatctgtgttcttctgtgtactattaccagtgagttttataccttcagatgatttcttattgatcattagcatcctcttctttcagattgaagaactcactttagtgtttcgtataagacaggtctggtgttgatgaaatcctttagcttttgtatgtctgggaaagtctttatttctccttcatgtttgaagcatattttcactggatatactgttctaggataaaagatttttccttcaacactttaaatatgtcatgccactctctcctggcctgtaaggtttccactgagaggtctgctggcagatgtatttggagctccattgtatgttgtttcttttctcttcctgcttttaggatcctttctctatccttgacctttgggagtttggatattaagtgctttgaggtagtcgtccttggattaaatctgcttggtgttctagaaccttcttgtacttgaatactgatatctttctctaggcttgggaagttctctattgttatccctttgaatgtactttctatgtctgtctctaccttctctttaaggccaataactcttatatttgcccttttgaggctatgttctagatcttgtcggtgtgctttattcttttgtattcttttttcttttgtctcctctgggtgtgtgttttcaaatagcctgtcttcaggctcacagttcttctgcttgagcaattctgctattaagagactctgatgcattcttcagtgtgtcaattgtatttttccactacagaatttctgctttattctttttttaattatttcaatttcatcgttaagtttatctgataagattctgaattctttcttatgtcatctcgaatttctttgagtttcctcaaaacagttattttgaattctgtctgaaaggtcacatatctctgtttctctgagattggcctctgatgcctaactttgtttgtttggtcagatcatgttttcctcctggtcttgatgcttgtggatgtttgtcagtgtctgggcattgaagagttgggtatttgttgacttcttagcaatctgggcttatttgtacctgtgcttcttgggaaggctttccagatattcaaagggacttgggtgttgagatctgtttttggtcactgcagccatatctgcattaagtggcaccccaaacccagtaatgctgtagttcatacagactcrtagaggtatcacctcgatggtcttgggtaagatccagatgaattctctggattaccaggcagagactcttgttaccttactttcttccaaacaaacggagtctctctctgtctctgtgctgaactgcctggacctaggggtgaggtaacacaagcagccctgtggccaccaacactgggacgcattgggtcagtcctgaagccagtaaagtgttgaatcttgtccagggggtgctgtgaccactacctggctgctgcgtatgttcactcaaggccytagggctctacagtcagcaggtagtgaagccagctagtcttgtgcctttcccttcagggtggcaagttcccttgggccctgggcaagtccagagatgctgttcaggagccagcgcttggagttggaaaccttagaaagaaatctacttggtgccctattccattgcagctatgctggcagtgaaaccacaagacaaatccttcctattcttccctaccctttccccaggcagaggagtctcttcccatgtccaccaccaccaccacaggcctatgagtaccagggcaccactgatgttcacttaaggcccaagggctcttcagtcagcttgtggtgaatgctgccaggcctagaactcacccttcagggcagtgggctcccctctggctcagggtaggtctagaaatgcaatgcaagagccaaggcctggaatcagggaccccaagagcctgtttggtactcttccccactttgactgaactggtacctaagctgcaagacaaagtctcctttattctttcctctccatttctcaagcagaaggattctctcctcatagccaacacagtcgtgaatttgctgggacacacctgaagtcagcatggctcaagagtcttacctaagacccatggcaggtcctagctggttgccgctgctgattatttagagcccaagggctgtttagtcagcaggtgatgaatcctgccaggactgtttcccttctggcctaagatatgtctagaaatgtcmgggagctagggcctggaatgggaccttatgatcctgcctggtgctctttcctactgtggctgaactggtatctaagttgtaaaacaacatcctctttactcttccttctcctctcctcaagcagaagaaaggggtctcttctgaagctgggagcttcaagctgcactgccttgggttgagggaggggtgacgcaagcactcccttagccaccctggctgacatctcactaagttatgtgcccctcaagtcccctggctccaagcccagcacagcactaggacttgcccaggagttgtagtcctagtggcctagacagcctttcaagtttacttagaaccccagagcactttagcccatggtagcaggccttatggaagttacagatatgactgctgggttgggtgattcccctctggctagggcttttctgaatgctccctctgtgggtacctgctgagtcctgtctggtgttgccagcactgagttccaatgcaaagttgcacaatcactgagctctccctgccacagcatacagattgcccatgtgggtgctgccaggggatgggagaggggtgttgttgcatttcaagattgtttttcctgcctttttcagtacctctttcagtgatatgtagttaaaaccaggtactgtgattgctcacatgattttgattctaattgaaggtgctttttttgtgtagatagttgttaaatttggtgttcctgcagggaggatgatcagtggagacttctattcagctatcttactccatgtcttctcaggagaagattctttatgttcatttaaaaaacagaaacattcagatagtagaattattctaagacagtttcaaaaaagaaactatcattacaactgaagaataatttgctatagtgaggagcatgtggggttggtattgggtgccctgggccacatgatctgggcagcatggtatggatcattcattataatttcagtgtgatgtcactgtggtcatgtggtggttcttagtctattttggaagataactattttaaaacattgaattaaaaatatttatggttatgggctgggcacagtggctcatgtctgtaatcccagcactttgggaggctgagaccaggcagatcacctgaagtcaggagttcgagaccagcctggccaacatggtgaaaccccgtctctactaaaaatacaaaaattagccgggcgtggcggcgggcacctgtaatcccagctacttgggaggctgagtcaggagaatcacttgaacccaggaggtggaggttgcagtgagctgagatcatgccactgcactctagcctgggcgacagagcaagacttcgtctcaaaacaacaacaaaaattatggttatgtcaggtacagtggctcacacctgtaatcccagcactttgggaggccaagatgggaggatcacttgaggctaagagtttgagatcagtctagaaaacatagtgagattccatctctacaaaaagtttaaaaattagctgggtgtggtaggtacatgcctgtagtcccagctacgtgggaggttaaggtgagaggatcacttgagcctaggagtttgaggctgcagtgagatgtgatcacaccactgcactccagcctgggcaacagagcaagaccttgtctcaaaataaataaatgaaagaaaagaaaatttatggttacaaatggttcatcattttagtttgtcacatataaatatcttctattcttttggttcttgtccgctgccagcccccgcattcctggatcaattttacagtckgccttctctgtttctgcctgtgccttaaaaactgagtgctataaagttatggaattgctgcctctctaagctcatgtctctaaattccaatctcatttgagttctctttaccagtcaccatttttttttttaattttacgttggttggttccctttgccttttccttcagcagctgttacagacttctactcatctcagaccccttcctaatctctgtctcattgtcatmcaacccaccttggatctgggacaccaaaaagtttaggctttctcttgtgaactctttcaacttccttctgactttctcattacatgtctctgtttgacctcatttttacctttttcctttctgtcccagaggaagaggtttagctcttcccattttagatagttgtgacatctgtctaaatatatgattcttgataccatctcatccacctccttggtgacttaataacatcatttatatccttgatcttcagtctttccctctccattaacttcattcccatttaaaaaaaagaaaaaagatgacaaaatagaccccataaatctctaatcctatctatatatactcttttagatttatcatttcattttctgtttggtaatagagcatttatggtcaccttttctctgaaaccatgcttgctaagatcaccaaggatctcctgtcaaatcattcattctttcagtggaatcaccagggagtttatatgaagtgatggagacaaggctgagaatggaccccaatggacatcaacatttgagggaattggtgaaggaaaagataatgaaggaaattagaagccagggttgaaggagaargccaggagagtgtggtattccaaaaagaagagagtttttaagaaggaggggaattaagtgttaaatgctatacagatgtaaaataaaatcagtattgaaaataattcactgaatttagcagcaaagcagtgaagtgttaggatagttggtaaggttaaattgcactggtgagagacattatttgtagggaagcaaaacaagctggggtagaaaactgttttgaaaatattgactgtgaagaataagggagttagagttgctggagagggttgcaagctctagggaaaatgttttttaaagcagtatataacagacttgatgggccaggcgtggtgggtcatgcttgtaattctagcactttgggaggctgatgtgggcatatcactttgagctcaggagtttgagtccagcctgggcaacatggtgaaaccctgtttctacaaaaattacaattagccaggtgtggtggctcacacctgcagtcccagctactcaggaggctgaggctagagaattgtttgagcccaggaaacagaggttgtagtgagccaagatcacaccactgcactccagcctgggcaagagtgaaaccctgtctcaaaaaaaaaaaaaaatgtacgacagacttgaatatgtttaggtgcctatggaaragagtttggagaggaagaaagcaagattggaagaagaagggaataaaaatggactgaagtccttgaaaagaaagaaaggaacatgattcaaagcatgaataggacgattggccttatttacatagaaacaggatatcttatacagtaagagacctattaatatgggatgccatggggccagtccttgaataagttcatctcttttctgtcatggtgatcgtacctattcctktggttttaaatatcatctaacctaaatgctgacaagtcccaaactctcctgaattccagacttgcatctctaactgccatctttatatgttctctcaggtgtctgtaaacatttcaaaacttagcatgtcaaaactgaattcctctgaaacttacttcttctacactctkgtcttaaccccaccccccaccgcgccagcaacttgggcagaaagtcctattgtcattgttgactaccctctctaatactaatctgtcagcaaatccttttggctctactttcaatatattcatagtctaaccacttctcaccactttggtctaagccacactgtcacatcttacgtggattattgcatagccttccagatggtctctgcttctttattgctgtttccgtcgtctgttttcagtttatagctggagggaacttgttaaaacctatgtcagatcatgtcactgttaggttctgactcttgcagtggcttctcatgtcatggataatgaaaggcaacggccttaaaattgactataattatattaaactatgaactcttacttatatttctccttgttcattctgctacactcttttttttcttcttcttttggagacaacgtttcgctcttgtcattgccccaggctggagtacagtggtgcagtcacagctcactgtagcctcgacctcttgggctcaggcagtcctcccacctcagcctcctgagtagctgggaccaggctggagtgcagtggcgtgatcacggctcactgtagtctctacctgttgggcttaagtgattctctcagctcaacctcctgagtagctgggaccacaagcgttcaccaccatgcctggctaattctgaaatttttttgtagatacagggtctccctgtgttgcccaggctagtcttcaactactggattcaagtgatcctcctgcttcagcctcccaaagtgctgggattacaggcatgagccattgcacccagcctccttcattttcttttctttctttctttttgttgtcttttagagatggagttttgctctgttactcaggctggtgtgcagtggtgccatcatagctcactgcagcctcgaatttctgggcctagtccatcctcctgccttagcctcccaagtagctgtgattacaggtgtgagccactatgctcagctctgctacactccttcagatctctagttcttaatagttwttagtcaggaggtcaatatacaagattacctttttgctacagttacctataactatttagactttttttatttgaaaaaattgaggtgtaaaatacacagatattaagtctacagcatatataacaccatccacattgagacattgaacgttctcatctctctagaacattcttgtatactctttccctgtcagaagctccctgcctctcacccccacccrtatgtaaccactattcagacttacatcaccccataaattaggttttctgtttctaaacttgagccctacttatttaatactgttaggtgtaatactatagcctgaccctcttcaccaatccctgcttctgcacttgctactttttaccctgcagtactttttctttcttctgtctctcttaaccactttctracatataatttaatatgtttgatatttattgtctctctcctagaatctaagctgtacaagggcagggatttttgttctgctacaaccacccaaaacagtccctaatacacagtaagtgttcgataaatattagtgaaatgaatgaatgagaggtctggtgaatggatataaatttgtaggcaatccagatgggaggattcagaaattgaagaaaatctcatgttgtattkttgtttttagagaataagggataaaattgtcttttgggagtacagaggaggtgataggattggggttttgaagacagtgaaggaagtttgaaatgttagaagcatgggagattgaggatttgggcaatgtagatttattgcttattgttggaggctcagtgttctggccgtgagtgtggttcatgtaataccagccaatgtggttgaatgacttacttcagcagaacttagctcaggtgtagaaacagagaaagttgacagtgttttttgctgtktagtttcagtggacagccagacagacaaaggagttagccagatactgactgaagtgataataccttgagttttggctagcctgagaaagaagcgatagtcaagaaaaacagattgggatagtacaaaaggatcgtttccagaggtatggttgagttcaaactatttccaaatagacacaatgaaaaaaatagaatgggatattgataaaaggattagcagttgtcataaaagttaagataccatagttgattggttttaaggaatactttcttttccattttaacatttctaaagttgagatgccagtttaattggtaacactttctttttactattatgtgaaatgatggtgagtcttccaattaatggcagatttgataaaatacagtatttgaatgttagattccagaaatgtagcatttataggtactgacaaggttaccagggcacagccattagagaatataactaaaaaggagtcgagatcaagtatctggttagataaattatgcccatggacttcaaagacccagagtcatgagctagttgtaagagttttcagcaaatgacatggagtgactagaggtagcagatggcagcatagaaataggtagataggaaaattcaccttcaagtcatcccttctagtctcatgtgtcactttctcagaggtcttcccataaatctcctctcctcaagtctaactatggttttcctctgtactgtctcataatatcttatactttttcttgtgtaattctttattcatttctaattaatcttttattatatgattatattatgtttttctttcaccagattgtaaactcattgactgtaggaattgtttttgtgcattgcctagcacattgtcttagcccattcaggctgtatacaaactaccatagactgggtgacttaaaaacaacagtttatttctcatagttctggagaccaggaagttcaagaacaaggcaccaatagattcagtttctggttagggcccacttcctggttcatagagagccatcctctmgccatgtccttgcatagtggaagggatgagagagctctcagctctcttttataagggcactaatcccattcagtcctcatgacctaatcatttcccaaaggcctcacttccaaataccaacacattggagattaggtttcaacatatgaatttgggatgggagtggggtggggacacataggacacaytctaggcactgaataaatgaattgaaatagagaacgtaagctgtctgtgaccagattaaggatatagtactctggaataaggttctagaagccacaayggcagtacagagtacattttactaaatttgattctgtttcagtggttggcttatttgctgctttttttagctttatctgttttctctgagcctcagtttcctcctgttagattaagatactaatgcctatttaacagggttatggtaaccattaagtgagtttagyatggaaagcacatcatacagcacctaccacatagttggtgctctgtaagtgataggctgaaatggccatcttcatttttttccttctgaaaaaaaccctatgtcttacctggactattgcagctgacacctgacagtcttgcttttgtccctcctccctctcttttcttctctacacttatgttgaataattcttctaaaatattgatcatgtaatcttccctttttgtatttctataacgtctgctcattgcttgcatgatcaagttcaaactccttggcttggaattcaaagcacttcagggtccagtaccttggttctttcctaatcccctactgtcctgtgctgccatttctctcctgcctttcctgttatactccagcaacatcatgtcatttgtttcccttgcatcccacatgttcagcactctgcctttgctctggaatttctctctgattgaaatgtcctcctcctaggtctgatggagtcctattcattcttaaagttaccacctttcccaacctttatatattttcctataattgcgtgattacactgtgttataaatgtaaatttacatgtctttctttaaacaagactgtgagttgcttgagggcaaaagctatgtatttacctttatccacaacacctgtatcctagtgggtgattagtaaaagttgattgaaccaaagggactgtggagagtttacaacctatttattttacttaaaacagttactcgaaggaggagataggtttgagtgtaggtttaacagggaaaaaatcttaggtgggaatccagtagagaggggagaaaatggtcagttatgaaaattagccgtcagccattttagtactaatgtcaggctgaaatatgaacaatattcattggaaattaacaataggacacaattctactcttgtttcagaggcggaagaggagatgcaagagatctgacagaaaaaactaaatgaaaccccagagggccagagagacttgacagaaatggcagataacaaacttggtttgggcttgaaatgtgatctagcagtcaaaggaaagccagtgctattctgggcagctaacaaagaagaattgtgccacggcatagggagttggcaagagcccaccgggagtattacatttagcacagtgtcagcatgatagaaacagaaggtggtgagctctgagagcaactgtagtgctgagggggataaatacatgaatttatgaagatcagttaacaaattcaagcatgcagggttgactgaattccaactacaagatccaggagagacactcccaaatatttgaagggtgttaacattggaagaagagaagaattatttagcctggactacagaactttgtaagaaggtgaaaccaagggcagggmaaatttatacctctctaaaagaaatgccctgatgtagtttttgggtgattcgggtgccttcatccctcaggactttttgtagtatgaagctgtaaggccaaaatgaaggatttgagagttctttctctggagaaatggttgagaaatattttgrtcttgtgaataaagagtttttgtcccagagacaggttatgaaggattgatttaatatttattagccatgcacagtatattaagcactgtatacaacacagtacatagttcttgaggttctgaaataaaatgactggccattatatgctttatgcattctcagtgtgtttcagtagtttagaaactttggcaaatttcctaagactttccctttggaatagaatgatggaggaattcggccaaatgtaaatgtaaaacaacaacaacaacaacagatgaaatcctattgaaacgaatgtttcctttcacaagatggcaaaacatatatccttgagtcgggagtttcctcagtgatggggatgaagaagccttgagctgataacacgataacatgtttgttcttcaggatattttaaatgccagatagaggtgctatattgtcttcattgcgggccaggtctctgttatttctcagttcaagataggtcaagggaaaattcgttgattcacttagagacagttctgtttcctgaggcaaaggtacttgaattttcaagtgaaatggccaaaaagcccacagtatacttagatttttttaaaaagcttatatctcttcttttacatctgggcttcttgacttccatctgcttgtctacagaagccatcatgtgattttaaagataatgttgggtatgaagaatgtggagtcaggttctatttaactaggcaattgagtctttcctcaattaactaaattatcttatgctccctgtgtcagtgtggatcctccaagacagacttagaggcataaaatttattgaaccacaaacaatcaattgggagggagccaggagtaggcagggagagctttttgaatatggtgcaagtctaatacctgtgaaggaagaccgggaagaaaaggctgggtaggaaatctygcagaccacagcatagttgagaaaatcccagscatgcagatgtagagtccccaggcaaaagttgcttgttagcagaatcccgtatggggcaggtgggcaggcactactacccctgccttgctcagtcactggctgggagcagcttaggcaaagagtgctttcagtgttcatggggttggtggctagaggctgaactgtggtccatacaataggttctcttgaagcagatctgagcaacacatcttcttggttactacacttccctagcaagcttatttattcatttcatgacaaggttcaccaagttttaatgtgtcttgccatataacatttacaatagcataataaatactagggaagatagaaataaaagtagaaactcaaagaactaactattactattcctctagataaacaaaaattttctggggtatttttcaaggaggattcacactgaaaatactgagtgataatgacttcattgtctataatactcgtgcaataaatatatttagttgttttattttctaatggctcttttatgtagtgtgttttgagaaaacccaagggtttaacattataacacaactcattgatgataagtatrtggaagctaagattatatggaagagtcaggtagctgacagtctgtatggttagtatggagaatagatctctgaattttcagagaaggaaatggactgaacagcatttaaataatcttgcataaatatgacttctatcaaacaaattttgtgttattctttttttaagagacaggtcttgctatgttgccatggctggacttaaacttctgggctcaagtgatccttccgcctcatgctcttgagtagctgggactacaggcatgtgccactgtgcccagcttataaaacaaaattttggtaaaaagcttgaaacaacagactattcaaaattatattccttaaaatagaaagtctattaacagacccaaaacatatgtaatataagataaaggtggcattttaaatccatggtggtgggtaagattgtggaagataacggattatttagtaaatggtgtagagaaatttgggtagccaatatggaaaataaactcgtctccatacctcacattttatattaggaaaaattccaaatggatcaaatattaaatgtaagaaatggaactgtggtcctagtaaagtactaaaagaaaccatgggagaattaaaaaacataattgtgtatagtatagtgtgataaaatattccagaagccacaaaagaatagactgtattttttttttttaatttcagtaagttttgggggaacaggtggtggttggttacatggataagttctttagtggtgatttctgagattttggtacacccatcacctgagccagacagtaaattcgactatataatttttttttttaatttgggggtaggggatggtggcatggcaaaaactactataagcaaagttaaaagacaagtgagaaactggggaaaatatttgcaactcacaaagggctgatttccctaatatataaagaactctaaaaatcagtgagaaaaacaagaataatccagtagaaataatgggcaaagaatgtgaacagatagtttagaagaaatgaaatacaaatgtcacttaaactcatgaaaataaacacaggctgggcacagtggctcacacctgtaatcccagcactttgggagkccaaggcaggtggatcacttgaggtcaggagttcaagaccaacctgggcaacatggtgacacctgtctctactaaaaatataaaaattagccaggcctggtggtgcccacctgtaatcccaactacgtaggaggctcaggcaatcccttgaacccagaaggcagaggttgcagtgagccaagatcacaccactgcactccagcctgggcaacagagtgagactctgtcgcaaaaaaaaaaaagaaaaaagaaaataatcactgtctaactcttgattaggggaatgcacataaaaactactcagagatactattttgatgtctcagattagcaagtacctggaaatttggtaataaactctattagagaatatgtggggaagcagacgcatgttggcaattacttatctgctgtcttaccacaatagatttgtttgcattttctagaatcttaaacatacaatatgaactcttatctggcttccttcactcagcaaaattattttgagattcattcacgttacagcacgtatcaatagttcattcstttataactgaatggatatactgcaatttgttatcaggtttactgttgatggacatttgggtggttttcaatatgaggctattacaaataaagctgttgtaaacatccgtgaacaagtctttgtatatacatatgctttcatttttttttttaggtaaatacaaaggagtgtaatagctgggtcttatggcagatttatgtttagcttttattaaaaactgcaaactggtttttaaattggttgtattgttttatattcatgacaatagtatgtgagaattcccatttctccacattttagtcgttctaatgggtgtgtagtggtttttgtgtttaatttgcaattccataatgtctgatgataaatccatgtgcttttatttttatttatctttgtaaaagtgtgggtgtctttttgcctaatttttaattgggttgtttgtctttttgttgtaagtgttctttatatgttctaaatatataaatacattgccacataatatattttgtaaatattttctaccagtctgtttggcacagtgtctttttatcactgtttgtttgtttgtttgagatagagtcttcttctgtcacctaggctgcagtgcaatggcacgtctcggctactgcaacctctgcctcctgggttcaagcgattctcctgtgtcagcctcctaagtagctgggattacaggtgcatgtcaccatgcatagctaatttttgtatttttagtagagatgcggtttcaccatgttagccaggttggtctcgaactcctgacctcaagtgatccaccrcccatcccaaagtcttgggattacaggcgggagccaccacgtctggccttatcacagtttttaaaaaaattgagatataaataatatgccataaaatcttcctttttgaagttcagtggtttttagtatattcacaaggttgtacaaccatcagcatcatctgattccagaacatttttgccatcctctaaataaattcccctacccattagtggtggtattttcctccccccagcccctggcaaccactaacctactttctgtctctcgatttgctgattctggactttcatataaatggaatcatacaatgtatgatcttttgtgtctggcttctttgacttagcacatatcattacttcattcctttttattgccaagtaatgttacattgtatggatatacattttgtttatccagtcatcagttgatgcacatttgtaaaacacaatgtctgtatcttaaccttgaatcctacaaccaagctagactcatattagctttagtacagttttttttgtaaattccataggttttctacatacataattgtttcacctgtaaagacaattttacttttttctttccaatttgattccttttatttcctttttttattgcactgattagaacttgccatacagtgttaaataaaaatacacagaagattcttgttctcaatgttaagaagaaagcattcagtttttcatccttacgtataatgttaactgtaatttgttgtagatgttctgtatcaagtaaaagcgttctgttctagtcttagttttccaacaatttttatcaggaatggatggtggattttggaaatactttttctgcacctattgagatgactgtatggtttttcttttttagtttgttgatatagtaagttatattgattgattttcatatgccagaccaatcttgcattatgagataaaccccacttggttgtgatattattcttttcatatattgctggaatagattgtctaaaaatttgttaagaacttttacatctgtgttagtgagaaacattagtctgtggttttcttctcttactatgtctttctatggttttggtatatgggtaatgcaagccttgtaggatgggttagaaagtatttctccttcagttttctgggagcgtttgtatggaatttgtattctttctttgtttttttttttttttttttttgttcttgtttttgtttttgttttttttttcagacggagtctcactctgttgcccaggctggagtgcagtggcacgatctcggctcaccttaacctccacctcccaggttcaagcgatcctcctgcctcagctctgctagtagctgggattataggcacatgccaccatgcccacctaatttttgtatttttagtagagatggggtttcgccatgttggccaggctggtctcaaactcctgacctcaggtgatccacctgccttggccccccaaagtgctgggattacaggctagttcttctttaaatatttggaattcaccaagtaagccttctgggccaggttttgtgtgtgtgtgtgtgtgtgtataggaaggtaaggttttttgtttgtttgtttgtttgtttgycstgttacccaggctggagtccagtggcgtgatcttggctcactgcaacctcttcctcctgggttcaagcgattctcctgtctcagcctcctgagtagctgggattacaggtgcctgccaccatgtctggctaatttttgtatttttagtagagrcgtggttttgccatgttggccaggctggtcttgaactcctgacctcaggtgatctgcccgccttggtctcccaaagtgctgggattacaggcgnactgcgcccagccaggtaaggttttataaaccacaaatttaatatctttaataaatatttctatatattctatatttatagagctatttagatttactcttgaatgacctttgkgcctttcaaagtatttgktgaatgtcttagcaaaaagctgttcataatttttcttttttctttttcttttttttgagacagggtctcactctgttgcccaggctggcatgcagtggcatgatctctgctcactgcagcctctgcctcctgggctcaagccatcctcccacttcaccctcccgagtagctggggctataggcgtgcatcaccatgccaggctaatttcgtatttttttaggggtggggttttgccaggttgctcgggctgatctcaaactcctgagcttgagctcaagtgatccacctgcttcagcctcccaaaatgctgggattacaggtgtgagccaccatgcctggcctattttcttatttttattttaaaattgtagaattctagtgagggttacctctgtcattcttgatattattcctttggatcttctctctttttctcctgatcggtctgactaaatgtttatgtagttcattgatcttctcaaagaacaccctttggttccattgattttctctattgcatttctcttttttattttaaaatttctgctgtggaaaaaaatcttctgtttgcttatggtttgttgattctttttctagtttcttaaggtggaaactgaggttttttatctgagacttttcttcttttctaatagaggtattttgtactataaatttccctctaagtgctgctttaggtgcatttttgatttgctgtgtttttagtctgtttaaaatatttttaaattctcttgttccttttactcctgggtaatatggaagtattgtatataatttcaaaatatttgagggattttccagacatgtttctgttttttaatttaatttcattgtgttcagagaacatactttgtatgacttgaattcttttaaatttatttaaattcgttttatggcccacaatatattttatattgttaaatgttctgtgtaccctcaaaaagaatatgttttctgctcttgttgggttgagtgttctataaatgtcaattaggtcaagttggttgttagtgttgttgaagtcttctgtatctttcctgctttttctatttgtcctatcaattaataagagaaaggtattgaaatttgtagttagaattgtaggtttgtctattccttttggcagttttgtcagtgtttgcttcatgtatttgaaacttagttatcagatacataacatttaggattatgtcctcttgatgaattgacttctttatgattatgaaatgatatcctttagtcctggtgatattctttgttctgaaatatactttacttgatattaatatggcccttttagctttttttttttttttttgacagagtctcactctttcgcccaggttggagtgcaatggcgagatctcagcccactgcaacctctgcctcccaggttcaagagattctcctgcctcagactctcgagtagctgggattacaggcaccygccattgtgcctggctaatttttgtatttttgtagatttcgtagattttgtagattttgtagatttttgtagatgttggccaggatggtcttgaactcctgacctttgatgatccacccrccttggtgtcccaaagtgctgggattacaggcatgagccaccgtgccctgcccagctttcttttgattaatattagcatagtatatctttttccattctttttctttcagaatgattttatctttatatgtaaagtagatgtcttataggcagcatatagataggtcttgcttttatstagtctgacaatctctgccttttaattgggatgtttagaccatttacatttgatgtgattattcatatggatgtgtgtaaatctgccatcttgctgtttgttttctatttttcccacctcttctttgttctcgttttcttcttctgtttcttttggattaattaagcatattgtaatcattcagttttacctccatattggcttattactttttatttttgttttgagatggagtcttgctctgtcacccagactggagtgcagtggcgcgatcttggctcattgcaagctctgcctcccgggttcacgccattctcctgcctcagcctcccaagtagctgggactacaggcgcctgccaccacgcccggctaattttttgtgtttttagtagagacggggtttcaccrtgttagccaggatggtctcaatctcctgacctcgtgatccacctgcctcagcctcccaaagtgctgggattacaggcatgagccactgtgcccggcctggcttattacttctaactctgtttccttttttgtaattgttttagggtttgtggtgtaaatggtgtacatctttaacttatcagacacctccttcatgtgatattacagcacttcacatatagtatgtcaatcttatgatagtgtacttccatttctttccactcagccttcacrttattattgtcatacattttagttctgcacataactccacagtacctttttatttatttttttataaaaaccttcaaggatatctaaataattgtaaaaaatgtttgtatttaccatttttggtacttttcattcttttgtgtagatctgtctttccatgtggtataattttccttgtgcctgagggacttcctttaatgtttcttgtactgcaagcctggtagtgatgcttttttccagcttttatacatctggaaaagtctgtattttgcctttgtttttgaaggatatttttactgggtatacaatattaggttaacagggttttttcgtttcggtttttaaagatgtttcattgctttattgtcacttgcatggtttcctatgagaagtctgttgttaaccatactttttttcatttgcacataatgtggggttttttcccctctcgatgcttttaagttttctttatcactagatttgagcaatttgattgtgatgttccttggtgtagttttgtttatacctttgtgcttggggtttgttgaggcttttggattaatgggtttgtagttttcatgaaatttagaaaactttcagccattattctattttctataccccttttcttacctttcctttggagattccatttatatgtaattagaccagttgaagttgccctccagttcatgaatgttctgggtttgttttattttgttttgttttttctttttctttttttttttgagactgacttttactctgttgcccaggctggagtgtagttgtgcaacctccacctcctgggttcaagcgattctcccgcctcagcctcccgaatagctgggactacaggcacgtgccactacgcctggctaattttgtatttttagtagaggcgrgatttcaccatgttggctaggttggcctcaaactcttgacttaatgtgatccgcccatcttggcctcacaaagtgctgggattacaggtgtgagccacctcgcctggcttaagttttttaaatgtgatttttaaatgactccataatgtgttccacttggctgaatgtctaagattttcttcctttttttcattaatcgaaataatagtgtgatgaacatttgtatacaaaaatattagtatacatctgtgatcattttcttagaataaatttctccttaagacttttaatatgtgttgcaaaatgctgtccatatatttttgtatcacataaaaaacaaaaaactcctggctgggcacagtggcttacacctgtaatcccagcactttgagaggctgaggtgagtggatcacctgaggtcaggagttcgagaccagcctggccaacatggtaaaaccccatctctgctaaaaataaaaaaattagccgggcgtggtggcaggcgcctataatcccagctacttgggaggcagaggcagaagaatcgcttgaaccaggaggcagaggttgcagtgagctgagatcatgccattacactccagcctgggtgaaagagtgagacgccaactcaaaacaaacaaacaaacaaacaaaaatcctcctatgaaaactgctagttttaatggcaggggaacattcaactacttgaactcctattctttaggagggccaggattgcttgcttgacaccagtatatcagaattttaaagtgaaacttaaaggctaagaagaaactaaccatatgaagaataggggaaataattacaagcagaatgaactgcagtgcaaagcctcaagatacaagggatgttagaagaatggagagaaaccgagggtagctagagcatagtgagaaagagagtctgtcctaaaaggagattgcagagaggcaaggactggatcatgtaggaccctgagggtcaaggcaactatgctttggactttattctaagtgccatgataagccattgaaaggctgtaagctggggagtttatggtgttgtgtagaggaaggtggtttagagagtggcaagagtggaagcaggatgaccagctagaagatacgattctttactatttctcgatcactttatcatatatattaacatatgttactgctatggactgaatgtctgtgttcctcccaaattcatatgttgaagccctaattcccagtgtgatggtattaggaggtggggcctttgggaggtagttaggtttaaatgaggtcataagtgtggagtctccatgatgggattagtacccttataagaaaaggaggaaacaccagagcttcccctctccaccatatgaggatacagcaaaacaatggctagttgtctgcaagccaagaagtgggaccttgctgagaaccagatttgttgcacgttgatcttggccttcccagcctctagaactgtgaggaataaatgtctgttggttaatccacctagtctgtggtattttattatagcaggtcaagcagactaaaacatctaggaagtgataaagaagaaaatatatatctgagacggagtctagctctgtcacccaggctggagtgcagtggcgcgatcttggcttactgcaacctctgcctcccaggttcaagcaattctctgcctcagcctcctgagtagctgggattataggtgcccgccaccttgcctggctaatttttgtattttttgtagagacgaggttttaccatcttggccaggctgttcttgaacttctgacccggtgatccacccaccttggcctcccaaagtgctgagattacaggcgtgagccaccgtacctggccaagaagaaagatattttaatattttaatttattattattattttttttcagactgagtcttactctgtcacccaggctgtagtgcagtgatgtgatcattactcactgcagcctcaaactcccaggctcaagcgatcctcctgactcagcctccccagtagctggtactacaggtatgcaccaccacacccagctaattttttaatttttcttttgtagagacgaagtctcactgtgtggattagcctgattttgaactcctggcctcaagtgatcttcctatgtctgcctcccaaagggctgggattgcaggcatgaggcaccatgcccagctgagaaaactattttaaaagtaatgggaaactatcacattattccctttggctagttatgctgcatttcctgatttggctttgtttgtttgtttgttttgagagagagtcttactctgttgcccaggctggagtgcagtggcacaatcttcgctcactgcaacctctgcctctcgggttcaagtgatttgcctgtctcagcctcccaagtagctgggattacaggcatgggccaccacgcccggctaatttttgtacttttaattgagatggggttttgccatgctgaccaggctggtcttgaactcctgaccttgtgatccacctgtctcagcctcccaaagcgctgggattacaggcttgagccactgcgccctttttttgttgttgttttttgttttttttgtgagacagggtctcactctgttgcccagactggtgtgcagtggcacaatctcagctcaccgcaacctccacctcccaggctcaagtgattctcctgcctcagcctcccaagtagctgggattacaggcgtgtgccactaccacccaactaatttttgtatttttagtagagatagggtttcaccatgttggccaggctgctcttgaactcctgacctcaaatgagccacccgtctcggcctcccaaagtgttgggattacaggcatgagccaccatgcccagcctgatttggctttctaatgctattgctgcatacctaacatttttcttctattttatgacatccctaatcagtatttaagctttgaatgtttattctcctgttttgcctagataatttgtttttctcctttattttcttaaatacatggaatcttttattatgcctctaatatagtgttctcaaactgacttgaatgtggattttaaattttttaaaatgaaatatctgcctgggacaccctttgaaaagctaggccagaggattgggttccagtgattaccaaaggcttatggtcaaccaaatgagagaatgcagtaaaagaattacaaccaaatgcaaccaaagcaatgagagaataccttgcaggatctggtcctggaactgctattaatgttttttattttgttttgtttgagatagggtctcattctgttgctcgggctggagtacagtggcgcgatcacagctcactgtagcctccacctcctgggctcaagcaatcttcccacctcagcctctcaaggagctaggactacagggcaagtgccaccatgcctggctaatttttttttattttttgtacaaataaggtctgcctatgtcgcccagactggtctcaaactcctgagctcaggcagtcctctaccttggcctcccaaaatgctgggattacaggcatgagccatgagccaccatgcctggtctattaatgtctgtagattgatttcttagataatgatgtagagattatgttaatcatgaatatggatgtgatattacaccaaggcaggaatgaaggcaattttgtgagaggggaatggggctttggaatctgtgaatcaggttaaaatcttagttttagcctttgctaggctgagtagcctttggcaagttgcctaatttctttgtcttcagtttcttcatttgtaaaatgaataggatgacacctactttgtgtggtttttgtgaagagcagataagacgtataaggtataaatttctttatccacttttattgttgttctgtaccatcttggaagatggggatagaatctgttataatgttaataaattggagaaggggcaaagcaaacaaggaaatttagtgagaatagttctgaataagtataaatatagcatgtaggatcaacagagtatagggttttttacttggatgtttggaaccttgggaatagaaaaccttttttaaaaatttaatttaattttttaaaagacagatgaggtctcactctgttgttgccgaggctggagtacagaggcacgatcataggtgagcttgagctcacctcctgggctcaaggaatcctcctgcctcagcctcctgagtagctgggactacaggaatgcaccagcgtgcttggctaatttattttctttgtacaagtgggttttcactatgttgggctggtttcaaattcctggcctctagtgatcctctcaccttggcctcccaaagtactgggattttaggcgtgagccgctgcaccctgcccaaaagctgttctgtttgtaatagtgaaaaatggaaacaataaagtaacaaaagaatgattaaatgaaccatatgtagtacactcatgcaatgaaatattttccagtctttcaaaagaatgatacagatctatatatttggacatggaaaggtttccaggatactctggtacatttttttttttttttttgagacggagtctcactctgtcgtccaggctggagtgcagtgtcgccatcccagctcactgcaagctccgcctcctgggttcacgccattctcctgtctcagcctcctgagtagctgggactacaggcgcccaccaccacgcccggctaatttttagtagagacgaggtttcaccgtgttagccaggatagtatccatctcccgacctcgtgatccacccgccttggcctcccaaagtgctgggattacaggcgtgagccaccacgcccggcctctggtacattttttaaaaaaggaaattaataaaccacttttgtagtaggatggtgtatgaccatatttgtattttaaaaattatgttatgaacatgtctatgaactcatagataaaggtctggaagggtgaacttcaaatcgttagtcatcataaacaacttctataccttaggcttgcataaataaaaatgagactgaaaaggtactgtaagaagccatcagagattgttttctaaatatgatataaaacccattattcacaagaccaatacattatttacataaaaattaacctccaaatatgggaaacttccagcagttctgaattgatgggttttctattagaatcctatattttttcattctaaaacatagattattaaaagatttgcatatttttaatgtataaaactctgtgcggatgaaggggtgagaagacgaacatttttatacaccctgatagaaatataaatcggtgcttttctggcgggtactttggcaatagagaacatgttatctcttttgacgtagagttctacttataggaatttattttaatgaaaaacaatcacagacataaagatttagatttagcatttattgcattgttatttataatattataaatttataaacaacaatatctgacaataaaggattttaaataaagtaggatacatttattcagtggactactagccacataatatattgtagaagtgtaaaattgatgcaacgtatgttgttgagtgcttactatttaccagatttgttctaagtacattattatttaatcctggccgggcgcagtggctccatgcctgtaatcccagcactttgggaggccaaggcgggcagatcacgagctcaggagttcaagaccagcctggccaaaataatgaaaccccgtctctactaaaaatacaaaaattagccaggcgaggtagcacacacctgtagtcctagctactctggaggctgaggcaggagaacctctcgaacccgggaggtggaggttgcagtgagctgagactgcaccattgcactccagcctgggcaacagagtgagactccctgtcaaaaaaaaattttaatttaattaaaaaatatatatatatataatttaatccttagaataagcagtgagacaatcatttcttatttcattttacatataaagtaacttgggcactgagagaggttaaataacttgtctaaaatcacatagggagtgggaaagctgggactcacttttatctgcctgacttcaaaattcatacctcaattactatatttaatgattttataaatataaaaatatggcataatacttacataaaaaaagttataagatgatatcattgttttgaagaaggatttattctaaaatgtcagcagtggaaatagttgagtattgggataatggttaatttttgtctcttcttttattattgttttccacagtgaacatgaatgactttcataactacagtttttaagagatactcatttcatagcagaagggtggagtgtattaaaaaaataaatattccttcttcccctctgtttctgggtgtatttctgagatatatttctgartttgggtgtattcactcctgaagttgcatgtaattgcctcttggcactagtttataaaaactagaaagttgaaacagtgatgttattctgagatctgaagatgtaggcagatgaaatatgtttaaataatgacattttaaccattattcagtttcctagatctgggaccggggccactggtaacaggattcagaagccagaagcacagtaccacacagtgagcaattccccagactcgtctctttgagcttttcactagaaaatccttcttcacctctcctttctcccaattcctttttattaagagtcttttaacctggatgaacataatttgagccgatcataaacaaatagctctcttttttgcctgactttatgcatttctgttgccatgtaaaccaaataaagctagctgtgagcaaaccagctgctgcctgcagcctccttccctagaggaagggaaagggtggtgaaggtaattgggaaggactataagaagggtagaaattgagggaagagagtattctatttacatttctggtcctgattctcactctgtttatttggctatttagaatatgatgactatagttgacttagtcattcttcccagcagctgagagatatgggtgactaataattttttctctatttgtttgcatgttggaaatggttactattgaggggtggaattaatagagtctaagctatatttcagaactggaaaacttggaaaatgaatggttgtagggaatagcatgggatttatgattttttgtttcaaagagttacgctttgggtactggcattaaaaagtagttccaggggccaggcacggtggctcacgcctgtaatcccagcaccttaagaggctgagtccagaggattgcttgaggccaggagttcaacatcagccctggcaacttagygagatctcatctctacccaaaaaaaaaaaaaaaaaaaaaatttttttttargttccaaggtgtctaattgaatgtgccctagaggcactgtgcaaagactacatataggtggtcagtgactgtcaagtatttacactcacaattgaaaggacatgacagctgaggcctaaatcacatgacgtagtaactaggtaagtacttggaatcattaatgaaaagacaatgaggtgtttgcttaaattataaatattgattaggggtagtagaggtaatacgttattatgagaagagaaaagtgagtgtggcagttactcatttagttcagatatggggaaaaaaagtcatctcttctctgagctcaggaaactttggaagtcaatcagcatcagatacaccaatcctcagaccctatagtgccacccaaaactaaatattctccttcagatggtccagttcatccttaagctaggaaagagcaaaaattaaataagaagaaacattgtaataatcttaagtttctcactgggctgtaaggttgatagtgaacttatgtgtaaatatccaaaaacatttttttgaaaaaacatttttttcatggcccagtcttcatttcttattgtctaattatacacatatgagtaatgcatgtatttattcctatcccctttttcttacacaatagggtagtataatatgaaccttgcttttttcccatatgagtacaaagaaagtttcctctttttatagctgtataatattctgttgttggatgtacctcagtttatgccatcagaaccctgttagtggatagttgagttgtttcaaatcattttaagctgtaattttactgactttaagtctcttttgttagcaatcccactttgaggccaggctacagaagttagtatatagaaaacaaatgaatataagtaaaaaactacaaatccaactttagttctaatctgggctgtgggaagatggctgcctaacttcaaagttatgctaccttcatgcagtcctctctattttgtttttctttgctgccgtctatgtatttggtgatgtttggtttgttgtcttctaatttttctttcatggttacttcctgatcctatctaatacaccagccttcctaactcctagttagagctttgttagaaaattgttagacatgcagatctttggattttactgtcgacagacgatagcagttttcagtctagatgatgatgggattcctcctatctaccttgccggaagctctgtgaaaatcttaatacttggataatgcacttctactatcactgcttccctgctaacaaagtacacttggtaacaaatttgtattagtgatacttaactgccccaggaggctggtacctgctactgctggtgggatgtcaaaatttcttcctgctcagtaggggtagagacaagcagaattgagaaatgctgtttaaatctgtgaatttaaatctgggttctttggaggaaggcataaaggggtgattgattaatatcattttggctgctcttctgccacaaggaatatgagtagaataaagaaaggaagaagaagatacaaagaaattcaggttagagaagaaacactacattgagaatcaagaagcatggattttgatctgtattgttactaatttggtctgtgatttgatctatattctgttaatgatttggtctgtgatttcacttctctggtcctaagtttttgacctatgaaattagtggtttggaatttttttaaaaattgtctgaaattctaaggcagaaaagagaagtaaagcagcaggccgggcatggtggctcatgcctgtaatcccagcactttgggaggccagggcggaggactgcttgagcccagcctggacaacacggtgaaactctgtctctacaaaaaataaaaataaaaaaattagcctggcctggtggcacatgcctgtagtcccagctactggggaggttgaagcaggaaaatcacttgagctcaggagttcaagaccacagtgagctatatgatcacatacctgcactttggcctgggtaacagagtgagaccctgtctaaaaaaaaaaaaaaaatccatattgttattaaataatataaagaggagagcttgtctgttaaagaaaaatacctattacagttagtgttgttgcatagcaaattattcccagaatttaggggcttaaagtaatcgtttactttgcttctgattttgtgggtcaggattatgggaatggctcagctggataattctcatttcgggtttctcatgaggctgatgtcagatggggctacagtcatctgaaagctcagttgggctacatgtccaagatggctcattcacatggctggcagttgattttggccatcagtcagagtgtctgcatgtagtctttccagcatgatggtctcaagatagtcaggttttttacatggtggctctcttctaccagcgtgtcccaaagaagaccagacagaaactgcgtgacttttctgaccttgtcttgaaagttacgtagcattacttcccctgtactatattggttgaagcagatacaagcatgcccagattcaaggggacaggtcctaaatcccacttccgtgagaagaatgtcagagaatttgggggccacgtgtttaaaactgccacattttctcttcatagagtagatggcttctattgagaatagcacataagtactgaagtttcttttcttttcttttctcttctcttcttttctcttctcttttctttccttttttttttttttttttgacggagtcccactctgtcacccaggctggagtgcagtggcatgatcttggctcactgcaacctctactcccaggttcaaacgattctcctgcctcagcctcccaagtaactgggattacaggtgcatgccaccatgcctggctaatttttgtatttttggtagagacagggtttcgccatgttggccaggctggtctcaaactcttgacctcgagtgatccacctgcctcggcctcccaaagtactgggattacaggcttgagccaccccacccagcctgaagtttattctttctttttgcttggttgaagcacaaccaagcaaaagaaatgtgtttaaaattatgatcacagaataagtgttacaaatttttcagtggtaacttaatccagatagtaataacccatacattaatttcttgcctttctcttgtatggagattatgcacaggagtttggaccttattctgtagacagttgggaatcacttgaggcaggaagtatagaagttgattagaaataggtaagactggaggcaaaaagagtagcgccaattcttttcttccccaagcagtgcaggtgagcagtgagatccagaactggggcagtggcagttgggatagasagatgtttaattcaagacatagtaaaacattaataaaacgtaattttttttttgagacagggtctcactgtcacccaggctggagtgcagtggcacgatcacagctcactgtagccgcaatcccctgagctcaagcaatcctcccacctcagcctcctgagtagctgggactgcaagcgcaagccaccgtgcctggctaawttttaattttttgtaaagacgggtgtctcatcatgttgcctaggctagtctcgaactcctggactcaagtgatccttctgccttggcctcccaaaatgttgggattacaagtgtgaaccactacatgctggctaacatatttgtaaagaaattatttatattcraatagctagtaaataaatgaacaaaattcaaaatgttcaaaaggatagataataaaaataagttttttatcatctcttctcccctacttgcccagttttcccctaaggctatcactattactatttttttgagtgtatttccagagattctatgcatatacaaacttacttttatcgtactgtattcactattctgtaccttgcttttttcacttaaaatatatcttggagatagtttatatcaaaacatatatagctgccttgctgtcttaactatagaggattccattgtatagataggccgtaatttatttatttatttttattttttatttttttggagatggagtctcgctcttctcccaggctggagtacagtgacgtgatctcagctcagtacaacctccacctgccgggttaaaacaattctcctagttcaggctcctgagtagctaggattacaggtgcacaccaccacgcctggctaatttttgtattttagcagagacagggtttcatcacgttggccaggctggtctcgaactcttgacctcaggtgatccacctgcctcaacttcccaaagtgctgggattacaggtgtgaaccactgtgcccgtccatgccataatttaagtcagtcttctataaggatttaaattattttcagtctttcttttytttgagatggagttttgctcttgttgcccaggctggagtgcaatggcacaatcctggctcactgcaacctccacctcccgggttcaagcgattcttctgcctcagcctcccaagkagctggaattacaggcatgcgccrccatgcctggctaattttgtatttttagtagagacgggggtttctccatgttggtcaggctggcctcaaactcccgacctcaggtgatccacctgccttggcctcccaaagtgttgggattacaggtatgagccaccgcgcctggccagtttttctttacaacaaaaatgctttaatgaatatcttcattatttcatacatggggaagtatatctgtgggacagattgctagaggtggaattgctgattccaaggatgtatgcattgtacttttttttttttaagagacagggtcttgctctgtcactcaggctggagttcagcttactataacctagaactccttggctcaagcaatcctcctgcctcagccttctgagtagctaggactaaaggtgtgtaccaccacgcctggctaatttgtaaattttttttttctgtagagactggaggtcttgctgtttcccaggcatgtgtcaaactcctggcctcaagtgatcctcctgccttggcctcccaaagaactaggattacaggagtgacctgctgtgcctggcctaccttataaattttgatagatattactaaatggcttttcatggagaatagaaaccagtttatattctcacctgcagtggatgtgagtagctgtttcctgcaacttcattagcactgtgttatcagactttcggatctttcctgttctgatggatgaaaggtggtatgtcattgaagtttcaatttacatttctctttaaggccatttgtatttatttctctttctatgtaaactggtgacatgctctgcgtacttgcctgttggattgttggtcttttaaaaaatcaatttgttggagctttttgtatattgaagaaaaaggtcctttgtaatatgaattgtgaatatttcccccaatttgtcatttgtcttttgattttaatgtagtttaatagagcttaatttcttaatagtgtcttatgtagtttgtgtcacatataggccctgtccactttacgattattttaagtgatgggtctctttcaaatttctgcacatcctttgtgttcggatctcacttcctactttaatggaaaaatagaagctattaagactttcaacttgctcctttccttttatttggaaaggcatcctgtttcctaagttggtattgatttgttatctaattctcagtgcccttattatatttcagtgatgttgccacattgattcttcaacttctccctcggttctaacttcacattagccatttaggttcttgtctcttatgtttgcttatttgtttgttttaaagaaccagttctaggtgtagaaaaacagacactcatacgttcatggtggaagtgcaatcttggtgcagtcaatttggagggcagtttgagagttaatatctctcaaacctaaaaatgtatgtagtctttgaccaaattatttcactttttagaaatgtaccctattgatataccaaacatatatgaaaagtatatacaaagatataagttactgcagtgtttgtgatagaagaagactggtaactatctttgttatatttttcagtagttatgtatccatctatgtttccatgcctttaatgcagccattaaaattcacaccattctggggactattttttgccatttttcttttcatttttagagacaggatctctcactgttgcccaggctggctcatcgcagcctcaaactactgggctcaagcaatcctcccacttcagcctctctggtagctaggattacaggtgcattctgccatgccttgctaattattttttttttttagagataaggtcttgctttgttgcccaagctggtctcaaaatcctggcttcaagtgattttcccacctcagcctcccaaagtgtgggactacaggcatgagccacctcgcctggccactaattgattttcttttagaattttgaaggagtacactgttatccagttttgctcttgttgctctctttttccttttcctctgctctttttttttttttttttttttgagacggagtctcgctccgtcgcccaggctggagtgcagtgacgtgatctcggctcactgcaagctccgcctcccgggttcacgccattcttctgcctcagcctccctagcagctgggactacaggcgcactccgccacgcttggcttattttttgtatttttttttagtagaggcagggtttcaccgtgttagccaggatggtctcgatctcctgaccttgtgatccgcccgccttggcctcccaaactgctgggattacaggcatgagccaccgcgcctggccccttttcctctgttctttatgactttctgtcctgatctgccagtttaaaaaaaatagtttttcaggccgggcgcggtggctcacgcctgtaatcccagctctttgggaggccaagacgggcggatcacgaggtcaggacatcgagaccatcctggctaacacggtgaaaccccgtctctactaaaaatacaaaaaaattagccgggcgtggtggcagttgcctatagtcccagctactccggaggctgaggcaggagaatggcgtgaactcgggaggcggaacttgcagtgagccgagatcgcgccactgcactccagcctgggagacagagcgagactccgtctcaaaaaaaaaaaaaaaaaatttctcccctttgtcgttttatctactgtttataaaattgtttttaacttcctcttccaattcttctattgaaattttaaattccattatttttaatttctaagaactgcttttacccatttaagagttttttaaaaattatgaattgttgaattttatcaaatgctttttctatatctattgagatcatatgatattttctcctttaatccattatggtggtaattctacaaagtagtattttaaatgtttaatcactcttgaatactttggataagcttatatgatcatgctttttttacattgctgtgttagtttgctattttgttcatgagctcatattttgtatatatatctgtgtccatgattgaaatcagtatgtaattttcctttgttgtactgcccttgtctggttttggaatcaaggttatgctggtttgatcaaaagttggctggggctgcaaattatactgacaaaagacaaattaacaagagaaaaacaaagtttttcttttcttttcttcaaagtttatgcatggcacatacataaggagagctcagtgatgagtaactcaaagaggtagttagaacttggggttacatagcatcttagcaaagaatagaaattttttagagaagtgacaagacaaaggaaaaggacattgagcttctaggggtagcaagtgtgggaacacaaatatatggagaaactaggtagataaaggctagttagcaaggtttgtttgtgttgactctcagtgccatcctttctccagtgatgaggctttttatctccttcctggtaagggaagtggttgggggacactttcacaagggtagaggaaaggtggatgtggggagggaggctgagaacttctgtgtctgctttttctcaactgccttcagtgtgaaatagttcttatgccagggtagcatactctgaaccccttcgttagaattaactaaaagcatagcatataattctttggtaccacttaccagagaaagaaagggaaagtataggaatgaagagatctggcggcggcagtggctggcagggtggtgatggaggtgggaggcagatgaagatggaatggaggactgagtatgtgtaagtcattgatagcagtaaaagtgactattgtccccaaagctttcttgtygaatgcctgtgaatttcgagggtgggaataacacactcatggttatcatatgaaacctatttgtggcaagatagtagaaataaaacaaactgtgtaatctgtccacgatcttgagaatttaccaacacttgggaaaaaatagcaagtgcttaaagagaagaatatcagtgtaaaggagcatggactacaagtctgttaagtggtacaggcagtaattacaaccattaaaccactcagaagaatggtttatctccagggttataaaggtaaagctttatgtgggaaccagcatgtactttggcattaagagaagggaaggagaacagaaagtaaatagaaagagtttaataagaaggagacagagcaggcattttaaactgaggaaattatatgcaaaagtacaggggtggagttgggaagggacaccagtgttgaagtattcctgttacttgttggtatcatcattcaccctatcagctggtaggagagcaccagaaacccaagtcttcttagactcctcctccccattaactcaaaggtaatatccagaagaaacaaagaacatttgtggaaggagagtaagagtcatgactcagttttgatcctaagtgaccagaataatagattttaaaaatatatgggtagggaggtagtttgaaggagacaataatgaagagagagaccctttcctttaaaataggaataaagaagcaaaaggtaggtgaatataccaagaacttccaattaaaagatgagggaacttgtagtaatctcccttctgtgtgttagagaatgcggctatgtagctttgtaccttgagggacttaacaagggttaattataatcaactgttgaaacacactgttctaaacgcagtattattcacttgccacctattttgggagttcatgtataagcatataaaattaccattagactgtttcaaagtggtagaccttattttaaagtaagagcatttaytttacatgtttaaaataagggatatgtaaatctttcctttctccctactcacctctgttcaccacaggcagtcattgttgacatcatcttgtgcttcattctagaaaaatttggcatatatgtatataatattacacgttatgtgttacaagtatatattaacatacatatcttgataatgtatttatactatgtatcttgaaacaatttcatttacatcttttaattatgtgaaatcttttctcttttcctttggcctctggccccatttcctttatatagggaagtatactatggggatataaattccaaatacctgttttgtttgtctatccaattttctatttcattgcattcacattggattaaagttgcttaaaatagcaaaacattttccttttttatttaaaattttttgtcttaaaaagcatgaggagaaggcatggaaatattagtcacatttcttggtattcaatattcctgtgagtagtgtttattaaaagctcatctttcttgcttggcatatccgtacagtttcctcccactagagggcactaggatattgtttgtttttagtggtctgtttatgatgaacttagcattaattttcatatgttttcttatttgtcctgcattataataggaattaaatcgtcatgctgatgtcactttgttagcgatatatggacaattaaggcaccttccctgctatcaattatgacttcgaagactattttgtgcttaatacttaagaagaaagggagagggggagcttagagcaatgggaagttccagaaatagacctctacctatagaatgaactggattttgaaaaagaagccaagataattctgtggggaaaaatttttctttccaacaaatggtgctggaacaactaaatactgtttgggggcaaagtgaactttgtttctgatctcattccaagtatagaagttaactcaaaatggatcatagactatagmaaaaaacaaaggagaatatcttcatgaccttggggtaggcaaaactttctttgcacacaaaaaatactctaaaagaaaatgttttgatagagttctccaaaattagaaacttctattcaaaagacacaggtaagtaaataaaaaggcaagcacagactgggagaaaatattcacaatacatatacagaaaaatgactggtatttagaattcatataaaggaatctaaaactcagtaataagataatctagtttcttaaatggaggaatgatttgaacagacatagcacagtacatactatatgaatgctaataagcatataagatactcaacaccacgagagaagtgcaaattaaaaccacagtgagatactgcacacctgctagaatggctaaaattaaaaagagtgacaatagctactactgatgagggtgtgggacagttgtaatgatcatgcattgctggtgcgaaacagtttattataaatttaatatattcttaccaggtgacccagcaatttcacccttacctatgcatttacccaagaaaatgaagcccattgttcacatgaagacctatacacaagtgtccatgacagtttgattcataatggccccaaagtggaaacaacaccacatgtccatcaataaatgaatggataaataaagtatggtacacccatgtaatgtgctattcagcagtaaaaaagaatgaactactcatataacagtatggatgaatctcaaaaacattaaatgaaagaagctagatataaaagagtattttatgattccatatgatttgtatgacgttccataaaaggcaaatctatctatagtaacagaacagatcagtggttgcctcgggttgtgatagtagtgagatgagtcagcaacaaaagagaaaataaactgaagtaaccaaaaattataagtgttatgaaggaaacaaagcaggtggcagtatgtataaaggccctaagttggaaaagaagactgttgatggagtatagtgaacaaaggagtgagtggtgggagagctaaataagctaccaggtcatgcggaaagagtccttaaaaggggcaggaagcggggaggaaaaaaaagagttcttactaacttgacagggaacagactgtagctcaaatagaaatccttccttcagctgggcatggtggctcacacctgtaatcccagcactttgggaggccgaggcgggtggatcacctgaggtcaggagttcgagactatcctggctaacatggtgaaaccccatctctactaaaaatacgaaaattagccaggcatggtgacaggtgcctgtaatcccagctactcgggaggttgaggcaggaaaatcacttgaacccaggaggcagaggtyacagtgagccgagatcatgccastgcactccagcctgggccacagaaaaaagaaaagaaaaattctgccttcagtgggagagggtaagaaggaagctgtgcatatgaggtttgcctggtgattggaaagggagagagtttacatcagacatttttctgttttcttacatttattttcttttttatatataaagtaagtctgccacctgaaggtgaagaagttgaggggacaaacatacagtattctttttgggagaggataggggagtatgtgcctactaaagaaactttgtaagatgactgaagaactatcgatgctcattagatgtttaggaaggtgattttaatatgaaacctgtcagcttagtcacacatggtttttctcttgcaacatgtaactgcttgggcccaaacatggaattaattagtatatgtcatcagaatttaggttttgcctggcaaaaataatgaagagagtgaaggtgttgttgtggttggcttgctttagtctagaccgttgatgactgagtgaaggtgtttctagagtcacattatcaagatggacaggaaatctaggctagaaaagaaggaaaatgaaactgggaaagagttcatgaataggaagacaatgataggatcattggctggagaacacagaattatatactggggccatttctgcaaatgaagtggtaggataggatgaagtgatctcagagtgacttccaggtttccgaaatagaggctcaattattgacataggtaatcctagaggaggaagagcaggtttgggggggtaagatgatgagttcagttttggacaggctgtgtttgaggaacctgtgggatgtataagtggagatgtccaatgagcaattaagtatatagatctgagagatctgggctgtctaagtagagatttagcagttatcagcatatagatgataactgaaacatggtaacagaaaagattatcagagaggatttgtgggataagagaaggtaagggtgtgtaatttcctttttctacaaccagagtggttgtggtggtggttggtatttggttttgttccttttccttcagtattgtgtctcctttttcaaataaatcctaggaaatacaacatggaatgatggtaagagcagagttaaagtcctgtctttgctgtttcctactatgtgccttgagtagttaaacttctcagagcctcagttttttcaactgttaaaaacagtggtatcaaaagaatgagaagacaaaccacagacggagagaaaatatttgcataagacctatatgataaaggactgttatccaaactatgaaaagagctcttaataataaggacacaaacaacctgattaaaaagtgggcaaaagacatggatagaaaactcaccaaagaagatatatagatgtcaaataagcatctaaaaagatgctcaacatcatatgtcattagggaagtgcaaattaaaatcatttgaaataccactactcatctattaaaatgccaaaattcagaacactgataacaccaagttatcaacacctaatgaggatgtggagcaaaaggaactgattcattggtgggtatgcaatattatacagctacttaaagacagtttggtagtttcctagaaaactaaacatattcttaccatacaatccagcaattccattccttggtatttacctaaaggaattgaaaacttatatccacacaaaaacctgctcacaggtgtttatagcagctttatttataattgccgaaatttggaagcaattttaaagatgttcttcagtaggtgagtgggtaaataaactgtggtacatccagacaatggaatattattcagtgctaaaaagaaattagtgatcaagctgtgaaaacatatgatagaagctgaaatgcatattactaagtgaagtaagccaacctgaaaaggctacatactgtatgattccaaatatgtgaccttctggtagaggaaaaatatggagacagtgaaacgatcagtggttgccaggggctgggagaagggaaggataaataggcaaagcacagatttttagggccgtgaaatcatcctgtataatgctacaatgatgggtacacatcattatacatttgtctaaactcatagaatgtataacaccaagagggaacccaaatgtaaactgtggactttgggtgataaagatgcgtcagtgtaggcttattgattaactgtaacagatgtaccactctggtgcaggttgttgacagtgggggaaactatgtctttgacgggcagagggtatatgggaactctctttctcctcaattttgctgtgaacctaaaactgctctttaaacgtctatttttaaaaacagaacagctgtgatatgaaactgcatggagacaggtcaaataactaaggactactggtctaaattcagaatcaccctcagctgtataggtatttatgtgttcacttgtggcttagcttactgctgcttaatgggaaagttttgcttcccttcctcacctctgttttttgtttttttggtttttttctttacagtgatagtgaacaattacagtccttggaaagactgaattatagcttaatgaatgtacagatacaaatgtctggatgtttatattgccaggggtagaaatgacgagggaaaacatgcaacccccacaattaaaaggcgtttatttcactattctaaggaatatttgaatctcctttcagttgtatcccttaccttgtttactttacacccaagtggcatttcatacttgaaagcttttcagatagatattacagtaccaatctactttgggtaccaggacctccttcccctgtggattccaaaacaatttctgaaaatatgggagaaggatcttcagttatacccacgtatacaaaatagcatatgtctggattaaagatacatctggaaatttatcctacagatattctcacacatgtagaatattcactacagcattatacattcatatgtagaatgcattacattcacatgtagaaggatattcactacagcattgtatcatggtgataaacaaatagcacaaggtaggagcaatctaaatgtccgttggcagggaactggttaaataaatattggtatatctataaaatagaacaatgtgcagaagttaaaaagagtgaggcaactctgtatatggatagtgaaagtcttcaagataatgttgagggggaaaactggatgcagaactacatgtatgatatgctaccatctgtgtagaaaaagaaacaataaccccccccmcacacacacacatacatgcttttatgaaaagaatgtctctacaagaatgcacaagtaagatttctctctagagaggatattcaggtgctgaaggaaaagggtagagacttttcaccatatactctttatatctcttgaactttgtgccatagttaaaaacaaatgaagaaataaaattcagattttagaaacctatcttatgggattatcatgaggattaaatgagtcatgtatataatctaatgcattgtctggcatgtagttaagtatataatacttactaaatatgatacttactagccgttgtttgtcccttcccctccagttccataattgctgtttggagggttcacaggatttattttcttcacctaggccaaggattgttaacctgaatggatcaatgaacctttgaaattgcaaattttgtataagcatatgcttattccagactttccagattctagagagaagagggtctgtgactttaatcagatttgctaaggaagggaaggtcccatggccctaaaaagttaaaacacactaacctaagctgttttgctattttatgtttctttccaccagaaaatactctgctgtcagatcgttttctctttacagctaggaagagactctggctgacttttattcctcataacttttatcttttctaaatatatcatgtctaggcaagtaatttaaactttctaggtctcaacttcttaactgtaaaaagaagtgattgatctggacaaattcaaaggttcccttcatcttgaaaatgttttgattctatctaggtttactctgtatgggctttaaaaattagaaatattgtcataaaccaagaaaaacccttatgctaagaataatctttaggtagagacctaaatcttgactgagggataaaattggaggtttgtatatacaaatataagaacttatgtcaggccgggcatggtggcttatgtctgtaatcccagcacttgggaaggctgaggcgagagaatcacctgaggtcagttcgagactagcctggccaacatggtgaaaccccatctctaccaaaaaaaaaaaaaaaaaaaaaacccacaaaaattagccaggcgtggtggcacatgcctgtaatcccagctactcaggaggctgagtgaggcaggagaattgcttgaacccgggaagcggaggttgtagtgagctgagatggcatcattgcattccagcctgggcaacaatgcaagactctgtttcaaaaaaaaaaaaaaaaaaaaagcgtatgccaacctgattccatatagaacagccatggtttattttcacattagcaataaagctaccttactaaagagatagggctatgtaagatgccctggtagtcctgttgacatctctgtaaaacctctcccatctcaaggtcttttctctgctttgttttgggaaaaggggagaatagtagaaccagtgagttgtagttctacactaataaaaaatgcctctatcaatattgatcattatctgttacttgattgaagtccagatyatagttcttatttatgaaaaaccaatctgcatactttaactcagatgtacatttagttattcatattattgtacaactcaattactcagaaacatttgtcccaaatttatactgtggtcatttttgcctattgcttcaaaaggctttatagaagatgggattcttgacttacaaggcagttcagggttaatccattcaacaagcatgtgaagataagggcatttcagataaagcatgcagaggtacctggattcaggttttagctctgtgtcttatgagctctgatcttgggtcagtcacttatcctgtccatacttgtttcctcagttgtgaaatggtgataataaaagcacctactgtatagcattataaggattaaatgagataatacatgccaaagcaacatagtatttggaatgtagaaagcattcaataaatgtagtctttttttttttttttggagatggagtctcacttttgtcacatgggctggagtgcaatggcgtggtctcagcttactgcaacctctgcctcccgggttcaagggattctttcacctcagcctctcaagtggctgggactacaggtgcattgtgccaccatacctgactaatttttgtatttttagtagagacagggtttcactatgttggccaggctggtctcgaactcctgaccttgtgatcctcctgcctcggccttccaaagtgctgggattacaggtgtgagccattgcacccagcctccttcattttctttttctttctttctttctttttttttttttttttatcttttagggatggagttttgctctgttactcaggctctcagctcactgcaatctctgtatcccaggttcaagtgcttctcctgcctcagcttcctgagtagctgggattagaggctcccgccatgatgccccgctaatttttgtatatttagtagagacagggtttcaccatgttgaccaggctggtcttgaacttctgacctcaggtgatccaccctcctcggcctcccaaagtgctgggattacaggcgtgagccaccgcgcccggccccggcctaatttcttttttaaaagcaaacaattcatccttaagtattagaaatagcataaattttattttattctagaatattattaaattctaaaatagcagttttaaataattttaaatttatgaaagttgaaaaaagttttgaattttattttaaaacaagtcaaagatatatacttatttttggtgtttccgcataggcataaggaacacttttggattttaaaaataacaacttattggatgatagtgaagttacagagattatagtaggtatacctggagataccagcaggaacatagtagaaataataagccaaaaacacttttatttatactgtaaccaatctccttggaaaactttagaaaacacaaaaatatacaagcatacattccatttattcagcctgatgacgtcatcacacatacagcctctggaaaaccccactctacactcaagagagaatgaaaagtgaaaaagacaaaggacattttagtattatgaaaatgcttttgacctcaaaagcccctgaatcaaagggaaaggtgaaaaggaaatcgccattggcaatggtagaggctatggaagattgggtcttgcaaaatttattagaagacgtttctgaagagaagaccttctgaggcacccctttgcaggtaaaaaaacattcatgtcctctttctccacaaagcttttgttaatcaccagacctcacagtggtctcgcagcacctcttaaagcagtggttctcaaaatgtggtccatggactcccaggagtccctgayactgtttttcaaggtctgtgaggtcagagctgttttcataataatactaaggtgtttgccttttctatggtgttgacattttgcactaatggtatataagcaatgataggtaagtaattaataaccattagttattgtatttgtcattggtgtgtacttgcagataacatctttcttccagtttcacttagaatgtttttgatgaagccattaaaatgattagttttattaaatatcaatcctggagtataatttttttttaatgaactgggaagtacacataaagtacttcggctgcatgctgaaatataatggttgtcttgagggaaagcattcctgattgtttgagttgcaaactgcactaggctcctttttttaatcatgtatctcttttactttacagagagaccatggttattcaggtttgggcatctggcagatattttcttgaaaatgaacgaagtgagcctgtctcaaggaaactgacagtatttgttgtcaatgataaaattcaagctttcaaatggaaattagaattttggaaaacccaaacccgccaccatgagcttgacagcttccagtcaagctgtccccggtgtagacctcgtatttgagctccagactctcactctacctatctatatatatactgtgtccacataaatgtttcatattctaaatttaacatgtccacaatggaattttttatttctcccacaaaactttctctctttcaccctgccccaatttttctcatcttagtaaatcacctccaacccagttgttcaaactagaattgaagtcattatttctttttcctcacctcctacgtccaatccgttagcaagtcttttgagttctgctgttaagataacctcagatctgcttgcttttctccacctttgccattagcctattccaggttaccatcatcttgcacttgatctcctgcatcaggtatctcattggtcttcccttcttgcctgtctctaatccattttccacacagcagcagatgtaaatagaaattatttcatgtcactccattgcttaaaatcctttaataatgcccattatacatagaataaaattcaaattccttagcttataaggcctttcatgtttaggcctttacctcctcattcttttttttttttttttttttttttggtgcagagtttctctcttgttgcccaggctggaatgcaatggtgtggtctctcggctcactgcagcctctgcctcccgggttcaagcgattctcctgcctcagccttctgagtagctgggattacagatggctgccaccacacctggctaatttttgtatacttttagtagagatggggtttcaccgtgttggccaggctggtctcgaactcctgaccttaggtgatccacctgcctcggcctcccgaagtgctgggattacaggggtgagccaccatgccyggccattctttacattctttacattctttacaacctcattctccctttcattcactaaattccagccacacaagtaatctttctattccttaaacatgccaagttctttcttacatcaggggttttgcaattactattttctttctttcatatagcaagctttctctcatccctctggtcctagttcaaatgttatcaccttaaaactgcctttcttgattattctatctaaggtagtttcttccttttataccttatttagcctcttggtcatttcctgtataacagcataaatttaattatttcatctatctatttacttaattttttatccgtctcccttattagataaaaataagcaaataattttagatgtgttaagatggaggtgcctataggaatatcatacagtgacgccatctagtaggccactgtctggaacttaagctcagagggagatgttattaatagatacagagttttggaaattacctgtatgttaatagtaaatgaagccatggatacaggtaagaggaagatttgactgaagaggacacagagactagaatagaatcttcaagaattcccacatttgagggaccaaaaagagaagcccaaaggaaactgagaatgaagatattttggagatcaaaggaaatatgagtataatatcagaaaagccaaaggaagagagtctttcaaggaagaaatattaataactgtgtcaaaatcctgagaagtaaagtaagctgagaagtatccaataggcgtagcaataaggacatagtaaccatggcatgaataatttcagtggattggcaagacaagacagaccataatagattgaggactgaatggaaggtgaagagttgtggatatactgtaataagtttagaaagccaaggagtttggcattgaaggcaatcagtccccaagaaggtgagagagaatttgatccagagcactggtggaaggatagattttgatgggaagagaggatcttccattaaaacaggagggagataggagaagatggatgtggggaagtttataggtttgagtattgagaagttggaaaagaaattgtttccatttaatgattttagttttttctgtaaaataagagtagaagtaatatactgagagtaagggatgttatagccagacatttgagaaagtatagaacattatgacagctggtatggagacaagaagaaagggctgagtaaggaaatgtaacaggattactaggttgtattgacctgtgtatctgggttgttttcagcagcagaacagtccaggcgtaggcatgaccatttggtaatggtagtctgcctatgtatggttccttgcaagtcttcactgtggatgacattgagtaagacttgctcttgcaaccgaacatagactctggttaacactacaatgtcagcattgcattaagaagatagattgaacttccttccactttctctgtcactgctagacttggcagaagattttgactacagcatctttaccttgtagagaactgcacttmgaagcaaagttgaagtgatttatggacctcacagaagggatttatagctcccgtaggaaataattggctcatgacctttaaaattagaggaaatttgccttggagtcatccagagcgagtgaacacagcagcacagtcagtcctcattattttcagattccatatttgcaaatttgcctagtcagtaaaatttatttgtaaccccaaatgaatacccccgatccttttgggrtcatagacatgcatagaatggtgaaaaatttgtgtcacctgacatgcattaagaagcaaaaattgtcctggaatacaaaccttcaagaagacctacagagctgaggtcaaacatgacaatggtctgccttcctgtttcatccctcatactgtaaacacgtgtcctgttcataatctgtttagtgccatatatttttgaatttttgtgctttgttttagtgattgcactgtgtaaaattgtccccaggtgtcatggtaaagtgttgtctagtgttcttaagctcaaaaaggctgtgatgtgtgttactgagaaaatgtgtgttagatcagcttagttcagacatgagttatagtgctgttatctctgggttcaatgataatgtaccaaaatacattaaataagatgtctttaaacagaaatacatataaaacaagattatgtattgacacaaatgctgagaatcacatgcacctaaccgtgtatttttcctaggagcagtggttcactgttggcaaatttagtgttcatggcaactttatagaatgtaactacctcaaataataagaatcaatgtattttatatatttattttggaggaccttaaagtatctcacagacattagctcattcatcaacacaacttccagaaattagctgctagagaatgagttgttatttggaggataagggaaaattcactctgtaggtctcccttaaggtttgtattctaggacaatttttgcttcttaagtagacagtattttacccttggatgtaaaaagatctgcttgctaattatggttatgtttgattgatttgctttggaactaattggaatattccctatttgacttcaatggggaaaggttaaaaggtaaagaaagcattttggaaagcagtcagaactttttggcagaaaagtaccaggtagagagaaataatcatagtggttattatcacaaatgtaaaaaaggtaaggatataaattgctggatacatatttgaatgtgttatgttgaaaatggctactcacatatatattataggaacttttctctccttcaactcggcattcaaacctttgtctagatcctgctaattcttcctttatatgatttctcaaatttgttccttctttttcattaatatagtgataatctggaaatccagactttaaccattttcaaagttgacctcaaagttgctctcatttctttcagccacattttcccttgaatgtaagagttacacagtaataaaccatcttccttaagcatatttttatcacattctgcagacatattactgccctacttagaaactttcagtggctgctagttgtctatttttaaattactataaaccactgtctcttcatgttcctcaattctcctacagcctttccaccctaccccctgtaattgatgtcatctcataattcattgtgtgtgtaggggaacctctagatgttaattccttcatcttataaccaaatctataaagctgcctgtgtctattccttttttcccttccattacaaaggaaagaagtattagaacataggcatctttgatgaggggcattattttgtctaccacacatttctttttttcttctcaatataagagcaatgtatcctcattccagaaaaattagaaaacagaccagcaatttaggaactgtgtaggccctgttgatctcctaatggaaacagagatccttagttcatgttgattaagargggagggtctctgatttacttaaggccttgaagatactccaaaagtttgtcaaaagtcacagagaagaaaagtgtcaccttccacataaaatccatggggaaaaggagtactgtaagactcttggcaaggtatttagtttctctaggtcttggcttctttatccttaaaataaggaattgaattaactgatttttaaaattattgtcttttaatatataaaggctggtacctacattctactaaaaatcaaaagagatgaatagataacaaacataggtttgctagttttttaatcaaatcaacgtatagtgttatttcgggattcagtcagttacattttcacagtcatgaaagacaaggaaagactgagaagctatcacggattggaggataccaaggaggacaaccaaaagcgatgtgggatcctggatgggatactggaactgaaaaggggtattagtggaaaaactggtgaaatccaactaaagcctgcagtttagttaatagttaatagtattattaggtaatagtattgcaccaatgtgaatttcttagttttgataattgctgtgattttacaagaagttaaccttagaggatgctaggtgaagtacatatggaaactctgtactatttttgcaagttgtttctaagtctaaaattatttcaaaagaaaatgttttttattaataagagtgggaaagcaagccacagagggagagaagttgtttgcaagatttataactgcaaagaactcaaaatcagaatgtataaataactcatacaaatcagtaaagactgacaacccaatagaaaaacaggcaaaagacttgaaagactcttcacataagatgatgtccaaatagccaataagcatataaaaatgtgcttggtgggccgggcgcagtggctcacgcctgtaatcccaacactttgggacgccgaggtgggtggatcacgaggtcaggagatcgagaccatgctggctaacaygatgaaaccgcatctctactaaaaatacaaaaaattagctgggcgtggtggcgggcgcctgtagtcccagctacttgggaggctgaggcaggagaatagcgtgaatccaggaggtggagcttgcagtgagctgagatcaggccactgcactccagcctgggtgacagggcgagactccatctcaaaaaaaaaaaaaaagaaagtggggcctcaaatagatatttgcacatcactgttgataccagcrctgttcacagtagccaaaagctggaaacaacacaaatgcctatcgacagatgaatggataaacaaaatgtggcatagacataaaatggaatattattcagctttaaaaaagaaaggccaggggcggtggctcacccctgtaatcccagcactttgggaggccgaggtgggcggatcacgaggtcaggagattgagaccatcctggctaacacgatgaaaccccgtctctactaaacatacaaaaattagccgggcgtggtggcgggcgcctgtagtcccagctactcgggaggctgaggcaggagaatggcgtgaacccgggaggcggggcttcctgtgagcagagatcgcgccactgcactccagcctgggagacagagcgagactccgtctcacacacacacaaaaaaaaaaacaaaaaggaatgaaattctgccatatgctacaatatggaggatccttgagaacattatgctaagtgaaatgtcagtcacaaaaggacaaatagattgtatgattccacctatatgagttacccaatgtagtcaaattcagagacagaaagcagagccttggttaccaggggctggagggaagggagaatgaggaattgttgtttaatgggtatagagttgcagtttgagataatgaaaaagttttggagatggatggtggtgatggttgcacaatgtgaatgtacttaatgccactgaactgtatacttaaaaatggttaaagtggtaactcttatgtacatttaccacaatttttttttaagtggttgtgttggtaatggtagtggtggtggcaagatatagatgaaaaccacagtgtgacaccattatctagaaaggctaaaatgacagaggccaaggatctgaagcaactggaatactgagatcttgctggtaggaatataaactagaacaagtatttttggaaaattgtttgacattatctagctgaacatatgcatactccataacctagcagttcccctcctagatatatatccgtagaaatattttcatatgggtaccgaaagacatacaagaatgttcacagcaacattatttttttatagtccccaagctgaaaacaaccaaaaagcccatcaacagaaaaagtggattcagtaaattgtggctgttcatgcaatgggatactttcccacaatataaataaaacttctagtaaatgcaacaaacttggacaattcttaaaaatacattaaaaagaaaaaaagacaccttaaatattttatgatgtttatatcaggttcaaaaataggcagaactgatcagtggtgacaagagtcaggacagagattacctttggggaggagtgagggtaacaactgataggcgacctatgagaaggctctagggtactgggaatgttctagtttcttatctgtgtagtggttgcataggtgtgttaacttttgaaattttatcaagctgtagctttgttatttgtgtacttttgtaactaagttatgcttctataaaaagtttattttaaaaaagaatatagcgagaagcacacattctacattcatttaatggcattatgtttcattatttaacccccaacctccagctcagtgataaaactgagggccctaaatgcaaattccttcccactcttattcttgttgttttgaagtttaagaacaagttttcaagtttaagcttgacttttctttgagaacagctttagctagaggtgctaactatgcagcaaactgaaccctgacctaagtggagctctaattagccgggtcagggaaattgagaatttaagtccatactccactcctggattctacaggtcttagggagtagagaaggtagcttagtgactgctttagaatactgtaatctttgtattacttaattgtttatttgagaaacactggattagtcagtggcaaggaggtacatttagtttatactaagcataattttgttatagtgatgtttctatttataatagttttgttaatttttactcataccctgttctcttttccttccttttactcttcagctacctgttctatatttaattcattttaggctttgccctgagctagctagctatttttttttaattttaatttttttttttttgagacggagttttgctcttgttgcccaggctggagtgcaatggcatgatcttggctcaccgcaacctctgcctcctgggttcaagtgattctcctgcctcagccttcccaagtagctgggattacaggcatgtaccaccacgctcggctaattttgtatttttagtagagacggagtttcttcattttggtcaggctggtctcgaactcccgacctcaggtgatctgcctgcctcagcctcccaaggtgctgggattacaggcgtgagccaccacgcccggccactattctttaaatcatatattcatctagcacatattcatgggttgtttactatgtgctgggcacttggaatacaaaaataggacatataacttctgttctcagattgcttgcagtaccagtgtggaaagagacaaatgatcaattatagtatcaatgctgacatgcactgtgatagagatcagtctgggggattactcagtaattcgtgtaattgattcttaacctagaccaggaactggaaatgtctactgaaggaaattacagctaatctataaattttgaaagacgtgtgtgtgtgtgtatgtgtgtgcatgcatatgcctatgtgtgctttcattcagagtgggaaggtaagggaatgtagagcaccaaggctccagagataggcagagaccaagtcatgaaaggtcttatatgtcatcatgctaaggagtttcaattttattttgaggatagtgaggagtaactggggtgttataaacaaggaagtgatatggcatgtataaatgaatttaatgaattgaagtaggctgttacatgaatggaattatctaggtaaacttttacttttcaaagtgttgtcccagccatattgtcatcatctcagagctattcaaaatgtagaattttgggacctattccagactttctaaatcagaatgggcattttattttaacaagatcttcacatgatttatatgcacattcaagtttgaaaagcaccgatttagacagataatgatgatggtcaggctttatacagctggtgtgaggaagataggacagattgcaagagatattacggagtacatgttcttccctctatttggaatactcttctcaattcccctccaacacacaccaggtaactccccgcttatcctttacctttctgcttaaatggagcttctctcwtgccacggccccaatacacataattggtgcccttgccatatactcccatgtacttatattatcatttctcacacttttatatacttatttaattgcctctctccttgtactgtaagcaccacgaagataaagatcatttttctgtggtacttggcacatggtaggcacccagtaaatatttgtgatttgattaaatgaatgaattcttcatgtataagaagagaaaatggatttgggtatgctagagagaaggatgtacatgctgtaattattaacaataatagttattttatgtatgtgtgtgtgtttatttttggacacccagtcttgttctatctcccagacagagtgcagtggcatgatcatagatcattgtaacttcaaactcttgggctctatcctcccatctcagcctccccagtagccaggactgtaggcgcacaccactatgtctggctaattttttttttttttaagagatggggttttgctatgttgctcaggctgaataatagtaaattttaaatagcactaataagttccaggtgctaagtgctttgttcatattaatttatttgattatcccagcaatcctataggatagatattcttaatagccctattttacagatgagaaaactgaggcacaaaaaggataagtaatttgcctaaggttatgctgttggtaagaagcgagattcaaaccaggcagttgagtactactctgctctatctagttttggacaaaatagcttcctggtgcttagtgttttatatgtattagttatttaatctttataaaaccaatgtgtagaagatactgttatcctgatttacagacaaagaaacaaaggttcaaaaaggttgtgtagcctgaggatacacagctagtaagtgatgaaactggccttcaaacccaagtctattcaactttaaaagcctatagtctttacctgtaatgatgatgcttccatgttgagtccaaaaaatacctgtgaggtatgaattttagattactgaggaactgataagtaagatacctaacatcatttaggttgtgagatagggagaagggctcaacaatgccggtgtctgtgatagcactggcattttgagtttgaaggagtaaaggagatttaaggtccagcaattccagccagtctcatacttgaccacattgagctttgaactcaggtggttaggaactttagcctccataataagctgaaacttaggtgactaaggaatagttattggttttcttgtttttttttttttttttttttttttttatggtctcagagaatctagatggattggaaatagtgttagaactggaaggaaccagttctaaccttccacagttcactcttccttacctccctctcattttatgataaggagattgaagaagggtaattaggtgatttgccaaagtccaataaaacaaagccaggaaaagaagacagggtcacattcttgtattccttgccctgtgccttatctctaggttccagattcatcaccttttgattaaaactgttctgccattatagtaacatcttcactgcctggtggtttttttagctttgagccctgaaaagagtaactttttgtcccttcccctttggccctaagcacatactcactgacttcagatcatccggcaggccatatgccctcatggatgacgatagtatcgagtcaatacttgtgggaatacaactggcacagaggattttgagctgtttttggagttaagattcttctaagctattcagatacttggtcaatttttgtacaacagaaagccgcaggagccgatacagtttgcataacttttttttgaagttgccaactcctcacctacatgttaagggtaatataatcatatgcagtggtctcactcctgccctggctataggtgtatcttctaaggcacattatggtaaagtggaattatattggaaacgaatttataactagtacttatacctataccttatgccttacacagtctttgtcagttaataggccttcagttctcaaatgtaatagctactattttatttccatttcagaattgttgcagaaagacgtagtgaggttgcagtgttcaaatagtctattttagttaaaacctacagtaaggaaacaaaaaaaagtcataactaaaaacaacacttagtttagcctgccaaagtgatatattttacttgtgtttattcttttatttatttatttgagatggagtctcactgtgttgcccaggctgctcactgcaacctctgcctcccaggttcaagcagttctccctgcctcagcctcctgagtagctgagattacaggcgcccgccaccacgcccagctaatttttgtacttttagtagagacagggtttcaccatgttggccaggctggtatcaaactcctggccttaagtgatccacccgcctcggcctcccaaagtgctgggattacaggcatgagctgtcatgcctggcctattttatttttaatcttgtttctctaaaagtcattttcttctgtggtttaacactatcatgaaggttgtcatcttctatttatttaataaatcattacatagagaaaataggctgggcacggtggctcatgtctgtaatcccagcactttgggaggccaaggtgggaggatcacttgaggtgaactcctgggagttcaagacaagcctgagcaacacagtgagaccgctatctctacaaaaaattcaaaaatgtgccaggtrtggtggtgcacacctgtagtctcagctactcaggaggttgaggtggcaggatcacttgagcctgggagttcaagcaatgatcacatcactgcacctcagcctggatgacatagtgagaccctcttaggttagaatagaatagaatagaatattaatttttttcttttaccttaaaaacattttttttaactttttattattttttaatttttgagacggagtctcactctgtcacccaggctggagtgcagtggcgcgatctcggctcactgcaacctcttccaagttcaagcgattctcctgcctcagcctcctgagttgctgggattttaggcrcgggccactgcacctggctaagttttgcatttttagtagagacggggtttcaccacattcaccaggctggtctcgatctcctgacttcaggtgatctgcccacctcggcctcccaaagtgctgggattacaggcgtgagccactgcgcccagcttcttttaccttttcttttttaaaattattattgttaccacactagtctacactatcaatataatctagtaattttcttatcactgaaatattctaacggttgggcttcactctagccataaaatagacttttggccttaatttgttcctaaaagtttcattataatgcagatcaaaatggattacaatgggtgcagatcgagcaatggaaaatggattatatattcctgcagagataatataattaaggactaaaaccctactaaggacttctcgtcaaataagtcatataggtgtagtcagtaatataactaagcctcataaatataaaacagtgttccaaattctataaaatggacataaacatattgaatacattgagtatgcaagttgcccccaaagtataattaagaataygtacagcatacataaattttaaatttggtaatttcttaagcacctactatatcgcaggtattgtaggcaaatcaaagtaggctaagcccctgaagagcctggagactaacaaggggtagcacacatacataggaactataatttgaggaatggtgagaatagtgatatagccaaagaacaatattagatgaaggggagattccttttttaaggtcaggtttcatggtagaactatcattcctttaaatatttgaaaaagtgaagataatggaagtgaaggcagaaacgaatgcattttgatttgagaaaatgacatgagcaaaggcattgaggtaggaaagaacacagcatgataataacataattaagagctaccattaattaactccttagagtatgtacccttttaaaatccttgcatcagtcctgttaggtaggtagctcttattatttccaccatacaaattggaaattggagttatatagagaggtcaagtaagtggcagaggcaggattctaacctaactctgtctgattccaaaaccagtgttcatggtcaccatactgtgtagtctttacattcaagaagtagcagataatacagtttacctggaggatagagtatatatatatatatatgggtatgaagtggattgtcttctgggaaaggatttgtagagggttaagaggcagtgaaaatgaacagaaagggatagatgaaaggtttggtggaggagggcacagaaataatatccaagtgattgttctggggactgtgggaaaagggggaaatcaaaggtgcctgaggtttcatatatggttgcctgaggacagtggcatcacaaacacaaaaagtgaggagaagaaagtgttgtttggaggggggcgggaaaggaaagacagcaataatgttgattgtagatgtgttgcatttaaagcacagatgaaatacaccattggcaatttaggtaacagatgtgacttctcattttaagaagtcctctgggtttaaaggaagacagaggacaataattagaggttgctaggagctaagactttatcagagttgacactctgacttcagtgggccttattttccctgcatctcatcaccctgtgtcctgacatcactcaagtcgcctcaactccatagctcctctatgaccacagcttcctttacttctacctctgctgttcttatttcgcctgctctccaccctccctgtgatcccttgatacgtctgaatgcacctggttcaacagtccctgttttcacctgcctttctctccagtcaaacctctggccattcatttgaattctgccctctctggcatcttacagtacctcttccatmgatattaccttcctctcctccattccaaatccaaaggaccattctcttaagtaatgaaggccttacagggtgatgaactgtgaaccccaaacatctgagacaggtctcggttaatttagaaagtattttgccaaggttggccaggcgtgctggctcatgcctgtagtcccagcactttgggaggctgaggcaggtggatcacctgaggtcaggagtttgagaccagcctcaacatggcgaaaccctgtctactaaaaatacaaagttagccgggcgtggtggtgcatgcctgtaatcccagctactcgggaggctgaggcaggagaattgcttgaacctgggaggcagaggttgcggtgagccgagatcacgccattgcactccagcctgggcaacaagagcaaaactctgtctcaaaaaaaaaaaaaaaaagtttatagaaagtttattttgccaagattgaggatgtgcactcatgacacagcctcaggaggtcctgatgacatgtgcccaaggtggtcagaacacagtttggttttatacattttaaggggacatgagacatcaatcaacatatgtatgatgaacactggttcagtttggaaaggcgagacatctggaagcagggagggggcttccaggtcatgggtagataagagacaaatggttgcattcttttgagtttttgattggcctcttcaaagtaggcaatcagatgtgcatttatctcagtgagcagaggggtgattttgaatagaatcggaggcaggtttgccctaagcagttccagcttgacttttccctttggcttagtgattttgggggcccaagatgttttcctttcacagagcctataatcataattataatattgtcactgttagctgtagagaaactatcctcttcaatgggaattaacactgtaaagagtcctggtccttaaagggaccaaagcaggcatatcttgttaggcttcctttgtgcctgaaacctgtggtactcttattggataatatactctaggaatgaactaagcaggtgagataggctagcttaccttttttctagttatgtcttatttccaaaattctgaagtgtgcagcaaggagggagttggtatggagagataaagcagaaacaacttcggaggtcctttaaggtgatagtgtacagggctactgcactggcatcctgtttcttcctgaaaccagatctgtgtgtaaaatccagcattggttagggactttgaggcagcactagtcttggttggaaaccctggctgtcctctaaacctacactgtggtggcttctgactagcctcagtgaagtcactttgcaatcagcacctgtgtgtctgtagctgcgggccctgaggccttcgtgtatgtagcacagggagccagcagagggagctgtcgtcccagaactttcttagagctgctaagaaattctgattttgaaaaagatcttcctaggctccatccgaacctcccatgcaataagactctaacttgagatatgcgagagtttggtgccagacccctggtgtgagcagatggggagcttctgcatagctgtttaaacttgaaagccctaggagctcttgatttcaaggaaacgcctgtttactgatccaaatcaagcaactcttgagaaatgggagtgccttcctgacctcagtctttattgatcttggtatccgcacctccagtgacgtgtcctgaagggtgggagagaattcacaagtgcctcacacacagggaaagaaggaagtccaactattgctgcagaaagtccccactggggaggtgcgggtagagtgtttgggtagcattaaaacagtgagtgccctgtgagaagcacagtgcctgggtgcagcactttgcatcagctctgattttgaaatcagacacagaaggctttgaagccggccagtaaggggttgtcaggcagttgactaatgctcttgatttgaatcggaggctgctgtgaaaagggatgcagcttctgctagccactgtgaacttctgaatctcactagggttgggtctgctttggggcactcagataaccccagtatttccaaaccagctttcccttttgcttcaggacatatcttacccaagcctgcactatggagaagtgggacggtaatgagggcacctcagcttttcacatgcctgagtggatggtgagttcactggtcgttttgtttctccttctgtttcttgataatgagaggcaaccatttctgacgggtgacaaggatcacctctgagaagctcctaccaagatccgtggttggaaaaacagttattactctacgttctgattagttcctaggtactaggtcaccactgtttcttaattatccacgaagctgggaaaggtgtgagagttgcctggccagggcttgttgcctggtcatctctggtgggcaggggctttcctccggctgctggtgtgatgtatgggttgtgtttcctgtgactgttttgcacttctgttttcaacctgatgcttcatttgtttctctgggggtaaagaaaaagaacaaygaggagaaaaaacaaaaacagaacttacagaaatggtgctctctgaagtctgcaaagattgcaaacatttctcccctccctgcccgtatttttcccttcagtcacaacatttccctatttcccccccagctatcctttatatatatatttctctatggcaggaactgcagctctcttggtacagttcttcagaataccatgtttgcctgatcagtagttttactaaaatgataataaggacttatttgttgataagaactagcatataaacctattatattggatcgaatttcaacttttaaagacaataaccatccttatgtttctaaatagtttcttctagatttagcctgatttcttacagcccacacaggtttatgtttacagatttgtgtttccccactatggaaaactagttagactctctaaaacatatttcaagttctttttagtgtttatagaattatggatttgaagaaataactattgataatgagatagaatatatagtaggcctaacaaaggccccctgaggaacttacatttcaactcattgttacaactattttttattgttttgggggaggttattgctgttcttcttaatgtcgtttcagaacattgtgttcaggttttttttttttttttttttgaaatggagtctggctctgttgtccaggctggagtgcagtggcgtgatctcagctcactgcaacctccgcttcctgggttcaagtgattctcctgtctcagcctcccaagtagctgggattacaggtgtgcaccaccataccgggtaatttttgtatttttggtggagatggggtttcaccatgttggccaggctggtcttgaactcctgaccgtaggtgatccacccaactcggcctcccacagtgctgggattacaggtgtgagccaccacgctcagtcttgtgttcaattttaaaacattttgtggaaagaaaacctatccatctacaagcttattccaagtaacatagtgttttagaattaatggaaggatttatgtaatacttctgattgggttgagtttttttgaatttcttgctactcactaataacaagaagagggaaaaagaaatttggttttcttaagggaagggccacgttaaggtatcaaactttggtatttctataaaggaatattacagaagaattctactgaacattagtgtgccaactcagaatcaatcaaagttttataataattcttatttctgtcatagtcctcaccgtcttacaagcttagcacatcccctcaaagttcagtagtggctcctgctgaactttcacccatttaccttctttctagttaatgtgaatgggaagactgccctaaaggagttggtgtgaccactgcataagggatatgatctagggcttcccagcttttagaaaacactctttatttaataaaacacagctctttagtgttgtgtctyggttggtaaaaaataaataaaaaaatttgcagccgggygcggtggctcacgcctgtaatcccagcactttgggggaggccarggcgggcagatcacgaggtcaggagatcaagatcatcccggctaacacagtgaaacccsgtctctactaaaaatacaaaaaattagccgggcgtggtggcgggcgcctatagtcccagctactctggaggctgaggcaggagaatagcatgaaccsgggaggcagagcttacagtgagctgagatcgcgccactgcactccagcctgggcgacagggtgagactccgtctcaaaacaaacaaacaaaataataatttagaaaagcacagctctgctctgttctgtttttaataaggtattactctcacttaggaatttctcagccattctctcttaaatagcaggaaaatacctttgctcagtattttgaacagcaataaaaaggaatagggaggagctagtcttcaataacacgattgtctcatttgctagcttttctttgccaaagacttttgaggctttctttcagataccacgtaagtcattgactcctgacttggtctgaaagtacttcattaggttgctactgatagccacttmgccaagaaagctaacctctgagcaccctctagtgtattgccgatggatttccagaccttacttgtaaaatgttaaagtgtcttttaatccccaagaaaaaaaccgttgctccagctcccatgttgggccaaagtttcaatttaaagttttaacgagtgtcttactcatgttcccatttacatattagtgtaatgaaatttccactgaaactatccctgccaccaaaggaaatatgagaagtctctcaaatcttctttcaggagaaaaatttagcagagaaggtatattacaacatctcccttttgttaaaaatcaccagcaaaaagggacttcatatccctcagagaataggactcacaccacatataacagctgacagtactcacatctctgatttccagcagggaaataagccgggatgaagcctgaagaaccccaatctcaagaactgacgaggtagactttcaaggttacgttccatcaatcactggaaaacttctcctggagcctctgctcctcagctgttttcatgtgaaggattttcttagccctgttcagacagctttactgctgaaaggttggggaacacttccttttaaagactgtctttattaatgtgttttacttcccctgagagatctttagtcccttctggtagtaacctcgactgacatgcatggagatcagcaataactttttctgtgtttcaacattttaatatttcctcctcctcccactccagctctctgtacttttccataggaaatctggttgattgactttcatgagtatccagccagcttgatgcccgatattcttttggcaagaagtaatccttttcataggtaaagagttagttcaagccgctcatttggcttggaagagagaggtgttttgaggaatatctgaaccatatctacttggaagtagagacaaaaatctccaaagtgtctgataaatggtggtagaggtagcttgactatcactctaggtcaggattggtgcttaaaacagaaagccatttgaaaaactgatgaaaactatgggctctctccccaggatattaaaaacacaaaattttgcatactgttgtagggggttctagacatccatggaatataggttaagaacacttaatttgaaagaatagaaatattaatattttagacttgcatatcaatatgtagttttcaaaaccctytcacatcttattatctcagcatacattttawataggcaaagtagatatgattatccctattttagaaatgatgacagaccttaggaagtagagacacagatacatcctttgtagtattactttatgtacttgaaaaggaattaattggtttctcttggccttgatcctctttaggataaatagatcttctgtcctccccatgagtcctgtttttcttaatatattacctgtctcttcttaagagccttaagttacggaaagcagaattagacccagttttctttagaccctgttttgggtgtaaagaaagatcacctcagctgggcgtggtgcctcatgcctgtaatcccagcactttgggaggccaaggtggatggatcacctgaggtcaggagttcgagaccagcctgcccaacatggcgaaaccccatctctactaaaaagtacaaaaaaaaataagccaggcatggttggtgtgctcctgtaatygcagctactcaggaggctgaggcaagagaatcacttgaactctgagaggtggaggttgcagtgagccgagatggcaccattgcaccccagcctgggagacaagagcaaaacaccatcccccmaaaaaaaagaaagaaaagaaaggatcacctcattgtattctctgacctttcaaataacctttacttttctgcctgtgaacgtgcctccatggttatagccatgataggatagaatggttggttaagtagagtcaagagaatcagggctgctttactcacgcttggagaaagtgttagagcagtggtttccaaagtgtggtcttcagactggtagcatcagcgtctcccggggagttactcaaaacacaaaatcttcaaccagagaattggaagctgaaaaaaawttttttttttaaattacaaaatacaaaatcttgggccctctccagacctaataattcaaaaactctggtggttaagatccagcaatgtgctttaataagctctccaggtgattttgatgcagctaaaatttgaaagttactgtgttctataaaaacttattggctgtgtgcggcggctcacgcctgtaatcccagcactttgggaggccgaggtgggcggatcacgaggtcaggagatcgagaccagcctggctaacacgaagtaagtgatggaactttttaagtttttttttagtagaaaccctgtctctactaaaaaaaacaaaacaaaacaaaaaagcaaaaaaactagccagrcgtggtggcatgcgcctgtagtcccagctactcgggagactgaggcaggagaatcacttgaccccgggaggtggaggttgcagtgagccgagatcgcgccactgcactccagcctgggtgacagaccaagactcagtctcaaaaaaaaaaaccaaaacaaacaaacagacaaaacttgttaagtggtaaggcttttcctgtctcctaaaatgtcttctggttctatttggtatagatatgccagtccttctggctcaagttatctgacttaagtcattggaccaaggagctcctttttacctgagtgagggaaaggggaaccagcttagtacatgcggactggggtgaacattcttgttaggaggagcaaaagttgagagattcatcaagcaagcaaatgatctgtctcactttgtgaaattatgagtaagagatcagaattgctgtgggtgatggtgaatattcatatttgagttcaattaatttctgtttccatttctggtagtgacattgggcaaagttgccttaaagagctgttagagttctaattcttatataattaggtgttttagaattgtgacttgatcagggccccaagattatccgggatgatgtcatttctaagatgtaatctgatacgaaaatgaatttaaagagtaattttaaattaaataaatttaaagataaaaggaatgatttgaggctagtacacctaggactaggacctttggtcttctgattaatattatgaggcatggtatagtagatggagctttggctctagcataaacacaggctcaaattccagtcccatcacttacttgctgtgagaccttggacaaatcatttgttctcttagagttaaactttcctgctttgtcaagtgagaataatactgcctaattcttaagattcttgtacaaattaatagaagtaacatatacacagaactgtgaaaataggcacttaccaaacttttctcttccagagatgtcaataagcagtatgcaatgtgaccttctctctctaaataaagattatccttaaaaaaaaaaaaaaatctgccggctgggtacggtggctcatgcctgtaatcctagcactttgggaggccgaggcaggtggatcacttgaggtctggagttcaagaccagctgaccaaaatggtgaaaccccatgtttactaaaaatacaaaaaattagcccgcgtggtggcacatgcctgtaatcccagctacttgggagtctgaggtaggacaatcacttgaacccggagggtggaggttgcagtgagccgagatcgcatcattgcactccagcctgggcaaaaagagcaaaactccatctcaaaaaaaaaaaaaaaaaatctgccattttatgtcctttcttgtgctcaacaagcagtcttttttttttttttaattaaggaagaattgacatcactttccccccaatctctgtagcagacagttgagtgtagctttcttcctcactatgtctctttcagaaatcagcaaataaataatgtgattctttgcccttttgcttgaatatttggcacgtagtaagattgttgtgattcgggggactctgaggagataagaaacttccctttgtagtcgtcccttccatgaacacacattttgtgaaaaaagcaaactgggtcactctgtgccaaatcagcaacaatcttgagctgggactagaaaccaaatgtcaaaacctgtataaaagatgcacaattcagaggaaagcagtgaactgagaaaattgatttccttggtgacagagctgaaatcagtgtccccagtctggctaatccaaggacacagagtgtagggtagggcctgcctgagtacttggcaccattaatttttttttcttactcctttaatgaagtctctcattgtttaagtggctctgtggttaatttttttctaatgagactaggttaactaaaatcatctgacatggaaaaggaggaggtaaggttgaaaaggaacctaattagcaagttaattatagcgagcaaaaaagtgcagtggttatataaataagctattgttatgcgcatgcaagttgggccttgtcaagggacttgcaaggtttagaggtcagaggatccatgtaattaggtgtttaggaaaaaaacaagtaaaagcaaaacagccactagaattaggaatggctgttgagccactaacagaaatrccttattaaattggggctgtactgctgaaggggttgttggagctgcttcagggattccaaggaagagtagtcccccactccccagcccaaaaagctgkctggaaccagagccaacagaattgctgatgaggaaagtttaaaggcctgatcacaagggtccctggaccacagaggtggcagtggggctggtaatgtcactatgctgggcagcaagaagaaatacattgttaatggcaactctgggattaaggcccaggtgaggctaagctcttatttaccagtcttgccgctgctatagccattattgtaaaaggccgactgcttatactctttttcccctcctttcctgctttcatccctccctctggcataaggtgagctayccctcttttaacagtctctttccctcccttgccttaatgcctgttggaattaggcagttctctctcaaatggaaaaggaggattaccttaaaagaccctggttccagacaaggtaggaaagttaggggtagaatctactaaggtaccacaattggggtgggcagattacaaaaccaatccattacaaaatggactgtatattggtgtttaattattaagaggaggtaaacaccagggagccacttaactcatgttctggtcgtcagagaaagatactcgtttcttgcggaaaattgcataacttatatttaagtggttaatctcactctaatatttttctgtcttaaagaaacttgaattcggtgtctaaccagtaagcaaggttttagaaccctatgttctaagtggagaaagccttgtacaacctagtcttctttagtattaaaagatagcatgaacttgtcccaggaaggagggattgctgtaaatagaaaacactatagagaagacagctcagctcagataaactggtttgagatgataatgcagctagatagctatatggtttattcaccttgagcctacaatctagagtataagagtgactggccccctctagtggtgtgtgtacatggtgtgtgtgcatatgcacccacatgtacatgtacgcaggtgtgtggttgtgttggggttgtgttgagcatctgaaacacggtttatctattcttctttaaaggggacactggaaaagttccattattattccttttcctggatgggcttctaaaaaagaataaagacatgtgactgttttgaacaaggttggtgaaacggaagccagagtttgcatcctgactgctgtccacctccccagctttccaccttccctcttcttcccagctctttttgcccttaaaaatcattttaactttagacttggtttatgtttgccatatttagtgagtattcaaacaagtatagacagtgaagatagaataggctacttcagatatattgattcagcacttgattgagtgcctaggatttgtgcctgcagatataagggtgaataagaatcacagcttctccctttatgagcctatagtttatagagaataccggtaagtagacagatagttacattcattgtggtaagtgctgtgctaggagaaatgcaatacatgaaagttcatgtacgtcctatgggagtacatagaaagggcactttatctttttggaataaattgctagttgagcaaaataatcatctttgtcattttttttagttcatgaagaacttcttatccgatgagttttcctattgctgaaaacaatttgcaagccctaaagcactctgtaggctttatttgttgttatagctatgaaaatgctatgaatccccctaaaaggcaatgtgaagctatttcaatttggcattggtcccttgtcgcaatactcaagtgactcattagttacctctaactgcaggaagtggagccgtcagttcctgctttcattctggtgtactgtatgttctgcccatcaaggaaccatctttttatcattaaaggtagagtcacttgtcagacctttgatcattttcattagaccttcctctatgccaccttggatccagaataggcaattatacaaacagagaaaacaaaaaagttattagttcaataaattgtatgagctttttttccccaaacaagtatagcttacaagtgacctttgatttgtagagtattataaagtatcagctggaacctccaacaataggagaaagataaaattgtaagaaaatcattatcaaataatcatccaaaatgcaatgtccagagtatgatatgaggcttatacatattcattcaattaatctgctccttctacatctattatagttaatgatcaatcttactgcttttaggtattttataatatcaaatatttaaaaataaattaatatttacttactagccaggcgtggtggctcacgcctgtaatcccagcactttgggaggccaaggcaggtggatcacaaggtcaagagattgagaccgtcctggccaacatggtgaaaccccgtctctactaaaaatacaaaaattagctgggcatggtggcacacacctgtactcccagctacttgggaggctgaggcaggagaattgcttgaacccaggaggtggaggttgcagtgagccgagatcaagccactgcactccagcctggctacagagtgagactccatctaaaaaaaaaaaaataaatttacttactagtactggaaagctaactaatatattttaaaaagctttaacaaattagagtggctacctgcaagagttacgagagcattgaaccrtaggggttgggtagggagtagatttattgaatttcctgctatgtttcaatttacacacattgtctcattgaaccctctctaaaacctgtgaggtaagtacttttatctctgttgtatttatggaaaaatgagactcactaaagcatcttgagcaacattacacagctaatgagtggcatagccagaatttaaatgcaatttcagaatgttcattcttaatgaaaaggctttttaaaaattattaaatcattaccatttcctgagattcttgaaacctgaatgcaagtgattttgccttcctgtaccttgcaattttctcatctagatatgtggagcttacaaatatgataatctcaaatattctttcttgtaccttgcaattttctcatctagatatatggagcttacaaatatgataatctgaaatattctttccagttttacttttcagtgaaactgtataaaatatttctgaatatgactcaattttctaaaaatttaaccagaatatcccattctctatttgtggggagtggggtgtcacaattttattgtaaaaagcatatagtcaaagagtagccaggcacactggctcatgcctataatcccagcactttgggaggccaaggtgggtgaatcacttgaggtcaggagttcgagaccagcctggccaacatggtgaaatgctgtctctactaaaaatataaaaattagcaggtcattgtggtgtgtgcctgtaatcccagctaccaggaggctgaggcatgagaatcacttgaacccagaaggtggaggttgcagtgagccgagatcktgccaccgcactgcagcctgggtgacagagtaaaagtccatctcaaaaaaaaaaaaaaaaagtgtatcaaagatttaaatttgattagaaacatagtaggtaaagaatgagacattgccagacacagtgacacatgcttgtagtcccagctgtgtgagaggattgcttgaacccaggagttcaaggccagcctgggcaatatggaaagaccccatctctatttaaaaaaaaaaagaagaatgaaaaagtattcttatcttcaaagggtcttaatatcccaaacataggttgatacaatcagatcaactgttagggaaggtgaaagcctgtaatacaagccttgaattgctgtctcaaaatggaggttctttttctttayataactaggtttctttttcttagcagatccagtttgctgaccagaagcaagaattcaacaaacgtcccaccaaaattggacgtcgctctttgtctcgttccatttctcagtcatctactgacagctacagctcaggtgagtactgaactgctgtggacccagctgttgaggctaataagtacgatctcaatgggccctcctgtctatccaaggctaattaagcatgaccaagactgtgctttgaataaatacttcgagtcaaaatttagactaaaatgctrggtggaatatttggatttctcttggcaattcagagtggagcttaatagaggcctcctcttccaatagagtcagaagagggtgattaaggaaattgaattctttaatctactcagaagggtgggaatatgtcattgatgatctttccggaacagtatgtgtatatacttgtggtcttttttttttttcatcctttgaaaataaaaaagaaattcttcatccctccatctggtacttgcaaattaacagggaaacctcaattgccccaagaagtaatgacacactstagctagttcaagcaagtgagccctttgccttctctcctaagctgtgacattggacttcttgttattcctcccatcctttgcactggcattaactcagatacatgtgccctgggactgagttatcatttaatgccaggtgagctgttactgtgtaggaccccttgaaggcatcggctagtatgctaaacgctgcctagtatgagtcggatttaatatggagttagtttattttgctcttgtgttgggatgtgatagggagctgagtgcttgccctagttacctcttcacattataaatagtaatattcattagaaaatgtttattatgacctgaaattttatttgttcttcgtacaaataggaaagtaatatttgttatataaagttgaaaaacagttgtttgggaagctgtagcttttaggctgggtagattatttatatactttttacatttgtctttttactttccccccacagtaacagtgaatgatgtaaagcatatgatatcacttcctatggatttttatctaaagatacagaatcttgtactaccttttttgtggggtagcacaagatttgagacagggtctcactctgtcacccaggcaggagtgcaagtggcatggtcatagctcactgcagccttgacctcacggactcaagtgatcctcccacctcagtctcctgagtagctgagaccacaggcacccaccaccatgcctgcctaaatttaaaattatttgtagagatggaatctcaccatgttgcccaggctggtcttgaacttctgagctcaaatgattctcctcagcctaccaaagttctgggattacaggcgtgagccactgcgccaggccaggaaacctatcttattctgctgaaataagcagtgytgaaaattcacaaactggttaatgtaactctggaaaccacaataattgtgaaaaatgtgaattgtaaaatagtttgtaacatttcaagctgtgggtttgtgcatgttatctaaagattgatactaaataataataatatcaaattttaactccagctcagtctctcccctacacactagatatacatatccaactatattcctgcagaggaaaccaatacctgccttcccacccagtccccataggcagggagggtactttaaaaaatatctatttacctggaagagagtaattaatgctcttagtttctaagtgagcacatagtggcttggcatagctcattggtgaatgatatagactggtatcatcctggtaaacttggaccttttagattaaactatatgaaattatcatttttataagtcaaaaattgtctacctaatgtatctgtttaatgatactaagttcaggcacaggaagtcaaaacatcctggagatgaaaaagaacttaaagatctcattctgcttccctctaattgctgacctctttggaacatagggtgctacttactatacatagttatttatctcctgataagttcttatataatccctggaatttaaagattttatttaaaatttgctggctttggttgcctgatttaggggtatcccactgtcctggttaccctcatctggatctatttcagattaggtatcattttaaaaacattatgcctatcaacataatattctcagtggtctgaactaatctacaggaagtgttagttctgtaaactcagtgcttttaaaatgaaacccaaaatgtttgcttctttagcagctgcatcacatgcactgttaccttgttttgttttttgtttctttctttttcttttcccctttgagtgaatggttgtcaagcccttttaaacagactctgactagaaatgcctactatcctgattattggactaggagttaggagagacctagtttctagtctttgatccatgtttgatttgttgtgtgacgctggaaaactcttgcacctggcatcttcgtaacacagacaatggaaagttatatacaatgatagaaaaagagtttcatgtgcatcgaatgaaaagccaaaagtaatggaactgactcacaactctctaaatatgacaagacatatatgcaaatrtgtgtcaataaaaacttggggcccattttcagcatatgttataatttaaatgactaggctgggcacagtggctcatgcctgtaattccagcaatttgggaggccgagacaggcagatcacctgaggtcaggcattcaagaccagccttgctaacacggtgaaaccccgtctccacaaaaaatttaaaaattagccaggcgtcgtggcgcatgcctgtaatcccagctactccggagtctgaggcatgagaatcgcttgaacccaggagacagaggttgcagtgggccaagattgtgccactgcacttcagcctgggcaatagagtgagacttttttttatttaataaaaaaaaataattttaggcagggcgcgttggctcacgcctataatcccagcactttgggaggctgaggtcggcgaatcacctgaggccgggggttcgagaccagcctgaccaacatggagaaaccccatctctactaaacatacaaaaattagccaggtgtggtggcacatgcctgtaatcccagctactcgggaggctgaggcaggagaattgcttgaacccaggaggcagaggttgcggtgagccaagatcatgccattgcactccagcctgggcaacaagagtgaaactatgtctcaaaaaaaattaataatttaaatgactatagaaattaacactggaaagccccaaagactcatccttggacctcttcccttctcagtttatactttctccctagatgaactcatttatctcataggtttaaatatcatgtattggtgtttgattctcatattttatccagctcaaatctgtctcctatatactagattcatatatacaactgcctgctgagtcctttcacttgaatgttttatagatatctctttttattttattctatttttttttaagagacagggtcttgctttgttgtccaggctggagtgtagtggcacaatcatggcttactgtagcctcgaactcttgggctcaggcagtcttcccacctcagcctccccagtaactaggactacagatgtgtaccatcacatctggctaattttttaaaatttttttgtagagataggggtctcactttgttgcctaggctggtctcaaactcctggcctcaagcaatcctcctcccaaagtgctgggattacagacatgagccatggcacccagcccatagacatctcaaacctcccatgtattaaaaactgaactcctcagttccaaccttacccatcttcagtctattctcaacactacagccaaatgtattcttttaaaataagtcatgtcatatcatttcactgcctaaaaccttccagtggcttcccaatctcactcttaggtaaagcctaaagttcttacaatggcctacatttctgttcacctctctacttccccaaacctcctccctccccgagatgttcatttcactctggccttactagcctcctactgttattttgaaacatgccatgcactctcctgcttcgagacctttgtacctgttccctctacttggaatgctctttttccagatacatgcattgctggctaccttacctccttcagttcttcaccaaaaattatcaacttctcactgaatcctatcctggctactcttttaaattgtacccagcatggtgactatagttacaacaatgtgttgtattctagaaaattgctaagacaacagattttaagtgttctcaccacaaagaaatgatagggatatgagataatgcatatgttaattatctctgttgagccattccacaatgtgtacatatctcaaaacatcatgttatacacataaatatatmcaatttttgtcaattaaaaattaattcattaaaagtaaatatgatacagaactccacccaacattctctgtcaaattttcctcctttatttttcttcatagcacttatcatataacatatatatgataatatatatcatatatattatgttgctaatatgttttgctaatatatcatatatatgataatatatatcatatatattatgttgctaatatgttgctaatatgttttggtcttttcctttctatttaaatgcaggatccatgagaacagagattttttttttttctgttttacattgctctattcccagcacttagaactgtgtttgacacagaagaggtactcaataaataaatattggtgaaaggtgttcagagacgttatacttttatacccttgttgaggtccctaatatactcagtgtgtatgaacaacaaaagcaggtttatgagatttcaaaaaaagatactttcctgtccaaagtgcttgttttgctgaagatactcagaggcttacataggctctagcctygtctcccttcctaaggctcctagtactaagttttgccatgctttcatttaggaacctctgccagcttttctcaaccagggatcctcatctgaatcacagaacacagaaaatgattttatagacttttcttaattttccaaaagatgatacataactagtactttccagatgcgtaggagagaagttaattcattatgtacaatggatgcttcaaggcattaggacttaatttctagcagaacccaggttgaaaaacgctgcattaatccacgaaactattttataagaagcaaacttctaaaaaactcttcccctaaggraaaaaacctcataaaaacaaatgaacagaagagacttcttttttaatcagaccgttctcagtgatatatttctgaataagctgtctttgcaatgagttacttggttaaggatgaggaaagaagacagaagtcccttcttcacgattggttctttttgttcccaaactctacaattcttataaagtttgagatattttcagatttttccaaacaacaaaattttgtgtttgtatttgggatgctagcatagctttttacacatttccagagtgttactcatcagtgaagtctgctataacccgacacacaggtccctactgttatttccattaccaaatgaataggttaggcccaagaggaattgcctgacataaaatagtctaataggactaattcagtcagggttctgactgctgcttctcctagcagtaactcacagtatcacagctgctgagaggtaaakcttaatcaggcttgaatcataaaatgtgtatacatgttctgtgagatagattgtggattcttgattcatcatgctgtcttttgattttggaaaataatgaaacaagataacatcccatagtaaagttatattgtacttcatactacttttctacgtagaaactgaacccttttggttatcatctcatttattcgtaagatttttccggtggtagttgggggaaagagagagcatgaggaaagagggaatctgttacagtttacagttggataaattgaaaattggtcacttaaccacttagggttgaagctagatctaggatctcaggactactttagtaggttattggttgttcttgtttatttaaattatgactctgggctttagagtatgctgacaattacaaatattttagaaactctgttcaagtgtgtttgtacatacgtgttgggtttctctaaattttcctaggaacagtccttaatactatctcaactgtcatcatgagtttgttactctgtggcagaaatgagtacggattcaaagaataaatgagtaaatttatttattcatttatttataattcattcatttataattcagcaataacctttccactgtgtttgcagaactaataatatattctcttggtctggatctgtcagccatgtcgtatccacatagtagtacaatctagacaactgatatttttggttcttacctgatagcaggtccgtataaagggctctttgaggccgggcatggtggctcaagcctgtaatcccagcactttgggaggtcaaggtgggcggatcacctgaggtcaggagttcaagaccagcctgcccagcatggcgaaaccccgtctctactaaaaaggcaaaaattagccaggcaccgtggtgggctcctgtaatcccagctactaaggaggctgaggcaggataattgcttgaacccaggaggcggaggttgcagtgagctgagatcgtgctactgtgctccagcctaggtgacagagtaagaccctggctcaaaaaaaaaaaaagggatctttgaaaacaaatacattttggctcaaagaaaaacattggttgaattaactgtaactacttgactcctgttaagaaagtaaaacactgttttttccaggttttagaatagagaagtggtgtaaagatttttttctttgagttggtgtggggaaatggtaaagccagaaattggaatgcttctcttaaggggaaattttcaaattttgttttgctttttggttttcttctgactcattcttagaaactaaagaggcataggaagggcaatctcttctgggtagagttaggactccagtctcaacctctcaaatcactgccagccaaccacctgctgtttgggtagattagtaggagatgatggaggtataaaaaaagataaactgctaaatgattatgtatgtatatcattcttttcccattcaaaatcttaaagctgagtaagaacccttaaagatgttatatctggaactgaatttaaaatatgtgctaaagtgggtaatatcaggtatcatttattgagtgcttaattactgtatgccaagcattgcagtaarcactttacatacattatcttacttaatctgcttaacaacttgactctgacaagtcatgttctcctattatatagtcttatgacatcctgatttctgctttatagcacacattacagatgtattttttaaarctctaaataattaattttgtaactagttatttcttttttgactcactgactagactgaaaactccatgaagataaggaccatctatatctgtcctgtatttccagcacctaggctatgcctagtacataatagatgcataactaaaatttgaataaacacctgagtgtgtgaatgactgaatacgtgaataaattaacaactctttcaaacggatcagctccactttatacacccaaaaacagagactgagacttaaaccaaagactgactccagaacacatgaccrctatatttaaatggccattgggaagcataaaaatcatcatgactctgaaaaagaatttgagatttcaggatattctgaatatgaacactttcttcaaaagtaattttccataaatctggatcgggattagagatggctgttatctttttatctctcaggtggtagaagcatggttcccctaagcctctgatttattaggtatttctgaatattgattagtaaaacagatgacttcccagaaagctgtgtctgggttctgttgccaaaagtactttgagctttcactcaccctaggagagggaaccacaaactttttgtacagattagctcctttcaagaacaaaagtctctttggggatttactaattccctcacctcccctggtgcccatgttcattcctgttgcctcgtgttaggactttgctccagctccaaaagagattctgaagcccctgctgcccaaatggtttgtagtgccatgcctgattaactgggcaaggtcagacttgccttttacagccctcgcagaggtagaccctttgctaagaaatctcagaaatgccttaattctctgcatataagtagatcagagcatcgtagaccgtaggcactctgagctttcacagttttctacccttaaaagtgatggcagtacttattccattgagagatacaaagcgttttctagagagtgtttcttaaccccccaaaaaacttgggggttaagaactatcttcagaagctcaaacacaaatcagggaaggacactgcttcaaataatctagcaaatggttagtaactacagaatcctatgaagactaaaaagaccccagctaagcatgtgaatagtagtagcagcagctgcctgttaaccacgataaaaagttttaggcctttcacactctagtatatgttgctaaatggattagttatcagagcattttattgtaccaaaggaggatttattcacttctttgggagtctaaaatgcctaacgccagacctactgaggccagcaagaagggagagcacattgaatacttcattgtcaatgtctaattgggtctgcaggcacaattcagcctcatcagagtccgtcttaaaaaagaaagctctgttaggtcagacaaatactttttgtgtggttcttaattactttcccatggattccttgttttctaggtcttatctgttcagtaattgtactaaaacacaaattatatcaaacatttaagcagcacacagagcagagtagttagaatcccaaaaacccatatgttaatgaccacgatcttgcattaggaactttaacctaatgctaccatggtgtaaccttttctttttgcgtattcaaggacctctgcgtgttctgaagataaagttagccctacatttcaagttaaggctatccaggaagaatgtctttggcaatctctttcagcttccctcttctggcatgtgtatagcctgcaggtacttaacagaggtaaaaaaatttatatggtgctaggtggctagagaagcttcagtttgctccatggtttggaattttagaggaagcatttttttttttccgagtgttttttattctgtcattccagcggcttcatatacagatagctctgatgatgagacatcgcccagggacaagcagcaaaagaactctaagggaagcagtgacttctgtgttaagaacatcaaacaggcagagtttggacgaagagaaattgaaattgctgaacaaggtaaagaaaacaagcaccttttccttcttaacctacctgtgtctttttgtccrtattaatccctttttatgtctggggtctggtagcttgtgaaatttctatgtgataagaatacttataacaaaagaaatgtgagttcaagaaacactggggaaatctggcaagtctagaaggaaccctgtattaaaaaaaaaaaaaaaaaagggagagagactggataaggactggaatatagagaatcagaaccctggagcatttgcctccaaaagccctttataaaggaaaatacaggtttaatgtcttgatccctggagaaacctaatctaacctgatcaggggaaggatcttaayttaagaaaacaagtttttctgtttgttcttttatctcttattccttcttctttaatattgctgtatttattgggccttttcagaaatgcctgcattgatggctttgaggaagagagctcaaggagaaaagcctttggctggagccaaaatcgtgggttgcacacacatcactgctcagactgctgtgagttcttttcttttctccttttaattacaatagttaataatagccacgagctactgaaagcttacaacatgccaagcaccgagttaagagcttaacaagtattagcttattaatccttataatggccatataaagcaggtattcttgtttccattttataaacgaagaagctgaggctcagagggcttaagatatttgtttaaggttatacagctagaaatcacagagtcaagattttaacttcaatatacagtagtccccctgccttgtctgtgggggataagtttcaagacccctagtggacacctgaaacttcagacagtactgaaccctatatatactatgttttttcctatacatatatacctataatcaagtttaatttatgcaattggccctgcatgtccaccagttctgcttcctgaggatttgaccaactgcagatcaaaaatattcagaaaataaaataatacaacaatacaaaataacaagaaatataacaactatttacatagcatttacactgtattgggtactataaataacctagagatgctttaaaatatacagaaggatgtgcacagattatatgcaaacactgcatcattttatataagggacatgagcatcctcagattttggtatccatgggagtgctggaataaatcccctgaggatactgagagacagctataaattcagcacagtaagaaatgaacaacagtaactcaaaataaaagagagcaattacaacaacagactgtaataaaagttatgtcacataaaggaatttatcacagtacatagcagaaagtccaaagggaaggcagacttcagatgcaggatctcagggctccagcttcacctctctgattctcttggagctgcctcctcagtatgcttacttcaccctaaagctgatagcaagatgcttacaactattctagtcatcacaaactgacatgaaaaggaagagggaccatttcttcctcactcaagagaagtccctccaggatactccatcgtgtctcattgggcagaactggatcatgtatctgtgctccaccagtcctaccgaggggcgtggaattaccatgatttgcttacaccagtgattcctaccttactctcatcagttttaatgtcccctttttattaaaaaactttttttttgcagtgtccctgaactatcctgaaatgaaattcagatataacatgtccaggtacatataatctttaaaaataaatcaatataaaatcttaactgaaatatgaaggaggaataaaaaaagtacaatacttaaaataatgtgtatttcaatatgtaaatacttgaggacaactatagtagaacaatcagatatttgtactatttcacagtattatttgaaatagtattatttgaagacagaaataaatgtgttattgattccagagcatcagagcagcattgccatgattttctgaaatagtaaacaactttttgtaatcttctaaacaataagaacaacaaaaagtatgagttttctcttcatttacatagctgttacattcctggaaaaactattgttttgtattaaaactacaaaactactttttgctaatttgtaaagtggaattaggttctaaactcagataattgtagataggtttttcacccatgkgaacttttaytgggacatttgaaaattgtaccagctgcaacacagttttttgttgagacactttcaaaatgtccagattcctggtcctgcccactaaatgccaatagcactccccttccaattattgtggcaaccaaaaatgcccccacaattttctagatctcctcttttatcaccagagatgcaatatatatggagttgctaaccataatgagaccactatcgggaaattgttatattgagcagtggtctggaatcttttatggggattcataagatctgggtcatctgtgtggctagatcagctttccaaagattgtctctcccaaagcacaacacttatgtggtcacattcctgattaagaacattagagattcctcaaggtacagacagcttctattagcatcttcactatgaaacttttctgggttatgtgttctctgaggacaagagtaccctgactgctcaaaattaatataataaattgaaaagctatctgttttggagctacaaactaatgaatcaagacagaaacactcttgaatcttttttggcctgctcagtcagcgacatgagacttcagtgtggtagcttaaaatagtaagtgcttctctactgtctcatgttgctgaattacatctagtttgttttttacccttaggctcagtgagcattaccacctttcatggttccctttctatttttttcctgaatggattaatcacaattagcttaccaattttaatattaatttattgtttccaccccacatttttttcctttaaaaaaataacgacaaagaaattatgctttgtttgccaacctaatactctttcactcttgtcttagttcatttgggctgctataacaaaataccttagactgggtaattaataaacaatagatatttattgttcacagttctggaggctaggaagtccaagatcaaggcgccagcagattcagtatctggtgagggcctgttccttatagatggcgctttctatgtgccctcacatggccaaaggggcaagcaagcttcctcaggcttgttttataagtacactaatcccatttgtgagggcagaaatctcatgtctaatcaccttccaatcacttccataatcaccttttaataccatcgcctagggggttagtttttaacatatgactctgggggaggagaacatacattcagaccatagcaatccccaaatactttagtgtgtattttctacaaagaaggacattttcctgtactagcagtataaccatcagaagtagaaaattaacattgattcattattaccatccaatccttagatcccactggagtttcgcttgttgttctgataatatttttctaacaaaagaatccagtccatggttatatgtcacatttagttgtcatgtctttttaatcttcattagtacagaacagtttctcagtctttctttgattttcatgaccttgacacttttgaagattacagatgaattattttgtagaatttcctcaatttggatttttctgatgcttcctcattatgagattcaggctatacatctatggtgggaattcagggaagtgatatatcctatcaggtgacacatgatttcagtttgtcccagaactgatkatattcactttaatcccttgattgaggtggtgtctmccaggattttcctctgtaaaagtttttttcccagtttataattaatatgttttttgggctgggtgtgatggctcacgcctgtaatcccagcactttgggasgtcaaggttggcagatcacttgaacccaggagttgaagactagcctaggcaacatggtaaaaccccatctctacaaaaaaatacaaaagttagccaggtgtggtggcatgtgcctgtagttccagctacttgggaggctgaggtgggaggattgattgagcccgaaaggtcgagattgcagtgagcagtgagctgagattgcactgcactccagcctgggtgacagagtgagaccctgtctcaaaaataaataaaaatagaattaatatgtttatgtgagatagtactatgaaactgtaaatatctcattctttatcttactttgatttattcattatttttatttgtatggaatcattgtttcctattttatttaataggttataatccattactatcattacttatttacatgatcatcttgttcccagtttgaccagggagagcctcttcagtgtggcttctgtgacttcttttgtcttttgatatatccctttcattctttgaacatttccttgcttttggtacaagatcacctaagctcatcttgaacattccatgccctactcttggaaccagccatttctcccagaatgcctagctccttttagtggatctgggcactaatgtgctctttgcttttgaaatgtcaktgttcccagatcctcttttttccctctccatacatgtaactggwgttccagaaggcaaagagggaaagaatccatagactcccatagaccccatagattttgagcactccgttgtgatttttttctgccagtcttcttctttttgtatttcagttcagtaatttctttttttgttgttgttttgttttgttgagtagggtctcactgtgtcacccaggctggagtgcagtggtacaatcattgcaggctcattgcagcctcaaactcctgggctcaagcgatcctcctgccccagcctcccaagtaactgggactacaggcatataccactatgcctggctaattttttttaattttttgtagagaagagatcttgctgtgatgcccaggctggtctcaaactcctggcctcaagcgatctcctgcctcagcctttcaaagcgctagggttacaggcatgagtcactgtgcctggctcagttcagtaatttttattggtctatcttcaggttcactgattctgtccttggatgtgcccggtctgatgataaacctgttgaaggaacttttaatctgactttttttttttcctggcatttgtatttgacttttttttttttttttttttttttgagacagagttttgctcttgttgcccaggctggagtgcaacggtgcaatcttggctcaccacaacctccacctcctgggatcaagcgattctcctgcctcagcctcccgaataactgggattaaaggcatgtggcaccaagcagctaattttgtrtttttagtagagatggggtttctccatgttggtcaggctggtctcaaactcccgaccccaggtgatctgcccaccttggcctcccagagtgctggcctttacaggcctgagccactgcacccagcctgtatttgactttttattgtttccatctctgctgaaattttctatctattcatagatgttgtctatctttctcaactagatcctttaacataaacatattagtccagcctgggcaatatagcaagatcctgtgtataaaaaaatataaataaataacataaacatattaatcatagttattttatatctcctgtctgatcaaacatctggctcatctgagagcctgcctctgttgtttacttatttcctgacagtgggtttttttttttactttttgtatgtcctgacatttttaattgagtggtagtatattagttttcgttatagtcatgaattgggctgaatttagagttcattgtatatcaacaaaggcttcaaattcctccagcagtggactgctataaccttgtgatttgaggttaccaaaggacattcctcagtgcttctgctttaccctcagccttcagctacttctgcacatgtgtgccacagaagtgtcctcttttcaagtacctgcctcatctgccgcactagactgctgctctttgtttcctggggctaagcacacggtgagggcaagtggggttcttggatctctggtgcagtctcagtcttaggcagacctctgtgaggggcagggttttctcaatattcctgcctctcctatctgtagcagccaaactttgccttgaatctgtggtgggtcttgggcaagacatattttcctgcccttcctggagagctggagaggtagcagatccttactttgtatcagtgaactgtcctgggcccaagaggttttcctgtgcctctcccagaggcagagtttttgcttctgccttcctccagacacagtggatctttgcctagtccctaatggcaggcccaattcctgctcttcctacagcttgaggctttggttcctatgagagaagagtgtagggaagtgcccaggtttcatgtctgtttctgagcacagccaatcagctccctgccccagtctttgttttgagcactgggtggaagcctctggaaaacagcctgcatgtgaatgggaaatctacttgtgtctggagcttcaaaaaattccacattgacacactttcccacacccagcctttcgtaattgttcaaaagtttagctgatattttcttattcttatctgtggcagccatttcttccccccatgcactgccaaaggtgaaacagtcttccctctctctttaaaaggatttgtcactctttggagggcagttcacttctgtgctttatgacctcaaatctttgatgggctcaagaaaagtttggctttgtagattacccagtttttggggtttgtgtgtgtttgtgtgtttatttgttcatttatttgtttgtttgttttgttctgttttgagacggagtcttgctctgttgcccaggctggactgcagtggcacaatctcggctcactgcaagctctgcctcccaggttcacaccattctcctggctcagcctcccgagtagctgggactacaggcgcccgctaccacacccggctaatttttttttgtatttttagtagagatggggtttcaccgtgttagccaggatggtctcgatctcctgaccttgtgatctgcccgcctcggcctcccaaagtgctgggattacaggcgtgagccaccgcgccccgccatttgtttgtttttgagacagagctttgctcttgttgcccaggctggagtgcaatggtgcaatctcagctcactgcaatcttcgcctcaccgtttcaagccattgtcctgcctcagcctcccgagtagctgggattacaggcatgcgccaccatgcctgggtaatttttctgtatttttagtagagatagggtttcaccatgttggccaggctggtctcaaactcctgacctcaggtgatccgcccacctcagcctcccaaagtgggattacagtcgtgagccaccgttcctggccgtgtgtttggttttttggagacagggtctcactctgttgtccaggctggagtgcagtggcacagtcatgactcactacaacctccatctcccaggctcaagcagtcctcccacctcagccttcctagtagctacccagctttttcctgtcgttaaggtgggagcttctcttgtagctttgtatgttctaagcagaagcagaactgtaaatctgttttttcagaaaagttttggctctgaagtccttggtttattaaatcttatggggaagcttaatttaaattggtaaaaacatagagtcagctggagcctccctcttcccatggcttcccccaatacttgccttcttagaatactgaagaggttctgtagagcccaatttgaaaatcactggcttaagtcattcccgttgtatyttctgattgtaaaatatataaactttatctccttgactagttgtttggcccasgcttgctcataccctgctttgtctttaatacaggtgcttatggaaactctgggtgctctgggggcccagtgccgatgggctgcctgcaacatctattccactctcaatgaagtggctgctgctctagcagaaagtggtaagagcttattctctgtgcctttggctaaagtaagtctatttggagacttactttatgtttcagcataaatctttaaagaaggttgacaataaaagaactatcttggaagaaatggatctcgattcttcatgaatttgctctttttctggccttcgcttgtcaaatatgatctagttaactttgctattttacagttgacaaatatctacctatgtctaatattctattgttaggtaatgctttgttttaactcactaattcactaatagcagagcactagtgaacactactcactgaggtaacatggattaaaggagaaaatgcttcagccatagttttgtgactctgttggttttccagcaagtaatttgccctgacttaatgtttggtgtttctgcttcaggagtaaagaagacttgacctggcagattaatatttgatcacaacatccactggtacttgatggacaaaagaaatagagaaatttggactttgccagcctcttgcctttactctttggcagtacagctagcactctcagcatttcatttgttctttcattttaatttacttatttataagattttatggctgtatatatgatagaaaaatatttaatactttattaatacaaatattaaatgtgtaccccagtgaattgtacatacgcattcatttcttttcctttttttaaaagtagaaacggagtcttgctgggtcacccaggctggggtgcagtagtgcagtcgtgtttcactgcatccttcaattcctaggaacaggtgatcctcccacttcagtcttctgagtagctgggacttcaggcatgtgccaccatgcccagctaatttaaaaaaaatgtttgaagacacagggtcttgctgtgttgctcaggctggtctcaaacagccagcctcaagtgatcctcctgcctcatcctcccaaagtgctgggattacaggtgtgagccaccatgcccagcccatttcttttttctgtttttttttttaaatttaatttaatttttattttttatttttatttttatttttatttatttattttttttgagatgaagtctcactctgtcgcccaggctggagtgcagtggcatgatctcggctcactgaaacctctgcctcccaggttcaagcgattctcctgcctcagcctcctgagtagctgggattacaggtgccctccactatacccggctaatttttgtatttttagtagagacggggtttcaccatgttagtcaggctggtctcgaactcctgacctcagatgatctgcctgcctcggcctcccaaagtgctgggattacaggtgtgagccaccgcacccggctgccccatttttttttttaaacaaatgcttactgacctacgctaagagctgtaagggcaaatgagacaatgtccttaccctcagaatcttatattttggtgagataatacacatatataaataatgatgatacaaggacatatataataaatgccatgacagattataaatccatattcactacacaaacaagaggcttaggaaagttcagattcccactttgggaagctgaggcaggtggatcacctgaggtcaggaattcaagaccagcgtggccaacatggtgaaaccctgtctttactaagagtacaaaaattagctgagtgtggtggtgcaggcctgtaatcctagctactcatgaggctgaggcaggagaatcgcttgaacccaggaggcggaggctgcagtgagccgagatcgcgccactgcactctagcctgggtgacagagtgagactccatctcaaaaaaaaaaaaaaaaaaaaaagaggccaggcgcggtggctcacacctgtaatcccagcactttgggagcctgaggtgggcggatcatgaggtcagaagttcgagaccagcctggccaatatggtgaaaccccgtctttactaaaagtacaaaaattagctgggcgtggtgccacgcacctgtagtcccagctactcaggaggctaaggcaggagaatcgcttgaacccaggaggcagaggttgcagtgagccgagattatgccactgcactccagcctgggtgacagagcaagactccgtctcaaaaaaaaaaaagaaaagaaaagttaagattccttgagagctcatttccagctgggttaatcagacttcattaggaacatgacacttaactgggctatgaattctagtaacgttttagcaagtggagaaacacgtaagggtttttttcttaataatagggtggaatgattaaagtatagaagcaagaaaaattaaagtgtaattgggaaatggtgagaatgccagtttgagtggatcaagaagtacctgtttctggtttttgttttccctttagtcacttttttttttttttttttttgagacagagtcacgccctgtcgcccaggctggagtgcagtggcacgatcttggctcactgcaacctccacctcccaggttcaagcaattctcctgcctcaggctcccaagtagctgagattacaggcatgcaccaccacgcccaactaatttttgtatttttagtagaaacaggtttcatcatgttggccaggctggccttgaactcctaacctcaggtgatccacccacctcagcctcccaaggtgctgggatttcaggagtgagccaccgcacctggccccctttcattacattttaaacaactgtcatacttttgtccattctgcttgtcctccttgggctaataagagcagaatgaccaacaaagacaaaggaatggataaaggggctgaaggcaacgccaatcagtgaagaatgtcaatccaaggagyatagcagaatgagagagttggaaattaggaaaaaccagaatcttctcactaaaattagggggtcagccttttttggtctttaatggtttccctttgttcctttttttcccaggatttcctgtttttgcctggaagggagagtcagaagatgacttttggtggtgtatcgatagatgtgtgaatgtggagggctggcagccaaacatggtgggtcagatttctgctaacacaattctgtaggggtcaggaatggggatgggtggaggttatggcctaggagagggtttcccaacaagaaggaaggaaaatggcttcatttctatctgatatacctgggtttccagcagaactagattcttatgctacgggtaccccaagagtattgaagctcttataacctcagagtgccttaattattggttctaatgttggaagcatttatattcattagaaacattaaagcactgcccaggattcacatgtggctggttraaaaacaatagtaatgagtttccatcccctgctactgcctacttcccaccccttacaacaaccaaaaaacccaaacaaaccaccccagaactctggagatacttagccttctctctagaatccatatacttgtaatgttagtcaggactagaaaaaaaataaaaataatattcatataatgaatttatagtaaacctgaagagcttacaagttcaaatttcttctctttatattctttccccacattaaaaaagacgagatgaagttttagggttttaatttttgcttcatttttatttttgttttattttttagaagatcaagtcttgaagcctcatagcacattagatttgcaaagaggcaaaaagctacacaaagggccaggtgtggtggcctgtaatcccagcactttgggagcccaaggcaggtggattacttcagcccaggagttcgagaccagcctgggcaacataggctttctacaaaaaatacaaaaattagcaggatgtgttggcatgcacctgtagtagtagtcccagctacttaggaggctgggactcctaagtgggaggatcacttgagcccaggaggtggaggttgcagtgagccgagatcacaccactgcagtccagcctgggtgagagagtgaaaccatgcccccatcccagtgcccccccccaaaaaagctacacaaagtataaggtgctcctattttgcaaataattctgccctctcccctagggggagggggcagaaattagggaatgtactgagaaaagaatccctgaagctctagtccaaccattgcttgctgctgaaggctgcagagcaggcctcacttggtgcatggcagagaagtagcttctttctgaattctgtgatccaggtcacactgcaccaggcttgtttgaggaagctgggttagagcttcatatcctaaaggggtgggggagcagagttgacagtggctgtaagatgagtcagctcattccaacagttttaatagtgacacaagggagtgtgactgacagatgctgaagcagatatgccagggggtttctcctgggaataaaacattgatttttaaagtcaggaacccagggaggacattaggattatacctggagaacttttacaaactgtagaaccagcacaaactgctaggaaggttaataaagagagtaagacaaggacaaaaacagttgtcaccccagaaaacaggacccatacctgtttggattctgtcaagatttagtacttctccttgcttcccaacctctggaagatttcctgatgacaataattttctgcagtagatttatatggtgagaattatgggcagcattcattaagtaaatcttagagacagcaactactgtctctagtggataagaatagtgaaacttacaacacagagtttccagttgttcagtctctcttgtctcttatcttttctgtggaagggaaaacttcatcagggattccatacatggagaatgggagagagaaactcagaagagctttttgctttcttggggcatctgttctgggggtttctacttgtagtatggagcaagtacaagagctttgatgagagtcctaacttggatcctggttctcaagcaaggtttgagtgagagaaaataggtcaacagcaagagcaaaagcaaaaaagagatcaggtggtagacatgaggttggggattttgtgtactctggggtccagaatggcagttttggcacttatagtagagttgataattgatgagactgcaagatgggtgcatgtcagcagagggcaacccagttctgtgggactttccaggaggatgggtataacaatttgcagagtcctgctaaacacttctgacagcctagggaaggactgaagtgtcacagcctcgtgcctaacaatgttctaagctggtttttctttagttttataattcaaaagcttttctctgctgatgaaagctccagtgggcacagcgttgtgtttatctttaatcccaacctgaaatagtgatagatgagctgttcagaggcatgcttgcacacctacatgctgcacggttccctggttatttttaatttggtttgtacagagtgtgaggttgtgctaggcaaaaccctacagtgctgcctgatattttgggtgggagagtgcctatactttgggagaagaaaaggattaaggaatacagttttataaaccattgttctgacagggagacttaattatctgaccatttattgatttatttttcttttttttctcaagaggctgtgtaaactgaggctgtttatttaaactaagtcttgactgaatatatttaaagtccctttaggctttctgaatacctatagtagattcaagatctagtggcctagtaactacaagttaccaatccataagaaaatcctcggttagttgctgtatattttgatacagtagatatgtcacggggagggtcgtttggctgcgcgaattacaattggcctttctcctctcattgtcttttacttcaatataatgactatttggcagattattgtatttactctggctttaagttactttgcataaccatatgggaaattttaaatatctgtaaattgctaattagattgggatgcaagacccagagaagcactgaagccttgagacttcagcaaagtgaatgatgttattgatgcttactattgcagatcttggatgatggaggggatcttacccactggatttataaaaagtatcccaacatgtttaagaaaatcaagggcatagtagaggagagtgttactggagttcacaggtaagatttgacatgggcatacctggttttatgcagtctagacataaaatcttataaacacatacctataaaacacatgttaaaaattggagcctgggccaggcgcggtrgctcacgcctgtaatcccagcactttgggaggctgaggtgggcggatcacgaggtcaggagatcaagaccatcctggctaacacggtgaaaccccgtctctactaaaaatamaaaaaaattagcctggtgtggtgggcgcctgtggtcccagctactcgggaggctgagggaggagaatggcatgaacccaggaggcggagcttgcagtgagcagagatcatgccactgcactccagcctgggtgacagagcgagactccatctcaaaaaaaaaaaaaaaaaaaaaaaaaaaaaaattggagcctgctatgaggtaaccacatctcagcttgctatgaggtgaccagatctcagcttgctatgaggtgagcagatctctcttgttttttttttttaattaacaacacaaataatgaacctaaaatagtgagaagggggcaggtgggagaacaagtgaagtcctcatgttttctagtgattgtaaacaattaacttgtcctttttggacacatatattcattcattcattcaacaaatatttattgaacttctacaatgaatgaggaactgctctagatgctaggaatctagcagtagacaaaacagacagaaaaaaactctgccatcttagagcttacattcttacatggagagcaaggatgtagggttctgcttctcaaatgagtaataattctctgagtaaaattggaattatttcagttcaatttctgtgatcatttctatgatttatttcacccataaagaactaaaagtatgaaaaaaaaaagttgtagggaagtaaattctgaaccagccaccatcactgcttcaatacattatcatctttttgaatgtacaaaactgaggtcaggagttcaagaccagcctggccaacgtggtgaaacccygtctctactaaaaatacaaaaattagctgagtgtggtggcgggcgcctataatcccagctactcaggagtctgaagcacaaaaatcgcttgaaccctggaggcagaggttgcagtaagctgagatcacaccattgctctccagcggggacaacaagagtgaaactccatctcaaaacaaacaaacaaacaataaaagcacaaacagccaggcgtagtctcatgcacttgtagttctggcaggcagggagaccagtgcagatttagtgaacattgtacctagtaggtaatttttcaaccttcaacccgctcccactctcccactttttatagtctccagtgaaggccttaaaatttagaggtgggtcaaggatttcccccacatgacttttgaataaaatctttattgtgaagctatatatgcaggctctagaaagatattctttatttctcagtggccacctaacaggatgaaactagtcatgtctcatggtctcatgcctacccaatcaacgtatttctggggcctcctatgaaagcaatggtagattgtaatgtcctggtgttttttgttcttggcttccctcatcctcaggctgtaccaactgtccaaagctgggaagctgtgtgttccagccatgaatgtcaatgactcagtcaccaaacagaaatttgacaacctctactgttgccgtgaatcaattcttgatgggtaatgtttattatctttgagatgaagttgtgatgtccagttgagattctaagttttttggctttggttatttctggaaaggattcatgtagcacctctggataatgtctccataaagccagagctttgtcacctcntaaattaaaattacattatttttattttctcytttgtatcttttctatttctaaatattatattttcaaaatattatctaataaatgtatgttgcttttatgtttaaaagttactgtgttatctacatcttcttcctttctgcaccacttgcaagaaaggggaaaaaaaaaggaaaaaaacccttacatataggattggttagatggcagggagtgagaaaatatgtattttatttaaccttcctgtctggtcattagtttctctaggatagaaaccagactttcagtgttacaggtcttttagaatttgtctagcargttttctggtctttaccagaaaacccctttaaaaaaataaagaaaccagactttctttcaaaatgaaaaaccaaccaaaaaaccccatgaaaacaaagagattcaatctaacctcaagggagaaacaagagaagatttttctgatttaatgtttttttttcccctagacttaaaaggacaacagacatgatgtttggtggaaagcaagtggtagtctgtggctatggagaggtgaagtttaaccttttgtttattrggtgttttaaatggattttgttgaaatattctggaattttttatttgtatggacatatgagtacaccctttaccactttagatgagaaaaagaatttcagaggccttctggttgaagtagactttctttttccctttgcgttgccgccattttcccttaagttgattttctgacttgctccagtaccaccgtttgtgatgttctttttagcttgtgttttgattatgaatcgtgagtgtgggtgttcttgtgcacatgaatgcgataagcaggagccaggggtttgtttatgagctgcattcaattatttgttcttctcgttttccccaagtatgaatctattcagtgaaattcctctcgggggtggaaagagggggtgcactttaccagaagctttgagaaatggttttctcagtgactttccttaatatgtgtgctctctcccctcttcaggtggggaaagggtgctgtgctgccctgaaagccatgggctccattgtgtatgtaactgaaattgaccccatctgtgccctgcaagcctggtaagcctctacgctaccatctcacttgcaatctcggagctgtctccaaagaatggcctggttgatgccacactttattttagaggagcccagatcctcagagatgctgccactaactctaagcatctgtcttttaaaaaggtcaaggagctctgcttggagagagcagagactatcagaaaagcgaaaatttagaaatcctgtggagatagtaacagggattctgtcagccagagaacaggtagccccttaccttctccatgtatgatacttgcctttcaaataatgatcagaaaagaaattggcaggcatcagatgccttctgatgtgttacactgaaaatagcccttctgtggtattcctcccaaaaatgtataacctgaatctaattgtgaggaaacattagaccaatcccagttaagggtaaaatctactaactctgagtgaagcatatatgagaattatttacactagtattataattcttaagtttgaaatgattctaaaattaaaagttaaaacttttcttatctataaaatgtgtgtaatcatacctacctcataggattgtgagagttcagtaaaataataattagcataggctgggtgtaatgggttcatgcctgtaatcccagcactttgggaggctgaggcaggaggattgcttgcgcccaggagttcgagaccagccttggcaacatagggagaccccatctctacaaataatttttttaaattagctgggtgtggtggtgcatgcctgtggtcccagctacttgggaggctgaagtatgagtatcacctaagcctgggaggtggaggctgcagtgagttgtgattatgccactacgctccagcctgggtgacccagcaagaccatgtctcaaaataattattattctatattatacattatataacaaatacataattatataaggtacagagctgctgccacataatatatgctcattaaataatagctgttattaaaattgtctcttgccatcctcagcagggtgggaaataccactgttcttaaaaactattgcagagtccaagtgtctgtagcctaggggaaccatcatccttctggtacactaagagtttaggaacctgaacatattttaatacaaattgatactgttcagatactgaacagttcagattatcctgttcagattatcctgtagacacgaattgatcacttactatgcattagatactgtgctatgtgctgagaatgaataagatgaatatataaatgagataaggtcctgcttttagaagcacacagacagataaccactgtgcagcaaagtaagtgctgtcatggagttaaacggcacatgcttctgtaggagcataaaggagaaattgcttactgaagagcaagggagcagggtagaaagagatgtcagcagagctgagtcttgacatttgtataggtgttttcttagtttggaagtatattccaggtactgggaacatgtgtgttgtctccaaggaaggagatagcatggcagatttaagaagctagaaatattttaatgtagttggcagatgaaatacatttgggggagtggtactatctaaggtaggagtcatgggagtcatatgtcaatataatcacatatcactgtaagtatttgggtcttactcttatcctgtcttatccttaagaacaggcagtctcactgaagtattttaaggaaaggaagcgacatgatccaaattgcatttaggaaaatcactctgccaaatgatttagaaagatgtaaacctagaggcaatgagattgggccaggggttactatagtaatctaggcaagaagtaataagacctaaacttaagcaaggccagtatgtattagagaagagtagagagatgaaagagacgtttatggaattaaagaaaaagagtcacccagatttggtgacaacttcaattcaggagaggcagcaaggacattcttgtttatatggctcattcagttggatgaacagtgatgctattgatcaagatagaaaatatagaagaagaaatagatgagattatgggtgcagagaaaataataagtttattttcaaacacagtaagtttgagatccttctgggacattgatgaggtgctatccagtggctaatttgatccttggctatgaagcttcagagagatctaagctaaagttacaaatgtaaaaatcagccatctatcagcagtcatttgcagccaaaggaagagtatggttctctatactgaaagaatagagaaaagaataaaggcataaccctgcagagcaccaatatccaaaggttggctgaagttgaggagaggcaattaagagaagtaagaggaaaaccaggagagatgtatcatggagtccaaggggtatagagttttaagaaggcaaataatgtttaatgtagtagaagaaatcaaataatataagagtctaagaagttgggcatggtggtgtatgccaatagtcctggctactcaggaggctgaggcaggaggattgcttgaggccaagagttagaggctgtagtgcactatgattatgcctgtgactagctactgcactccagcctgggcagcatagtgagatcccatctctaaaaaaaaaaaaacacacacagttaagagtctaagaaatcttgggtttggccttcgggggatcactgatgatcttggagagagcagtttcaatggggtagttggttaaatggctaagtggcactttctacagtttctagaaatttggtcagggaatctcatggtagcccctggctccctattatcaggaagaaataagttccgtgatgcaaacgaaccttttatttctgtcttgtatgaactaaggaaattgtttggatttttcacttctaagaatagttcagctatctcaagaaatgacagcaacttgatattagcttttgaagtcctgtgttaaaaggctccccagctgcctgtttaggttaatgggtcatgctttatttcaacagtatggatggatttcgactggtgaaattaaatgaggtcatccgacaagtggacattgttattacctgtacaggtatgataatgacattttaaatggggtggcacttgggaatgtttttatggagcaggtgcaagatgattggaaatattctgaaaaaccaaactctaaaagctagagagakatagtagcccgcaaagccagccagtctttcacattcttcctaattctttagagctccgaccaaaggtatacgattaggttattcctatgtaaaaatgtttctcttcacccttgaagacaactgttatatctccattcatcctaggagatagctagagatgagattcacttataaagttttatttgggaagccagatatttttttttttccaaaaatatatttatttttaaaaacagaaaatcagatcagttttatagagtcaaattttcaagagacaaaccagagtttggattccagcttagagtgcaagtgaagcatcagtaatctcatgcagaagatttgtctctgcaggaggtacattctgcttgactgcaagcactcaattctctaaatctggtttgtacttctgccatcattttattccattccagcgctctggcatgcaagataatccatctctaaaattcaagacttccaaattgagatgaacgattattgggcttgggttggggtttataaccaatccgatcattgatcatttgttcccggctcttgggatcactgctaagcccaatggctccttctccatcactgcctcctacaacttccacatcttccttctgtttcttacgggtctccaggtcctttcgaatgttctcaaactcttcaatgtcatcaagctttagctctaggcgtgttggwttccgtctcagcatactgaagtcaacactaagggccaaacccagtgaactattagcaattcacaggattatcctcagcgtccaaacagatcttaaatgtgtacgtcattcattaaacaaacacttcttgtgttccagctacaragttaaaaggtacagtcataatctcttttcaagccgacctagccccttccccgggaagccagatcttaaatgtacacttgattttttattttacctccaaaagtgatgtatgtttctctctagtatgtaattaaggcaaggctagagagaaattcttcatagttagagaaagtagacgaggttattctgttaattcccaaagaggtagattttgagttttaaagaatatgcagaaatggctagtttcctctagggtaagatacttatttttatgtggaaccataaactacaggaacactggttttctaattctattttagagggggaaatcagacagaataaaaaaaaattgtagttgtagcctcaggaagaaataggggcagagaagagggaccataagaagctgttcttggttcatatcaatcccctggatctcttttgttgttttaaatagagatgaggtctcagtctccaggctggtctcaaactcctggcctcagcgtggttctcccacctctgcttcccaaagtgatgggattataggtgtgagccaccctgcccagcctggacctttttttttttttaattgcttttttgtgatctgtaattcattcactgcacatttcacacatttaaattgttcactgttttttagtaattcacagagtttgtacaaccatcaccacaatctaatgtttttactgagttgtaattcacattgtaatgttcacgcttttaaagtatgcagttcaatggcttttagtaaagttgtagaacatcccaattatcgaatttttatcaccccaaaaagaaaccccatatcattagcagtcactccttattccatcctccatcatccgccaggcctaggcaaccaccatttccctattctggacatttcatataaatggaatcatagcaacacctgtgaaaagaaggggaaaaaataataattttttttaaaaaggaatcatttatggctgggcacggtggctcacgcctgtaatcccagcacttcaagaggccaagatgggtggaccacctgaggtcaggagttcgagaccagcctggccaacatggtgaaaccccgtctctactaaaaatacaaaaaattagccagatgtgatggcaggtgcctgtagtctcagctacaggagtgtgaggcaggagaattgcttgaacctggaaggtggaggttgcagtgagccaagattgtgccattgcactccagcctgggcaacaagagtgaaactccttctcaaaaaaaaaaaaaaaaggaatcattcaatatgatgttttcagggcctccccatgtgatggcatatatcagtaccttattcctttttattgctgagtaatgtatcattgtatggttatactgtattttatttacccattcattaactggtagacatttgggttgttttcactttttggctattaggaataatgctgctatgaacattgaatacaagtttttatgtggacatattttttcagttcccttgggtgtatagtaagagtagaattgctggatcatatagtaactttgtttttaacattttcaggctgggtgtggtggctcacacctgtaatcccagcactttggaaggccgaagtaggcagagcacttgagcccaggagttcagaccagcctgggcaacatggcaaaactctgtctctaccaaaaaaaatacaaaacttagctgggtgtggtcccagatactcgaggagctgaagtggagaatcacttgagtgatttaaaacaaaaaaacaacatttttaggaattgccaaacttttttttttttttttcgagacacccaagctggagtgcagtggcgcgatactggctcactgcaacttccacctcccgtgtgcaagggattctcctgcctcagcctgccaagtagctgggactacaggcgcacaccaccacacccggctaattttttgtattttagtagagacagggtttcaccatgttgcccaggctggtctcaaactcctgagctcaggcaatccacccccctcagcctccygaagtgttaggattacagtcatgagccactgcgcctggctggaattgccaaactttttaaaagtgactgcaccattttacaatccatcaacaatacatgtgccttctaatttctccatatcttcaccaacacttgttattgtcagtctttttgatattgccatcctagtgagcgtagagtggtacctcattgtggttttgatttccattttccctgatgactaatgatgatgagcatcttttcatgtgtttattggccatttgtacatcttctctgaagaaatgtcgattcagatccttttcttttttttcttttggagacagggtctcactctgtcacccaggctacagtgtagtgatgcagtcacagctcactgcagccccgacctatggggctcaatcaatcctcccaccttagcctccctagtagctgggactacaggcacatgccaccacacccagcttatttttgtattttttttgtagaaatgggactttgccatgttgcccaggctggtctcaaactccagggctcaagttattgattctgcctcagcctcccaaagtgctgggataacaggcatgagtgagcatgcctggcctgctttttttttttttttgagaaagagtcttgctctgtcacccaggctggagtgtggtggcacgatctcggctcactgcaagctccacctcccgggttcatgccattctcctgcctcagcctcctaagtagctgggactaaaggcacccgccaccacacccagctaattttttgtatttttagtagagatggggtttcaccgtgttagccaggatggtttcgatctcctgaccttgtgatccgcccgtctcagcctccgaaagtgctggaattacaggcatgagccaccgcgcctggcctggcctgcttatttttaagttgtcttcttcttattgggttgtaagaattccttataacaagtccctcatcagttatatgatttgcacatttattttctcattctgtggattatctttctccactgctgctcagacctctcttctgtttttaaggtaacaagaatgtggtaaccagagagcacttggaccgtatgaagaatagctgcatcgtttgtaacatgggacattccaacacagagattgacgtggtaagatcaagtagctcattattgggggcttttttctctccttcacaagaagcaaactggaaaatgagagagcagggtcacaagccatcctaaacatgactatcctggcagagttgtccacatcttttcacttactagccctatagcctgtgtttttggagactataaagtttcttcatctcaatttaataattctaaatgattgtcatcttctattcaagctcgatgcctgtttacaccataagccttatctgtatgtttaggattgagagcaagataaactcaaaactacaatgaatgatagaaactcagagctaagtgatacaatgaatgtgaatcagtatggtagtcagtattttgggggtgtttggttttaccataaagatgagataagtaggttggtccaaggaaataagggagagaaatctatgggctgggatgattatgttgcttaggattgactgtgtgtatcaaatactgcggtttcttcttttatccctctcttttattgggcgaggtcacccctcacatgttttccaaactgtagtaattgtgtctgcaggtgtcataatcaattcagcaccattgtgtagtagcatgtgttcttcaaacctggaaaatatatcactttgattctctaatttggttatattcaccctaaaattttccaatccaaaatagcacttggtactaataagttgcccaagtaatagttaatagaaatgttgtttctttttttttttttttttttgagacggagtctcactctgtcgcccaggctggagtgcagtggcgcggtctcggcttactgcaacctctgcctcctgggttcaagcgattctcctttctcagcctccagagtagctgggactacaggtgctcgctaccatgcctggctaatttttatgtttttagtagaggcagagtttcaccatattggctaggctggtctcaaactcctgaccttgtgatctgcccacctctgcctcccaaagtgctgggattacaggcatgagccaccacacccagccaagtgttgtttatttcttttcagacttaccaaagtatctctcagtgtgacttttactctggttttaaatttttctggcatttttatggcacgcttgtatttctctctgggtaactggcttaagcaaagtatgctttcatctccactgagggctgctctgattgagcttcagcattgccaggtaaggaccagctgatgtactgagagcttattggataatatttattatatatggtttcccttttaaattctgtgctctattcttccattattaaaaatagctggcagaacaacctaccaaagcccctttctaccctggggtrtctgagtggtatggccttattactctctcttaccatgatattttgcttacaatgaacaatttagttggtagttggttctttagttttcttttgcttaagtttcatttatgtgctatactgcctctttgctgaatgatcaaggatattagtatttctaaaatgatccagcaaatgattctcatttcctggatgactttgcttctagagcccccaaaggggaaaggcctaaagggaagtattcatgtcatgccctgggccctaatgggaaatcttcagaggaagggaaggggaaggaattttccttcctaaaccctcaagaagctctgaaataaaaataattccaaatgcagtgatgtaccttttgtawttttactttatctcatttcatctttttgacgactccatgaggcattattcttattcttaattttcagttgggaaactaagaagttaactaccttgtcaggcatataattgattcaagatgaaactggtgcacaggccaggcacrgtggctcacacctgtaatcccagcactttgggaggctgaggcaggtggatcacctgaggtcgggagttcaaaactccatctcaaaaaraaaaaaaagaaaaagaatatgatgtttgagaccatgtgtggtggctcacacctgtaatcccagcactttgggaggccaaggcgggatgattacttgagcccaggagttcgagaccagtctaggcaacatagtgagacctcatctctataaaaaataaaaaaaaacaaaattagttgggtgtggtggcttgcacctgtagtaccagcctggccaacatgatgaaaccctgtctctactaaaaatacagagattagttgggcttggtggcacacaactgtaatcccagctactccagaggctgaggcaggagaattgctggaacccgggaggctgaggttacagtgagccgcgatcacgccattgcactccagcctgggcgacaagagcgaaactccatctcaaaaagaaaaaagaaaccagtgcacaaaatccagggttttttttttactcctagtctagttttctttgttttgttttcctgtgtgttgtatttattatctcctcatgacttgtggattaacttcaaatcatgatggtaatctctccttcagaggcagcccagacataagtaacctcctaggataaagaccagaagactcttcaccttcaattacaaatattttttgtatgattgctatatgccagctgttgttctaaatgcttggagacagtgaacaaaacaagcaaatatttctaccctcatggagcttatatcatagtgagaagaaaataaacataataaatatgtaaaatttatactatgttagaaggcaaaagcaccacagaaaaaagaaaaagtagagcatggtgggagaattgagcactggattataatttgaaatagatcaggctgtgacccttattaagaatatgatgagccgggcccagtggctcacgcctgtaatcccagcactttgagaggccgagacgggtggatcacctgaggtcaggagttcaagaccagcctggctaacatggtgaaaccctgtctctactaaaaatccaaaaaaaatagctgggcgtggtggtgggcgcctgtaatcccagctactcaggaggctgaggcagaagaattgcttgaacccgagaggcggagattgcagtgagccaagatcgcaccattgcactccagcctgggtgacaagagcgaaattccatctcaaaaataaaaaaaagaaaaagaatatgatgtttgagacgatgtgtggtggctgacacctgtaatcccagcactttgggagaccaaggcaggatgattacttgagcccaggagttcgagaccagcctaggcaacatagtgagacctcatctctacaaaaaataaaaaaacaaaacaaaattagttgggtgtggtggcttgcacctgtagtaccagctatttgggaggctgaggcagaatcactggagcctgggaggcagaggttgtagtgagccaaaatcgtgccagtgcgcaccagcctgggtgacagagtgagaccctgactccggcaaaaaaaattttttaaaaaaagatgatatttgaggcagactggaaggaatttgccatgtggatttttatgtaaacagcatttcaagaagagagaaaggccagtacacatgccctcaggcaggagtgtgcttagtctgtttgaggaacaacaaggaggccagtgtgcttggaggagaatgagcgtaggacaaggaagagtggaagatgaggtcagaggggtaacaggccagatcttagagggcctcatagcccattgtaagaactcctgattatatcctgagagaactagggagctgttgagggtttataatctgacttacgtttttaaaggatggcttttattttaaaagaattgccctggttgctgtgttgagactagaccaagttttgcaagtattgccaggtggcccccatatctaccagtcacatgagccaagggccatctctcacttctctttgtgttcttcttggcggaagatatatagctaagctaaatggtccagaaaaggagatgctcagaggaacttttgaaaagttaaattattcaacctttggtgatagtgtcacagggcatgtaaaatgaaattcaaggaaatatcaaactcaactagtaattgaaaccgaatttttattcagtgtttagcaaatttatattgaatacctgctctgtgccagataccaatttactaaacaaatgacagtgaacaatatcccgtctctcagggagcatatattctaatgtgggagacaaataataaagaaatagattgttattgttagtgttgaagacaaatagcaagataagggtattggggattccattttagttagggtagtcaaggaagtctctttgaggagataacactttaaaaaacctgaatgaaataaaggagcaagccatccgagcattctgttcagagagaatggcaggtaaaagaccctgagggagacacctgcttgatgtgtttgaggaaaagaaaagaagtcactgtagcaggaacattgggcaagggggtgaggagaagagttaactcaaggaggtataggctatgtagagctttacaggtcatgttaaggactttagattttattctgaaagaagccattgggaggttttgaatagatgagtgacaaaatctgacttaggtttttatttatttatttatttatttttattttttatttttttgagacagagtctcgctctgttgcccaggctggagtgcagtggtgcaatctcggctcactgcaacctccgcctccttggtttaagcaattctcttgcctcagcctcctgagtagctgggactacaggcgcccgccaccacgcctggcagattttttgtgtttttagtagagtcggggtttcaccattttggccaggctggtctcgatctcctgacttcgtgacccaccagcctcggcctcccgaaatgctgggattacaggcatgagccaccgcgcccagccgacttaggtttttaaaaattactctggaggccaggtgtggtggctcatgcctgtagtccccagctattgaggaggctgaggtgggaggattgcttgagcctggaagttagaagtcagcctgggcaacatagtgagatcctgtctctaaaaataaaattactctggcttttgtataaagaaaaccctctggagcttgactaatgatagggataacagcaggttctttcagtatttctgactgtagaaagtggtggcttggattagatggacaagtggtagaggtgataagaagtgatacattgtgaccaatggaatttgctaaatggattggatgcacactatgagaaaaagagggaaatcagtaccagtcaactcagtgaaactgtgggagaatgatttggtaagtatcgagatatttttagtaatcaaaatttttaaagagttttttttccttttttggtaggaattcatagtttaaccttgagatgttgcctgttgcatatttaagaaggagtagctcatcaaaagagttggtcatttagaaagctgcattttttttctgagaaatatgaatgctgtgaatactgaaggatctgggatagggattatgctctccactgtcttttggccgtatctttcttttatatgtttgctttgtcttaaaagcagacctgcagccaggtgtggtggctcacgcctgtaatcccagcactttgggaggctgaggcaggcggatcatgaggtcaggagttcaagaccagcctgaccaacatggtgaaacgccatatctactaaaaatacaaaaattagctgggcatggtggcgtgtgcctgtaatcccagctactcaggaggctgaggcaggagaatcgcctgaacccgggaggcggaggttgcagtgagccaagatcacgccactgcactctagcctggatgacagagtgagactccgtctcagaaaaaagcagacctgcttacccatgtgtatcacatagaaggcctgtgtaattgtaagcttcacaattcaggtggtcaaaccagtaagtacataggctttaaacattttttccagccgaagaacgatttaacctgagactttgtgctttacaggactagaactacagttgttctccctgaaaaaaaaaaaacaaaaaaaaaccggatatgcactgttcagaattatataagaccaatttgtgcaagcataatgagtggccagtttatggtgggatgtacacctggtttgggaaggtagtctgcacaggaatcccttttcccggtaggttgtttagtgattataggtccacagcaaagacaactggatgtttttaagagagattcttgtcaagttgtgccagccgtaaggtaggaaacccttctgctcttgaggaatgtgactgctgactaggccttaataggcaggttattggagcttcctggacagtggtagagataagttaaccaagtttctcttcaaacccctttttaaacttactgtcaggctttcacctacagcatagccattccagtgctttagtaaactgcctctactaagcaytggttattttcttatgtttataagaagtgtcctttccttgattctgccatacctttcttcccaaggaatacttccaaagatgggttttagctcttagctcccaatcaccaagattgcttggcctctggaaaattaggggtgtgaaacactaagaacctgaaatactttaaactcctgtcatctcaataaaaactgccattgtcaccaagagtatctcttgactctttgtggttattaacctccatggcactaagctctaaaggctaatggattctactttgtatatccttaacttctcaaaatggtctgtttgcttaaattctttttttttttttttttttgagacaagatctcactgttaccacccagactggagtgcagtggcacaawctcagctcactgcagactcgacttcctgggctcaagcattcctcccacctcagcctcctgagtagctgaaactacaggcgcacgccaacatgcccagctaattctgttcttttttttttttgtagagacaaggtctcactatgttgcccaagctggtgttgaactcctgggctcaagggatcttcccaccttggcctcccaaagtgttgggattacaggcatgaaccactgtgcctttctcttaagttctttttaacccttaaatttacagtatttatttataacatttattttttaaaattccaattttaaagtaatacttgcttagtttaaaaatgcaaacactacaaatatgcttaaaataagcaaaaaacttccataattgagattacactatattgttctgcaacttgatagtgagtgggctgggtgcggtggctcacgcctgtaatcctagccctttgggaagctgaggcaggcagatcacctgaagtcaggggttcgagaccagcctggtcaacatggtgaaaccccatctctactaaaaaatataaaaattagctgggcatgatggcaggtgcctataatcccagctattcgggaggctgaggcaggagaatcgcttgaacccaggaggcagaggttgcagtgagctaagatcatgccattgcactgcagcctgggtgacagagtgagactccatctcaaaaaaaaaaaaaagaatagtgaatggttttcacgttaacacatatatgtctgtcttttttttggagctccttgctgtagtacctttttaaaaaagagttgtataatattccattatatggaactgccctgatttacttaaccattcccttatttatttacatttttcactattacaaataagcctggattgaacattcttgggcacttatatttctgaacttgagcaagtgtttttattggatagagccctaaaaaagtgaaaytgattggtcaaagattaggtacatataaaattttgctagctgctgccaaattgtcctccagaaaggttgaaccaatttatgaaacttgacatttcaagaaattgtatgtgtttcccatctacctaataaagaaacggtccacaccattaatatagttctgaatgcactgaaatataattgtatatgtctttcccactagattggtacttccttggggataggaatcatgaatttctaaactttagcatcccattgtttgcttaaataaaccttgaaatacaaaaatgaaaagaaagtactgtctttgtccataagtggctcacagcccagtaaaggaatccacagtcttatctatattcatgctctttactacaatgactagaatatggtatgtaccctgtaaatcattattgtataactaaaagcgtttctttttatttgtctaaaaactatttggcagaacttcttaattttatcaaatgagccaatgggtagttttggaatatgaactcactttctattttaggcattgcctgttggaagaaagaaggtgttgtcttaagtctacaccccgtggctgttatttgattgctgctgttaaaaaaacataaccttttttctcattttctctgaatatacaatatacagaaatggaaggagggtgagccattgggagctttactctaccattaagcatttctttaaaggctacctcacatttgcacttaggtcacaaagcttctgtaactagggtgaaccaccatcattgaaaaggtggaacctgggaccttcggatatgagggcagaaccttgggccccagcatgctatgtttaggacatttggcctcttactaaacccactcagctatgttcctcctttttttctttgtttcttcagcacttatatattcagtttgcactgtattaatttgcacttgtttgcatgttgctttgtaagtattttaagggcatttttttcctctcacatatatattgttttgtgtccctggctaaagtacaagctttttgaaggcagaaaccatgtctttggtttcttttgtatttcccatagcaccttttactgtgagagtgggcacacagtatatgttgtggaatgacatcctgagtgatccctccctggctgggcctcagattaaattccctgaaatggaacagtcctaaccaacacaggacaggtattctccatctggcatgttggttgctcctttcaacctgctatttgaaatggctcccttcaacatctttctgttcccayagtggggcttgctatggctaatgctgtacttgctgtatgtgttccaggcgagtctgcggacaccagaactgacctgggagcgagtgagatctcaagttgaccatgtgatatggcctgatggcaagaggatagtactgctggcagaggtaaggctgagactggcaaaaatactcccccacaacaggagagactgcaatacccaggtcccctcctcctcatgttctcgaatactttcaactcctctgttaagcacaagtttgactactttcccaatggattttacttctaattgtgaaagatcttttcattcagcaattaagaaactattttggttccccacttttcaccaattatcctgtctctccacgtcaatccacaggttgagttagataattattactatagaaggaattcacagatagaaccagtgccactttgagtgatgcatacaaagagataatgtcacttgtgggatgttttaatcactaagcacaaagtagatatgcccgactgtaaccaggactatcttaggcaagttctgggaatgtatgtttttactgatagattccctgtttttgaaggtccattcccttgaattgagccagatgagtagtaggtacctacctagatatcaattgctcaattgatatttccccatcctagctcctagctcacattgacactattgactttcattttattggcttccatgtcagtgtttgaccacttttcctttcttaaaagctcctcttccctagtcctggattcctgacagctataatattagatgccttctattcttaccttgaagctttctcttcttcagagaaagataccaaaatatcaaggaggataataatacttttctcaattttgattttcagttggttttttttctttttttawattaaagaacctgaatatgaaaatgyaaaatatacattgtctttatctaggggcccataagttaggagtttttagtgtccttactgttttcttcacattttcctcactttatctcatcttctcagatacttcagggcatttgtaaagggactgaactatttcttcacaaggaaggagtatatatgaggaggagatgggcagattgccaaatatgcattaatagctttgatgtcagtctgctgactgatgacttgtttctagctgccctaggaggtcccacctggtaattttggtgacaaaagcaagtaccatgggtgtttttggctagatggttgagcaaaaaggtggtcaggcttcataggaaacaaaataggaaagggtggcattgggggcaatttctagttcttctactgtctgaatcaccaactcaaaatacaaggctgacaatgctgtctttgaattcaggagaagcaaactgaaggagaagcacaaaaatcatcacagctatggtgaaaccctgtctctacaaaaaaaaaaaaaaaaatacaaaagttagccgggcatggtggcgcacacctgtgatcccagttactctggaggctgaggcaggagaatcacttgaacccagggggcagaggttacagtgagtcaagatcatgccatggaactccagcctgggcaacagagggagactccatctaatcaatcaatcaatcaatcaatcaatcaatcatcacagcttcctaagtccaaatatacctcccctcacaacctggagagattgtccctggatttgactgatcattgtttatttcaagacagtctttaaaagaaatgccgatcctcagaaggaggatattttgctatagagagtggaaaattcaagagaagtacactgatatttggcataagcctcagtgtcatatgaccatctgtattcctttttaaataattccagaaatcttttagctattagtttcatcagattttccagaattttagtggtttcatttaaatgtcagtcagttagttcttatatattgaatagctgctttttttccagcagtgttagtcaggaagtgtttggaaaatggtggtcatgcttctcttccctcacttctcaaaggccagcgactttgtcctaatccatttgtgtcttcacctttgatcactagggccgcctgctgaaccttagctgctccacagtgcctacatttgtgctctcaatcactgctactactcaggtaaggcttccagagtgggatagcagtagtctggagaaggtcctcagacccaccaggtttcacttgcttgggtagattgccatgaatggcacatcagcatccatctctctgcttttctaggctcttgccttgatagagctttacaatgctcctgagggtcgctataagcaggatgtctacctgttgcccaagaagatgggtaagtatttactcttccatctccatccttaccaaagtagttcagagtctgaggttaaaggaagtttgggggcattaacttacttaaggatgggggaaaaaaggtaccttcatcttgtaaagtaggaattaggattcctaggtgccattcccatttatttatcccattttctacatgtgttgccctagcgaagttgtgatattatgctgtgatttattttacctgcctgtgaattttaaggattttttttttcttaaagtatctttatgtgggaatctcaaaggagaaaaaaaaaatcttcccttaaaagagaagaatcatctcctaccttgtgacatctgacttactccaattctaggctgccaaatagcccctaccaaacttttctcagacgacacaagactttcttactacaccttccaacaccaatcccagtgcttcaggccaaaggagagatgtggaataggagctatttagttatgtgggtgttttgtrtaagagaaacattaacctgtcttaaatttttaaagagcctgcctcaagcacctgaactgatacagtgtgtttataaactcctcaggcaaagatcaggtaataaataagcttctggttttgttttgccttagcactaggtatataacaactgttaaaagttgatacattttccctttagtagacactttagaaggmtataaaagcaacagcacagtccatattctgacagaatgtataatgaagttgggagaccaaacaaatacataggaaatgacataagattatgaataagtactrtgtagtcagataatagaatgtgaacagaaacccataagaattaagagtactaaaagcaaagcaaacagttcatttatcccatttagtatccttcttagtttttccattcaagtttccccaggcattagttgttttaaatgacccaaastatggagtccaaggcaaaactcaagttggagcttcccattatttagttcccacattatcctattccttcttttaaatcttaatgcctgttgtttctttcatctctcctgcacttttctggaaggcagggttcaaagctgagttagtaaggatgaattattaaggctttggaaagcactgggcttgaagctgaaggcagctattccttagaattgaggaccagtgagcgaaggttgaacatttttcattcagctccaggaattagaaggtgtctttgaactttttaaggcctagcttggggacaatagccatcagataaaaggcatgaatgcttataccagggcttctgtggtctgttccagatgagtatgtggccagcctacacctgcctacctttgatgcccacttgacagagctgacagatgaacaggccaagtatytgggactcaacaagaatgggcccttcaagcctaattactacaggtgccttgggctccccagaaatcagggacacctgggcagtgatgagcttcctgcactggaattggtctttgcatccccaaccacatatgcttacatgaactcagaaaaatgaacccacttcccctcactgccaccttcaaaagactcttcaaggccttaaatagtattccccttcctgaatttgccttttggagatagagaggtggagtttgggtaagtggctatttgcctcattaaataaagttccccttcctcaattcctttccccatttcatcttgttgctatgatttttatctctttatggagaaatattggcctttttcaatgatgtgaaaaggaaacacagttatttcctgtcactgtacactccagaaaagtctctgcctccctgttacacctttaggcaggctcttcatgtcccagcatccccattagctgataacatcacagtctcatctttctttttccctccaggtattaagttcctgtaactcaaaccagaatttttaaggaatagaactccaagccttttctccactactatacaagaaagaattcagcaagctgcttctccaatcaaagctgcctgccgtgctcaccctgtgtgttaggttatttatttattaaaatcaagaatcctgtgcctgyagtgttggcccagagtgtggttactgccctgagggccatgaaagccacagaggatgggctgaggaaggaaagaaatggggttactgctcccagtgcatcatttgcatcattccccattgactgaatcctcagcagtggccgtttttcctcttgtccaggctcacgagttagtccagggattccatactccctattccctggagttttctggaataaattttcagcacctgcttttctcagcttggcccttccccgggtgaggccgtttggaattaacatggccagtgtttcacacaagattgggttcccaatcttgaccatcactatcactgccttctttatataaaggctaataaggaaggagtgttatttatggctttgccaagctacatcaagaactcagctgtgctgtgcctaccaggggtctcctttcttacccaggactcctttcttctccttgaatatttatgtccattttaacacttcctggttgcaagagggatgtgcctccattatttcctccacagttttggtatttgtcagacatttgttctgctgtctttctaatccagccaacgtctgctcaggaagtggggccagctccactgggacccatagttttacttccttgtcatttgattggatagtttccaaggaagcccctccagattggcactatctcagaaaaggagagcttgttgtgaaacactgcttcctgaaacttcctgctattgcctaaagctacgtctgaaactgagtagggaaaggcatacttttccagggacttagggggataggctttggaaatgggacaggtctttcagactcacagcttgataccctaacaaagcagagtatatttatttgtttcccaggaaggccattgcagtttgactggctgagggatacagagatgaaattgtaaactgtatccagattatcaaagctaatttgactagtttgaacctcgtcagacattcattcctttggccattgccatggatgaaaccgagatctgcagtctgatctgtggacttctctgctggcatatcttttatgatttaacctcttccatttgatgattctgtatttcrgagtcagtttcttgagtaactccagtgctacaaaaagaattagtaatgtggtgtgggcagcgtgacattttatgtcccacccaaaaattggattccttttggagactgatctgttggtctcaggcatttcattaggaccagattggttctaagagttagtctggactggccctaggaaacttgaattaaataagcctcttccccttaccgatcctttttaacactctcaggtttgtttgtttcccacttttttcctatgctggtctgcctcaaagtctcaagaccaaggtgactcaagataacaccagaccacgcatgatcaccaaaaccttcccatcctgattctcttcttctacctctaccctctccaacttctcctggtcttcacatatactctcaaagctagtctgaaagtgaccttactttcggaagtagggaagtggaactttggtaaatgactgtttgcctcatttaatagtatacaggctcagcccatagactacagttcttcagaggccatatgtctcagcaagtactggttatattctttttttgtaaggaagatcataaatgctaaaaattccactaagccattcagttcttccttttgcctacctagtcctgatttttgtattaattggttccctttagcaagggattcagatctttgtaccttatcttatatccagagcagattccatttggcagatagatggtctctagcctattgtattcttagaccaaaaatcataacctgctgtttctcagcaaagccttgctctctggagcttactatgtgctggtacttaaagagtacattctgccttgctrtagtgaagagacccactccaaataaaaaaggggccacacggggcttctaagttaggttgccagtgttgctgcccatgatgagttatttgcctctgagtttcagatgacctctctgtagggacactgtgttatcaaccattaagaagaaagaaccacaagcctcccaagtatttgggttctatcttagggttgaaatctggtcattattccctctacccttggaatcagagcaatgtgtcttctttcctccaacctcttaccttagatgcatcctgsttatctggaagcatgggaaagaaggctacttatctctttgtatgtggctccagtctgtgaggatacataacattttctctacaatgaatctgtgctaatattttgccttctttctttcttttcttttcacccttagagacagggtttcactatgttgcccaggctggtctcaaactcctgggctcaagcaatcctcctgcctcagcttcctgagtagctggaaccacaggtgtgtgctaccgtgcctggcacttttttgccttcttaatggagatattcagttttctttttttcatttaaacaaagaaaaaaaatgtatctactctaccttccctctgctctcctccctccctatcctacttgcccatatgagcacggctccccatggccacatactcctgcaaagcttttatgctgcttcgcttttctctaaacagatctgatattgctgctcctgtggttttctcaaaattaactttgccgtggtttttaaaaaggaatcaaaatgcattgttgcattaagctttttcaataaaggaaaattacggaaggaaaataggcaacaccagcaaattatatgtggacaggttctaaactctatatatacatatatatatatatatctatatatctatatacgtaatcatctagttctgtcatcttactgaaaggaataacacttctaaagatcaccatttctgagaagttcttggaaatctttatgtctaagtgattgtattagatcagcaataatgactatgtaatctcaaaaaacaaataaaatattcttaacatggactcttaagggtatttcttgtttctgtgaactagaaattcagagatgagagagatctctgggcaacaaactagagatcctgctgtagggcaaggatgtgaaaatgttaccaatgggcatgtttgaccttaggatgtgaaaatgttaccaataggcatgtttgaccttagttaataaatatcatgttcccctcctaccagccagcatacacgcgcatcctggctgtgtgtgtaaagaacctgtcttctcagaaccaccaccctggggagtcgaggactgtaggcttaactcagagaaactaaaccatagttctaggtccctgactcccttttagttgaaaaatgcaggaaatcagcatcccccagtttgggaccaaaggaccttgataactaggacctgattatatccagccaaagggaagaaagaagtgcatcaggcagagatttgtctctaaatcaagttgcctgatttaaccaaaggataatccaattgcctattctttctcaactgccagtagggtaaccatctttgggtagctttctgatagccaccttctttagttgactacctaaactagttctgcatcctgtatgcaagatgttttcttttcatagcagaatcttctgccactttggcttctgattatttagattaagggacacagggctagaatcgtctgggcagtcagtaatcctcaaaattagtgccattccagttaagaggaggagaatgcagcagctagcaatgaagccggtcagctcaaaggatttgctcccctgcagtagggcttgactcctcatttgtgaaggatggaaccttgggtgcctgggtctttatttcagaatcatagggtaagcccaagctatccactgctgcacaagtttctccacctcacaatattgtgcaaaaaaacttgaactttaaagcaggctagcttgggtttgaatcccagctctgccatttacaagttatgtaacttagtcaaattacataaccactcacagcctcaattttcttgcctgtgaaatggatactgcttatctcctaggataaggatttaatgaagcgatatataaaaagtgctgcttatttacagagcctggcacgcactgctgactgcatacacatcattccttgtctcaatctagagccctacaacctctgttgcatcattacacccacacctgccctttatggagagaggagggtgttctatcctttttttactaaattatcctaactgcctgatagcctcaaaaagcaggtactttaaaacttactgcgtcttattaagctttctcagtgccaggtgctatccatttagtcaagtatctgacctctgtggattaaagtggagtgcttatatggggaaaagggtatatgtgattcttgtaactacacctatttatacctccaaccctctgctggcagcctgagttttgggacaagggaaattggtaatgtaggttttttaataacgtcaaatataacagcattggagccatctctgcaagatggagagacttgaccagccttgactagctcccaggtatgggtgcctctgtggtgaatggtattgatgactatgatgcctttgttgacaaataagctaaaataaattgaatgtgtgccaattccatggcctgtagtttcaaagttttcagttactctgtggtttcttgttacatcttccagttgtttccagatatcttcctccttattagaaattttgaacgtctgggcctatagtgagcacataggtgtctgatcttagtaaaggtattctatttcgctgagatgtggaaaagatcatggattgaggtctctcctcgtgttgactctatgcaatcttcatagcaccagttttacacattccttctctgaaattaaagccagatggagcctctaggcttagcaagtggctttagatagccaccagaggggacttgcaagctgtcctctatcctactcccaagatcagtctgccctttcccctaggaataggcaggaaaagaataaagcatcaaaactggccactcctgtctgctaccactgttgggatcctgccgattgattaggctcacaaaagaatatgaagttctgggcctgttaaccttagggctctgactacttaggaggagaagtactgggaagaagagagatagaataatgaattctttctattaagaaatcccaatgggctgtgctgtggcaggtttaccacactgaagcagtgatgagcaaggcgtgggttgtgaactttaaagcagggtgtaaatttttaagagtttaacaaattataccctgaaaaaaatccaaagtcaagtagttcaggccttgagccagggactttcttggaaattcatatcaattcagttctgtaaacgccacactccccaccccccacamccagccccccgccccgagacatttttggttgtcgcactagcgggaggatactactggcatctagtgaagagaggccaggtattctgctaagcatcctacgatgcacaggacagccccctacaataaatattcagccccaattgtcaatagtacagagactgtgaaacgctgcgttaaacgtacataaattaggggcatacaaaaatgagctaaatttggtcttactcgctaggagcctatatgtgggtggggagaggagtgggactggaagaggaaaaggaagatgtgaaggtacagtaaggagatattggaccagggtgagaaaacccaaaaagctccaaagagtgctctcaaacttgccttgttctgtcgcctatgaactggcaaagggaaaagtgagagagagagagagatgttaagaaagggacagggttgtccctaaggtatgggaaggtggagtaattcctctaggccctttgctttgggtatatcgtggaaaatgttaggattttggatctaggcagaactggtttgacaccaacacaacctgaatgagttgagggctaaaaggaaagctttgtggaggaggaggaggtgacaactaactagaatctttatgagagaaaaggaatcaaccaggagaacagaagacagtctcctccagagaacagcataggcaagaccctgagacaagatagaatatgataccttggaaaccgcagggaggaatctgcaagtgccggtttcttcatcagtaacattggattcgtaaaaacaccctgtcggggagaggtatgatgtgatatttggaaagcgcttactgcagtgcctggcaccaagctcagttcaacaatcccccagacccttcctaaagcaaccaggctggggacagcgatttggtcccacctgttcccctgagcctacgtctttggggcttctattaccaagccagactgtctaaatatttactacaagctactttttaaattcaggagagggcagatcaaacagcctcttttgcccccagtaacaatgagcccttaggaagcatctaagagagaggaaggaaagaaaggactggcgagcaggtgagggtgggggcttgctctaccctcaacatttacacaccatgaggaagaggccccctacagcagagaagggcagatgacaggagcagccctcgagggcaccaccaatttcagtgatggaaaaactcccccatcccacccttagacctccagtctcccagccaagccctagctccgggcgagatgcgttctcttcagaaaaacgctgagaattctcagcttccagagacagcgagtccctcgtttcgggcgatgtccctggccacctggcggtgccatccctcccctgagactaagcgggatatgggacgtgtgcaggagccgggatatggggggccgggtcggtggtaacagggaaacggagactgctgtggagcagtaggcggagactagagctccggaaaaggtcgctacagggacgggggtgagagctgagagacaccgagtgaggagcacagagataacccgcctgatctcaaggcccagctttcgcgaggtgtggagcctgtagctaacctaggagtctccgtccgccagcaatgccgcaggactaaaaagatcccctcaaaaatctcttcattgagcccccacctcctcgagtcccgctccggccggtcgagcagccaatcgcctcgcggggcggggttgcggcgagctgccgtaaccaatagaggtggagggggcggggcctggctcccggcgcgcggcggtagggtcgcctccggcaaagcgagctgaaccctgaggggagccgctgaccagcagcatggaggaccccgccgcgcctgggaccgggggcccgcccgcaaatggcaatggcaacggcggcggcaaagggaagcaggcggcgcccaagggccgcgaagcgttccgaagccagcggcgggagtcagaggtgaggagcccggaaagcttcggctggggcccggagacgcccgccggcgggaagcggcggctgaggtgattcggcctcggccccggagccctcggcgcgctcgatcagccccgcgcagtgggcgcctgcggggtcctagcggctgaactctgggctctttggcccggaccagtgtccgcccgtctcctgccgcgggttgggggctttctagccctctggctttcccccgctgcgcgaagatgagcgcggtattgagcggaccagatactttccaaatatttatctcacttaatcgctgcagccccctgaagcagaaattccgatcccagtttatagacgggggaacaggagcggagaggttaagtgactggcttgaggggtgggaggctggagctcagccgcaggaaagcaggattggcgagtggggcaaccgcagtccccctcccaggctgcctgcggcgggcccctgggccagccgagggacttctgcccgttccctgcccgtccccttccccccgtaagtcttaggccgtttcgggagcgccttccgcggacatcaggcccctgcctgtgagggctgagcgagacgggattcaggcaggggcagtcctggagtggctatctggagggagcagtcgcaggatacagataggagtgtgaatatttcgatctcttcctcctctcctgaaaaaagaaaccctatctatgaagatgaaagcgttgaattattatcacttccctatcccctcattgaggcagttcccatcagttggatctgagcggggatcagaatagacgacaaaatatcagatgtggcagggtctgcagatatcatctggtataaccctttcattttacagacctaaaaaaaagaggagtgacttgcccaagatcagacatctggcatagttggtggtcaagaacaccagactttggagtagtcagaccaggttttgactcctagccctatcatttactacctgtgtgattttcggcacattacggaacctctctgagctccagtttcttcatctgtaagatgagattaacactgcctacctcagaaggttgtgataaagtcaaaatgagataattgactataaaatgtttggcacagtgcaggcacaatgcatgtaattagtcagtacatagtaactcttagtatattgctatcatcatcatcatcatcatcatcaagtggcagagctggtactagaaaccaggtctttggcatcccagaccttgccttaccatttgaatagcatttcagtttccaaagtgatttcatgtatgctttacattttgatgtaggtagagtaggaggaatccattcattttttttcaaggtagaaatggagatgaaaagactggcccaaagtcaccaccttgcagaggcagagagctcagccctcctgtcttgctagatgatacccgccacatcatctccctccctacttcaagatgagtctggtcttttagggcaccctgtacctccttcccccacagagacattgttctcgttcaaatgtttttttggggagatgagccattcattaattcaacaattatttatcgaggactttctgccagccactgttttaggtgccaggga

SEQ ID NO: 94063 - DNA, 38060 bp, Homo sapiens
  misc_feature (1)...(38060): n = A,T,C or G
gcgggcgatgaggggaaaacggccgtgggagcctgcggcgtccgggtcccaagcagtcactggagggacagagggaggccggaatctgccactcgggccgaggcgctgggcatcaggagcgtttctcctcgccatccacatctggagctgtctctgtgagggctcctgtgggggctgttcctgggagggccgagcaggcggcattcgcgacctgcctccctccggggcaagccagcccacacacctcgggactccgctcagaatctaaagaggtgagatccttggattatctcggggctgcttcatgaactctgaccagaagaaaagggaaggaggaagcagaaggccgcaggaaccagcccgagacgctatgaccccagagattccgcagagtacaagccaccaagtcgccacgccgatgacccacgcgcggagcagtcgaagctaggagaccggagggacagagaaacccaggcaccgaccgcccccgagcctcagagggccagcagggccgctgctcggtttaccttggtcatgccaacccccaccacgaacacccggcgcagggtcgcaggctcccacggggaagaggacatggctgcaccagtgcgggaccggggcgggcgccgcggacgactgccggcactgacaggcggagactgcaccagagctccctgaagcccgaagccagggccgcgggcggcaacacaggcgcgtgagagtgcgcgtgcgtaggggcaggaggagggggcggggyggggcgcgtcctgtggggcggggagcgttctctagcccttaggcagccgaatccctaatttgcggacttgggcatgggactgagtcaacctgtccccatctctgatcctgtgcttaggttctgtacggtgagcgggagtaggcttgcagtggggcctaagactgagaggaggggttggccggaaagcggactcatgaaaggtgaccctgaggagagccgttggggttcgtgttggaattggcctgtgtcctgttagcggtggcagttgagagtgaattcatgaatttaaactcacaggacaccaagaaagmggggatgggcaggatctcacacatggatacaatgtctaaatcaaaaaacccaggctccgtcaccagctgcgtgacctttttaatcttgtgaacaaaagttctccgaaaaggaatttggaagacagagactttattccagcaaaccggggagaaacagccttccatgtttattggagaccggagtctcgctctgtcgcccaggctggagtgcaatgccgcgaactcggctcactgcagcctccgcctcccaggttcaagcaatcctcctgcctcagcctcccgagtatctgggattacaggcgcgcgccaccacgccccgctaatttttgtatttttagtagagatggggtttcgccatgttggccaggctggtctggaactcctgaccttaggtgatctacccaccttggcctcccaaagtgctgggattacaggcgtgagccaccgcgcccggctccccggtttattttatcttatgtaaaaatgcagattcattgagctagatgaatgcataagtgactatttctctacccccctcacatgtgaaggttgatcaaagactcagaagaatgcaaccgtttgcctcttatctacccacatctttttaaaatttattcatctttccccaatatctgccccttcccctataaaaactgaagccctcaaaatcatctttggagaaaggcacggacctgtctccaaagatgatgcacgtccttaaacttggcaaaattaacttctaaattaattgagatccgtttcatatacttttcggtttgcagtatcagcatttagaaaggctctcctagaagattctaaggattgcttcttggccatttggctaagatcaagtttaggagattctaagaagccccctctgtgctaagtaaagaactactgagctaggactagaccaacttagtaaaattgctgcgctcagtgatgcacgcctcccatctgctcaggaggcttcggcagaaagatcacttgagcctgggaattcaaggctacaaatgtgctatgattacacctctgaatagccactgcactccagcctgggcaacataccaagaccacgtctctaaaaaaccaaaacgaaacaaaaaaaaaaaaaaaagaaaaacaaacacaaatcagggcactgacatgtacagttgtttcttgaaactgatggactgacaagacagcaatatgattggtggatcagacaaagttaccaacctaatagaacaacaagtcctaaggtcaagattaattgttatgtaacaaatcctggctgtccactggatattgctttcaaaataagagtccatagagggcagaggggatagatagtaatataaaaggtatttgttaataccgaaaagactgagaaaaaacacttccctttccaatgtgaaggactaaataatccaaacttttcccactataaaacacagacttttctaagtcattggatgtggggctctggggtagcctgagctgtttgtcccacaccaagatgcttcaaaacattattaaaaatgtttggatccccatgaagccctattataaccaagtttatcaggagatttgagtaggaatggggttaatgagcctcatcatttataaaatcaggagtactgataaaataagtaaaatattgaaagcttctccacctgcttatggtcatcactaaccagcttcacttagcatgcacatgaaatgaaacattagtcgacctgtgaatttaagcaagctatgttagaaaggaacctggaaaatcactgtacacttatataagtaccacttactttgtggcatgaataagtataccaaaaaaaaacacccagaaatgccagataaaatacaataaatatcattttaagctgggtgtggtggtacgagactgtaatcccatctacttgaggagctgaggcagaaaggctgcttgagtccaggagttcaaggctgcagtgagctacgattatgcctgtgaatagccactgcactccagcctggacagcatagtgagaccttttctgttaatacaaaaagacaaaaagcagcgaggcacagtggctcatgcctgtaatcccagcactttgggaggccaaaatgggaggattgattgagcccaagaattcaagaccaacctgggcaacatagctccctatctctaaaaaaaaagaagaaaaaacaagaaaaatctttttaaatgggtggatgccaggcatgggggctcacacctgtaatcccagcactttgggaggctgaggtgggaggatcacttgaggccaggtgtttgagaccagcctggcaacatagggagacctctgtctctacaaaaaatttaacaatgagccaagtgtggtggcccactcctgtagtcccagctactcggaaggctgagacgggaggatcccctgagcccaggagtctgaggttgtagtgaactgactgcaccactgtactccaatgtgggcaacagagtgagaccctgtctcaataaaatagaatacaataaatgcatggaatatggaggagggaaggtttttcttttaatcttatacccaattatagtttgtatgttttgtttttgcttcttttttttttttaagacagaatctcactctgttgcccaggttggagtgcagtggtgtgatctcagctcactacaacctccacctcctgggttcaagcgattcttgcacctcagcctcctgagtagctgggattacagctgcccacaaccacgcctggctaatttttgtatttttagtagagacagggtttcaccatgttggccaggctggtcttgaactcctgacctcaggtgacccacccacctcagcctcctaaagtgctgggattacaggcatgagccaccgggcctggctagtttgtatgttttgattttgtgtatatattagttttatttttgctaaggcatgtttttaatttttgttattgtgctttgttttcattttcattatttattttgagtaagttatacttaaaacaaaaatcaagattcaaaaagtataaaaggggccaggcatggtggttcacacctgtaatcccagcactttggaaggccaaggtggacaaatcgcctgagctcaggagttcgagaccaaccttggcaacatggcaaaaccccgtctctacaagaaatacaaaaattagccaatgttgtggcatgtacctgtggtcccagctactcaggagggtgaggtggaaggatcacctgagcccgggaggcagaagctgcagtgagccaagatactgccactgcactccaatctgggcaacaacaacatcctgtgtccaaaaacgtataacaggtcaaaccgtaaaacttgtctctcttacccttattcccagcctctcggttcttcttccctatccttccaaagatgttttatgtaaatacaatcaaatatacacatgcatactcttatcccccttgttaacacaaatttttgttttctttattatttctttcaatagaggtggggttttgctatgttggctaggttggtcttgaactcctggcctcaagcaatcctcctgtctcggcctcccaaagtgctaggttcatgagcatgagccaccagacccggccaaattttagctttctttacacactattctgcattttgacttgtttcatataccaatagattttgaagattgtttcatatcaatgcataaacagtttcctgtgttttgttatagctgcatagtattcagattattgatgtaccttttttttttttttaagtagagataggggcttgctatatttcccaggctggtttcaaactcctggcttccagggacctacctgccttggccttccaaagtgttggaataatagggtgagccaccacacacagccccataatttatttaaccaaccctctattgatggatattgagactgtgatatagtttgggtgttggatccctccaaatctcacgttgaaatatgattcccaatgttggaggtgggccctgttgggaggtgactggatcatggggacagatcccttgtgaatggtttagcaccatccccttggcgataaactgggacctccccacctaattttcttgttcctattctcgccatgtgacatgctggatccctgtcaccttcagccatgattgtaagcttcctgaggcctcaccagaagcacatgacagcaccatgtgcttccagtcttttgctattataaacaatgctgcaatgtacagccatgaacacgtgtcatttcacagctgtgtggatttatctgtaggttaaatttctaaaattggaatttctggggcaatgagcttgtgcatttataattttgatataaattaccagttgcttttcatttaaagacattcacatcagcaatgtgagagtgctttgtatatactgtgtttaagagaataatttttttttttgggacgcagtttcgctcattgcccagcctggagtgcagtggcgcgatctcagctcactgaacctgtgccttccgagttcaagtgattctcctgcctcagcctcccaagtagctgggattacaggcgcccgccaccacgcccagctaatttttttgaatgtttaacagagacagggtttcgtcatggtgaaaccctgcctctactaaaaatacaaaaaaaattagttgggcgtggtggcgcgtccctgtaatcccagctacttgggaggttgaggcaggagaatcgcttgaacccggaggcggaggttacagtgagccaagatcaaggcacagcactccaacctgggcgacacagcgagactccgtctcaaaaaaaaaaaaaaaaaaaaaaagtgaggcgcaaatgggaggtgaagcagtgaggttcgcaagtgtagacacgctcaagggactcattaaatgtcatttcatttaaaaaatgaaattgagcatatgtgcaagcaaggttcacacaccccrtttaatcttcacaccaccacggggtagtcactattatccccattttacaggattaaaacactgacgctgggaggttgacagagttacaccaaatcacacagaggagctgggcttccccckacctcctccgctcaagtctccctgtccccgggaggtgcggaaggaggcaacagacgcttggcccataggtggagcaattggcgaaggcttcgcccgacgccggaactgcgagctctcagcgggagccgagacggtgcagggcsggagaagcaccttcactcccagcctgcgccccgatgctgcgcgttctgtgcctcctgcgcccctggaggccccttcgggcccgcggctgcgcttccgacggggcggccgggggctcagagatccaagtgcgcgccctggcgggtccggaccaaggtaaatgtgyagttccggggcggcgcatgacgcgactgggactaggccggaggcagcgggggaccggcaggtgggccgctcagtgcgttgaaggattcgatccccagtccctccctcccagttctaggcgccccaaaccgctccaggcctgagaggtgggcggccgccttagtggctccagactctagctgggggcggggggcctctggcaacctcggtctcttcaaaggccctttggggtcttccgactgtgtggaagggggagcggggtccgcacgggtaggactgggccccgcggcccccaggccaggagcgtttaagtgcgcgttcccctcccccgccaagggtcctggcccggttcgggggcggaggcagcggagccagtcccagtgcccagtgcggcagcgggcagagtgaggagggtgcctctccagccgcgcgcccgccctgggccgctagcgaacctttgcgtccttctggctccagggaaaagttcgctgtttctccgccttttggccaagatcaaggatagtatggagcggggacgaggggtggggggcaaagttcgcgggtcactggcagaaaacgcctctgatcgcgtgttgcgtttttgttgttgttgttgtttgaacttctggagcattcagtggtgctgataacgctcctcagtcctctgctggtaaccatcagggctaggcgcttctcctgccttgggtctcctccccgcatctcatcccctgtctcctgcatttgatacacagatggcattgtactgtacatttcgttgtattgcttcttttttttttttaacaaaagtttattcttaaatgtacaacagctccaagacaacacttaattccagccataggtggcaaaagatgttatggcagggaatagagaggtttaaatactgatgaaataaagggtcaccatctccttaggcacagggaacagcttactttttgccagatttcttaattccacttgtggccaagggccccttccccgtggccttccattttagctcctcgagtttcttctgctcctctttttgtttctgcttgaaagccttatcttcctcgtccatctccttggcctgcattcttgggctgtttcagtggcttcttgccaccttcgtggccggacatggcgcctgccgccccttccccagcagtattgcttcctttttaccggcttgacaacaagtttgaagcggggctttgccataaaatccagttccttgctccctgctgttgcccactgttcccaagtgtgcatctaccaccttcagtggacacggacaggccacctagagtcccactgcaccacttggtgagaatttccttgaacagttaatattgctgaaccttatacccccaatctcatgcttagttcactacccaactggcaacagctcttaagacagtcaagattattctccccactttacagattaaaaaactgaggcacagaaggttaagttatttgaaccaggtctgatttcaaagcctgtgttctcaaccattaggtaatcactggctcttctagtaattcagtgactcaaaatacagacttgtacatgtgtaaacacaaaattatcatgggttaaagacctttaggctcacttgcaaatatcgggaatcattttatccaaaaaagaatgacaaggatcagcagattaagcctctgcccctgccagagggctcaaagggcaggaaaaggcagtgagagaaggagagacagaaaccaagatgacagtgcagaggaggcatggggatgagatcacacacggagccctcacagggaatgagttggggtcatttgatgttcatattagaagctgcaggttctgccttccactggggctgatggcacaagagcactgttacattttacctgctgcctttgagcttgaggttgggtggtaaaccattcttcactgttcttagcggctttatttctcatagagtcatgtgttgcttaacaacggggctacattctgagaaatgcatcattaggtgattgtggtcattgtgggagcatcacagagtgcacctacacagtcctagatggggtagcctactgcacaccaaggctacatggtgtatagcctgttgctcctagaatacaaacctggacagcatggtaccgggctgaatactgtaggcaactgtaacacaatggtaaatgtgtatctgaacatagaaaaggcacagtaaaaatacagtctaaaagattttttaaatagtacacctgtactgggcagttaccataaatggagcttgcaggactggaagctgcactgggtgagtcagcgagtgaatggtgagtgaatgtgaaggcctaggacagcagggactggtttggcaccagggactattttcatgaaagacagtttttccatggacttgcgggcggacagatggtttggggatgaaactgttccacctcagatcatcaggcattagattctcataaggagctcgcaacaacctagattcctcacatgcacagttcacaatagggttcgcactcctatgagattctaatgccaccactgatctgataggaggtggaactcaggtggtaattcaagccatggggagctgctgtaaatacagatgaagctgctcatctcctgttgtgtggcccagttcctagcaggccacagactgggatgggtccacagcccgggggttggggacccctggcctaggacattactgtacactactatagactctataacactgtacacctaggctacactaaatttgctttacaaatgtttctttcttcaatgataaattaaccttagcttactctgtttttactttataaactttttaattttttcaacttttgactcttttgtagtaacactcagcttaaaacacaaacacattgtacggctgtacaaaaaatgttttcttctttagatccttattttataagcttttaaaaattttaattcttaaactttttttgttaaaaacaaagacacaagcacacacacgagcctagacctatcactgtcttccacctccacatcttgtcccactggaaggtcttcaggggcgataacgtgcatggagctgccatctcctatgataacaatcgggaatacctactgaaggacctgcctgaggctgtgttacactgaacttttttcttttctttttttttttttttttaataagtaggagtacacacggcccaggccaggtacagtggctcacctggctcactcttgtaatcccagcacgttgagagggtgaggcaggcagattgcttgagcccaggagtttgagaccagcctgggaaacatagtgaaaccccttctctacaaaaaaatacaaaaattatccaggcatggttgtgcatacctgtagcccctgctactcaggaggctgaggtgggaggatggcttgagccggggaggtcaaggctgtccaatatcaaggattcctgatatttgcaagtgagcccaaaggtgtttaacccatgagtgagccatgatcgtgttactgtactccagcctgggcaacagagtaagaccctgtctcaaaaaaattaaaaataaaaagtaggagtatattctaaaataatggtaaaaataatattgtaaatatataaacctaaaacatagtcttttattatcattatcaagtattatgttgtgggcctaattgtatgtgctgtgcttttgtataactggtaaagcaagctagtttacaccagcctcaccaccagcatttgagtgttgcattgcgctatgatgttatgacagctatggtgtcactaggcaataggaatttttcagctccattagagtctgatgggacttatatgtcttatatgtggtctgtagctgaccaactaaaacatcatcatgctgtgcatgactgtaattaatggctgtccttcaactccttagctgggcactaaggttctccaccacaagctgacctttccatcctccctcctctacccatgggctcatttgaaggtgtgttacctctgtgttttgctctagctgtgccctgacttggctcctcttccttcctttctgcttatggaaatctttttggaactcccctgctctgctgctccgtcccccacactgtccttttatgtttcgtgtgtctgaacttgtctctcttctaggctgttagctctttaagagtcaggattgccagctgggtccagctgttatttgagcaaatcctccttgtttccgggcgtcagtttcctcttctgtatagtaaagtgttgttaaatcagttgttctccacactacccttcagtggtttctttttttttttttttctttgagatggtctcactctgttgcccaggccggagtgcagtggcgtgatctcggcccactgcagcctctgcctcttggkttcaagcgattctttgccccagcctcccaagtagctgggattataggtgtgtgccaccacgcctggctaatttttgtctttttagtaaagacggggtttcaccatgttggtcaggctggtgttgaactcctgactcaggtgatccacccgcctcggcctcccaaagtgctgggattacaggcgtgagccaccacgcctggcccttctagtggtttctgttgacttctacccacaacacctcgcctgtgacccaagccatctggacagaagtgatcctaggtcagctgctcagtggtatggtaggtttggtaagagtgggaagggtgcagcacagccccatccccgctgttggggtcagaagggcaatgttcccagcatcggggctagactaagaacacagggaccttggctgattactgtccatttctccaggacctggcatgtggtagtgcaaattaaatgttgcacaattgaatgtcggcagccaaagacaccctgcctggctcctggggggctcccagcttaaagttcagatactgtattaggtccgagacttgccctagtatctgggcgttttacacaaactctggttagacacttaaatgcattatctcttttaatcctaacaataacctttttattatttctcttacagatcaggaaattgaaggccagaagggtaaagtggtttgcccaaggccatggggctggtgtgtggctgagttgtggcttgagctaagggcttgtaagagttgacagtcagtattccgagagggagatgtaggtggagacaggagatgaagctgaaagatgagagacagtcagccagagagaatggaaggaaagaacaggaaagcagagagaggagtgtctgccagtcccaggataccacggctatatcagctttctattactacctaacaaatgatcacaaactttgatactcaaagtcacacacatttatcattttttagtttctgtacgtcagaagtcaaggcacaacttagcagagttctctgcttcaggtcttgccaggctgggctgcagtcgggagttggccagggctgtggtctcatcccaggcttgacgggaaagatctgcttccaaggtcgtcaggttgctgagacctgaattcacctcctatggttgttggactgaagtcctgttctcttgctgattgttggccgggggtcactctcagcaattagaggttgcccgcagtcctttgctacttgaccctctcgttaggcccatgagtgtctctaataagacagagccttttatatactataaccgaattacagaagtcacattaccttcaccatataacttaacctaatctcaggagtaacattgtataacctttgctgtatactattgcttagaagcaattcacaggtcccacccacatgcaagggaggggwttattcaggatgtaaacatgagggccactctggggaccttggatctagactgctctgaagtttgtgggggtcagggtccttgactcctcctgatctggcatctctctatccactgcagtctcccttctccagagttgccccattttctctcctggagcactggagctggaagcgaccttatggccatctgcacacctctctggagcctccagacctgctgggctctaagagctctttgcaggtttctggggaggctaaggaagtccagtttgcctgaatgttacagttctttgcccctagccatagttctgtaattcctggctgaacaccctgtcccttgagagcccagaaactttcattggcctttctgtgtctctgatcagcttaaactgagaatgccaacttcataaacactgcttgtttacagacaaagctgaggaccctgggagataataataaggggtctttgmaggccaaaggattgggaaacactcctctgggcacctgctggatttcagccctgggaagacctgaaatgtccatcctgatttttcgtaggaggagaaacagcctagaagggatgataagggtgtgagctccttcccagagcccatctctcttccccacaccctgactagatggcgggggtgaattggggccagagtgggtgcaagagtcagattgggggggccttatggtcggtattaaggagttgaactttattttgaggaaaagaagggggaaggggagggacgtggtcggattggggtaagaaagatgactgtgacccaaatgtgggaacgaatgtgtgtgtgctgggagggagcaagactgaggactcgagggccaggtgggtgatccgagggatgcaggaaasagcctatgccagattaatggctgtgagaagcggtgtgagctgagaggcctgagatctctttaagaggttggattagcaggccttagtgactgagtgcattttgtaggtgaggtaagagcgaggtgacaggatcaacttctgagttgatagcaaggtcattggctcatcaatggagcaggacataccagttgagatatcaagtaggcatttggctattcaggcctggggtgcacaggagagctctgggctcctgggcacacacgggagccctgggtgtacaggaggcaggcgtgtgttagctgtggaagggaggtccctcctgcctcagcttatcctgctctccctctgcctgaactcctccagttctggaaggcaccctgcagtcccacacctgggccctcttctctgccactccctctgcctgcaacaggcttctctcctggactgcccccttccctgcaccttgccaacatgcatgcacacacacaggcactcatgcacacgctcacatatgcacccatgcatgcacacttacatgcacacatgcactcttacatcttttgcctggccaattcctactctcctgtcagctctcagcttaaaggccactgcctcctctgataactcattgctgaccttctatactagggctcccctctgcccactggaggccccttacttgtttgtcctttttctccaagttctcctcacaaatagtaattatttaatgtctgtcttccccactaggctgtaggttccatgaggacaggccttgagtctgtcctggtctctggaatcacggtgtctagtagaggccagcacacagcaaatatataaatgtacaaatgagtgaatgaagagaatctgattggccttaaggaacttacgcacttaaaataattgggcagaagagaagcagtgaaggagtgcagaggcatcacctgaaaggtaggaggaaggagaatgggggcctgccaaagccaaggcagatacgtgtcattatgcatctgtgtaaacccacagagtgtacaccaccaagagcgaaccccagtgtacactagggcccccgggtggcgacagtgcatcagtgtaggttcgtcagttgcaacacgtgcctctggtgggggatggggattgcggaaggggctgtgcctgtgtagggccagggagtataggtgaactgtattgaattgtattttccactccattttgctgtgaccctaaaactgctctaagaaaatcatctatttataaacaaataaatattcttctaagaagccaaagcagaaaacgatcaagtggagtgtgttaatgtcagcaaaggtttttgctgccacgaggttgaggcaaggagagaaacgtgtcccttggttagtgatgtggctatattcatcactttaatgagaataatgtctgctgagtgatggggctggaacctagattggagaaggtttgagcgaatggaaggtaagaaagtgactaaatgagtatagaaaactaccaagaagcttggctgttgctggtgaaagaatattacacaagtagggccaggattactgtcttgccaaacaggacagaacactaagcctctgtatttagttgctaatttattgtgacagaggagcatattgatctgtccccgtgattgtgcagttagcaaaacccaggctttgagaaaccctgtaggtcaaataccccaggctcctccacagataatctctgagggaaagacagagttgtggggagcatgtgggggttgtaccaggatttaaaagatacacggcaattttagaaattagcaagtctaaactatgatacctaaggatgcacacctgggtgataaaattataaagaaatggccgggtgtggtggctcacacctgtaatcccagcacttttagaggccgaggtgggtggatcacctgaggtcaggagttcgagacaagcctgaccaacatggagaaacctcatctctactaaaaatacaaaattagccgggcgtggtggcacatgctgtaatcccagctactccggaggctgaggcaggagaatcgcttgaacctgggaggcggaggttgtggtgagccaaggtaacaagagtgaaactctgtctcaaaaaaaaaaattataaagaaatacacagaggtgattactataagtcaaagagttacttgttcagggggaaggagggagctacgattgagtcagggcatgtggtggggtttctgaggtggccggcacagttctatttcttgatttgggtggtggttataagggtatttgccttatcataactcctcaaactctagaggaagaagtctgctgtgaagaaaagattaaggccgcggtggctcaaacctgtaatcccagcactttgggaggccgaggcgggcagattgctcgagctcaggagtttgagaccaggctgggcaagatggcaaaacctcgttcctacaaaaagcacaaaaattagccaggtgtaatggcgcatgcttatagtcccagctattttgggggttgagggaggagaattgcttgagcccaggaggttgaggctacagtgagccatgtttacaccactgtacaccagcctgggtgacagagttgagaccctgtctaaaaaaaaaaaaaaaacagcaaaactctcccccgccaaaaataaaaaaaaaaaagatgaatatggagggagttgtaaaattaaagaaggtacatgggtgcatgtgtgcttgtgtgtgtgtgtgtctgtctgtctaacaacagcagaagcaggcaagggctactgtggtagtcactgttgttcctctccccattttgcttcacagtttacaagtccttccactttctctctgaggcagaaagagcaagggtttttctctccattttatggttgggaaaattgaggcctgcctgagtgtgtgacttgtggcaagtcactctggtcatctagggcagaggctccccagakcccaggcctcctgcctccagtccccagcccgcagcccaggattaggcagagccagctgctttcccgtggctgccctgactccttacagggatcactgagattctgatgaacagaccttctgcccgcaatgccttggggaatgtcttcgtcagtgaggtaagaaagggcgggcgccagggtgggctggggatgggctggcactrtctaactgggtgtcctctgtagctgctggaaactctggcccagctgcgggaggaccggcaagtgcgtgtcctgctcttcagaagtggagtgaagggcgtgttctgtgcaggtaggttctctctcctgcccccatctgtgctctgcagggtgcccaccagcctccaggggttgggggaaaccttagatcagcttcagcatgggactcattgttgccattttacygatgtgaatgcagagactcagggaggaaaattcccttgcctaggatcacatagctagtaaggggtaggatagmctttagtttgaacttggcctctctaacccttagatcttagttatttcggctatgccatgctttgttctgacccttcacgggggaaataagaaaatggagtccaagacgggtacagtggctcacatctgtaattccagcactttgggaggctggggcgggtagatcacttgaggcccgagttcgagaccagcctggccaacatggtgaaaccccttctctactaaaaaatacaaaaattagctgggtatggtggcaggcacctgtagtcccagctactcaggaggctgaggcaggagaattgcttgaacccgggaggcggaggttgcagtgagctgagattgcagctctagaattcctgggctagttcctgcccctctcggagcttcagtttccgcatctctcacagaagggctggaactgatcaaagatttccaaaggctctcccagctctgacttcctgtagtctargactggaagagtctatttactctctactcctgctcacccctgcatctggcctttgaggaccccaccacggtcactcttcccgccaaggcgcttgcccacctgcatgccaccgtatcttgtgctcacttccgttctcgtttacttgacctttgacctctcagccttcttggaccttgctgactctgcctgtaaaaattagtcaagttttaattttcttattacttacatattttagaaattgtgggctgggtgcagtggctcacgcctgtaatcccagcactttgggaggccgaggtgtgtggatcacctgaggtcaggagttcgagaccatcctgaccaatatggtgaaaccgcgtctctactaaaaatacaaaaattagccaggcattgtggccagtgcctgtaatcccagctactcaggaggctgagacaggagaattgcttgaacccgggaggtggaggttacagtgagctgagatcacgccactgcactccagcctgggtgacagagcacaactccatctcaaaaaaaaaaaaaaaaaaaaaaaaaaaaaaaaaacgaaattgtggtgaaatataagtaacacaaaatttaccrttttaaccatttttaagtgtacaattcagagtggcattaagtacattcacaatattgtgcaatgtcaccgctatccattcccagaacttctttatcataccaaacaaactcagcctgttcagacagtgactcccattcccccttcccctccagcctgggtaacctctatggtactttgtctctatgtatttatctattctaaatacctcataccagtagaatcatatcatatttgttttttggtgcctggcttattttacttaacatgtcctcaaggttcctccaagttgtggcaagtgtcagaactccattcctttttatggagtaacattctattgtaatgagtagcattctattgtatatataccacattttgtttacccaatcatctgttgatagatacttgggttgttttcacttttggccactgtgaagaatgtccccaaatacattggtgtacaagtaccgtcagccctctgcatctgcaggttccgcacccacagactcaaccaaccgcagattgaaaatgttaacaacaaaaataacaatgcarcaacaaaaaataatatagataaaaacaacacagtacaacagtttacatagtatttacattgtattaggtattgtaagtaatctagagacaatttagagcaagcttgtccattgtccaaccctcggcctctgggccgcatgtggcccaggatggctttgaatgtggcccaacacaaatttgtaaactttcttaagacattataagatttttttgtgtggtgttttttttttttttttttaagctcatcagttaccgttggtgttagtgtattttatgtgtagcccaagacgattcttccartgtggcccaggaaagccaaaagattggaacccctggcttagagtatacaggaggatatatgagcataggtcatattgcaaatactacaatattttatacaaggggcttgagcatccatggatttttgtatctgaggggtcctggaaccagtcccctacggataaggagggactgtatctgtttgagtccttgctttcaactcttttgggtatatacttgggactagaattgtatggtaattctgtttaactttttggaactggtttccacagcagctgcatgggtttacactcccaccagcaatgcaccagggttccatgtctccacatccatgccaactttttgttttgtttgttttaaaagccattctaatagacgtgaggtagtatctcattgtggtttttgatttgcatttgtctaatgacgatgagattgagcaacttttcaagtgcttattgaccatctgtrtatctcctcaggagaaatgtctattcaagtcctttttcctttttttttttttttttttttttttgagactctgtcacccaggatggagcgcagtggcacaatcttggctcactgtaacctctgcctcctgggctcacgcgattctcctgcctcagcctcaacctccctagtagctgggattacaggtgcccaccaacacacctggctaattcttgtatttttagtagagacactgtttcaccacgttggccaggctggtcttgaactcgtgacctcaggtgatgtgcccacctcggcctcccaaagtgctgggattacaggtgtgagccactgcgcctggccctttgcccatttctgaattgggttgttttgttgtttagttggagaagttctttatatatcctagatattaaacctttatcagatayatgatttacacatattttcttccattctgtgtrttgtcttttcttttttttcttttttcttctttgaaacggagtcttgctcgtcaccgaggctggagtgcagttggtgcgatctcagctcactgcagccttcacctcctgggttcaggtgattctcctgcctccgccacctgagtagctgggattataggtgtccgccaccacacctggctgatttttgtatttttagtggagacagggtttcaccatgttggtcttgaactactgacctcaggtgatgcacctgcctcggcctcccaaaatgctgagattgcaagcgtgagccactgcacccagccatttctgtgggttgtctttgtattctattgatagtgtcctctgatgcacagaaggtttccattttgatggagtccagttcacctttctgcagtgtcacaccctccttgtttgatgctcctcttttcccttgacttccttgcccgggttcctggtgtttctccttcctcgctggctgcctgtcctcaggtcttctttgctggatcctttaaccgcctgggattccgtaaagtgccattttcctaagggctggtaccaaccctcgccatctgcaggtgcagacctgaaggagcgggaacagatgagtgaagcagaggtgggggtgtttgtccagcgactccggggcctgatgaatgacatcggtgaggatctgggtgtggggtggaggagggggtttgggggtccctgccgatgacagtcccgctacccccaccagcatctaaggagagtcttctttctgtttgkagttctgtgataagacagatgactcacccagggggatggaggaggatgaccgagggcagttctctcagagagggagttctggctcttcagcttttgtgtcccgccccaccctcagggttcaagcctggccattccaaagcagttaagtttccccaagcatgctttcaagttttgacaattgctgttacctttgcctgagataccccttcttggttacttgaacttttacttgtccttcaakccctccagtacctcctcctccaggaagccttcccaacccaccctctgagctttttattggagcactgatgatcctgggtcaataatgcctgatacacatttgtcttccccatgagactgagccccatgggaacaaaggctatgtctgattcattctgtgttcccagttcccagcacccagcacagggcttggcacaaagaaagggaggccccagggaggccagcggattaggcctgaacagggatcatccagcccatcctcccattcctcttccctggctgattctgtaactttccctaaagggaaaattggcttctgagataacctggctgcgggaagcagaggttgtcgtgagcagagattgtgccattgcactccagcctgggcaacaacagcgagactccatctcaaaaaaaaaaaaaaagaaaaaaggaaaaaaaagaggccgggcgcagtggctcattcctgtaatcccagcagtttgggaggctgaggcgggcggatcacgaggtcaggagttcaagaccagtctggccaacatggtgaaacccccgtctctacttaaaaaaaaaaaaaaaaaaatacaaaaaaattagctgggygtggtggcgcacatctgtaatcccagctactcaggaggttgaggcaagagaatcacttgaacctgggaggcagaggttgcagtgagccaagatcatgccactgcactccagcctgggtgacagaacaagactccgtctcaaaaaaaaaaaaaaaaaagaattaagataacctggctgaggttccatgtaatgtccccagacctgggtccactgaggcctctgtcccaaccagcttgcccctccccagccttgagtctctgtcctggtcccaccagggctttgcaggctgagcctttcttcctctccacagcagccttccctgcacccaccattgcggctatggatgggtttgccttgggcggaggcctagagcttgccctggcctgtgacctccgagtggcaggtactgggccaggactgggggcagggggtggggctagggagtcaggggtgagygaaacagggtgagtctggacattctgcagtcagccactgttcttggcttccaaccaaaagcaaaactaaggcaaggcagagcacagagggtgctcaggcagaagctgcttcccctcctggtgcagccattagctgctgtagtatctgtgacctgtcagaacctgcttccttcattttgggaatatttgaccaacctcagagcaattgctgttacgagcyaaggaggtcaaagagcaatgtccagtcttcccattctgtccaagtcagatttatcgaccatgtttcggaaaaaggtgagcctcagggatagtttgtcaatggctgagctaatcacaaaggtgcctgggcaggaatactggcaccagccaaatttgcattacttgttctgagcaattgagctttgtttgaagaatgggaggggataaagaagataactgatcattttctcaggtgactgacctggtgattaggagcagccttcttggatgcagttaggcaaagtctgaatgtcttcccttctccccccaccgctctctcctgccaccccaggagcaacatataaaaatgtgtagctccaggcatgaaagtagcttctgtctacacaatgcaggtcaaagagaaggaactgaccaggtgtccaggcaccaaaataccaggctggtctagccccaactctccttctcacatgcccacgttcacgcaactaactcacagggttttggggaagactaagacggagtgaatgtaaaacccactcccttctgcccacgttcacatggtccatgctgagggaattcagaaaaggagacagacccgggggggtgcgtcagtcaaggcaagtttctcgaaggaaggaagcagaactcaggaggacatggactggaacagtcagggcaatttcaggctgtgacaaagctggaacggacgactgtagcaggagcaggagtcactgacattctaggccaggccagggctaagccagagaacctattaatagtaatccacaaatagatatggggcacctcctaggaactctccttgttccaagcgtcgtacctcgtgtgatccttagcggctctctgaagcagacagaagagggccagccatctttcttccacctttgaggcttgggaagggtgagacttgctggtgacttacaactccatcaaaggggcatggtgaaataagggcctgggctcctgacttctgggctagggctcttccaaaggcagagtctggagaggcctggctgtggccagacyatggggcaagtggctagaggggcgagtagacagcagaggcagctgtggcccccgggattagcactgggggaccggatgggggagggaggcctcactttgttctatctgagcagcttcctcggcagtcatgggactgattgagaccacrcgagggctcctcccgggggcaggtaatcgcaactacagcacccgcccaattccaccccatccagggtccttcgctgctttccttttttgccctctgttctgggctctgccctcccacctgaaccctgctcctctgagaagtcttggctgagtcccaggctgagccttctctgggttcccacttcccatgctgattcccaccctgctccctccatcctggtaggagggactcagaggctgccccgttgtctgggggtggccctggcgaaggagctcatcttcacgggccgacgactgagtggaactgaggcccacgtactggggctggtgaatcacgctgtggcccagaacgaggagggggacgccgcctaccagcgggcacgagcactggcccaggagatcctgccccaggtgtggtgacagctcggcaccagaaggagggctggagtcatgggggaggcatgtgtggrgcagggtgtccccttgggctgcacatccattctcccagagacatatgattaaccctctttggagtttgtttaaccatccagtaaacacaatcaagtcaaattttaattctgaattaaaatgtaaattgaattccaaagggctggaaccaaatgggcttgaaagccctctgaatgtaacactgtccagtagaccattctgagatgagataaatgttctatacttgtgcttatccagtatgggagccactagccaaatgatttaaattgcagaaaatgaatgcagttcctcattcacactagccacatttcaaatgctaatagccacatgtggcttgtggctactatactatatagcacagccttaaaatcccccaaagactgaaaaagcaagattctaaaatagatacagaacttccaacccatatttcctaccatactgcctggtgggatattcttgaaatacaacatgtgggctgggcagggtggctcatgcctgtaatcccagcactttgggaggctgaggcgggtgtatcacgaggttaggagttcaagaccaccctggccaatatggtgaaaccccgtctctactaaaaatacaaaaattagctgggtgtggaggcacgcacctgtaatcccagctactcaggaggctgaggcaggagaatcgcttgaacctgggaggcggaggttgcagtgagccaagatcgcgccattgcactccactgggcgacaggacgagacttcatctcaaaaaaaaaaaaraaagaaagaaagaaagaaatacaacatacaggacatgtattaagcatttttttctttgaagagatagggtctcgctgtgtcatccaggctggagtgcagtggtgcaatcatggctcactgcagttttaaactcctgggctcaagtgatcctcccgcctcagcctcccaaagtgttagaattacaagcatgaaccaccgtgacgggccaggctcatgttttagccagatgtggtagttcgagcctgtaatcccagttatttgggaaaaagcattgcttgaacccatgaattcaaagctgcagtaagctggtcacgccactgcacttccagcctgggcaacaaagcaaaatcccgttgctaaaaacaaacaaacaaaaacaaaaagccaaaaaaaacaaccaaaaaacccctcattaaaaaaatcctcaaatagcatgggaaagggtgagggataaaagactacacgttgggtacggtgcaccaaaatcttagaaatcaccactaaagaacgtatccatgtaaccaaaagccacctgttccctaaaatctattgaaagaaaaaaattaaaaatcctcaaacaataacctctcagcatggtaccccaaagggtaccatgctcagtagggagcaggtcaggccctgcccaggtacaaccctaccagctgcagggcccaaagccctcagcagggatatctgggatctggctgtctggggtatccaaggccctgcgagggtctgctggcttctcccaactctcagggggcccaggatacagggggttgggtacaggagatcccaaatttccataaagattaaaagtggcttaaatggagctaagttagactaatttataataaatttgtcttagcctataatgctaggtaccttaatgtagtatctcagctcttagaataatccagttgaactgattatccccattttatctgtgagaaaacccataaaagttcagtgacttgttcatcaaggtcacaaagagtgattgtagtattagaaaaaaaaacaacaccggtattttggcatttattttgcacaatacagaatgcaatataaaaaaggtattttaagagagcaaaatatgtacaaaattttaaaaacaaactaaatatttaatgtatttcaaatacaaaaatttacaaatgtcacaaaacaaagttaaccatacatcattttaatattgacatatwttgaattaatcatataaaagtaaccattttggcttagcatggtggctcacgcctgtaatcccagcactttgggaggctgaggtgggaagactgcttgagaccaggggttctagaccaggctgggcaacatagtgagacctcatttgtattaaaacagaaaagaagccgggtgcagtggctcattgctgtaatcccagcactttgggaggtcaagacaggaggatcacttgatgccaggagtttgagaccagcctggccaacatggcaaaaccctgtctttactaaaattacaaaatttagctgggcatggtggctcatgccttttattacagctactcaggaggctgaggcacgagaatcacttgagtctgggaggtggaggttgcagtgagccgagatcgcaccactgcactccagcccaagtgacagagcaagattctgttaataaaataaaatagtataattttgaacaaaaatcctttctttcctgtctctcaaatgtaaataatcctaatacttcttaaaacagatcttctttaatttggaggtgagggactatagctttttgaaagcatttgtctttttttttttaagcttcatcatatataaatgaagagtctgatgctattgcctagacaatattaatgctgtcaagtttctattatacttggttagaaagtctccgaactaatacagaactctgggtcactcaatggagtggctgattgcagctttcatatctagacctgtagactatagggtttgtctttttgccttaactaaataacaatcacaaaataattcagatttccaaatatactaaaatattggtactatataattactgatattttcagtacttaaaagtagctttgtataccaaaacaccagtctaccaaaaacaagtactggcatgagtaatcccagagttgagaccttctgggtcaacctgaaaaacaaaacttcaacttccacctatgttactgggtgctcagaataaaggtttccggataggagagggccagggatggtgtagatggccaccatctagtggacaaaccactctgatagggtagcaaatggttccagagttttctcagcccagaaaaaaactgtcaatatccacagtttgcatcagatttccttcttaaatagtaaatacacattacactttgagaaatggattcagctgtgttttttttcttttctttttagagacaggatcttgctctgttgcccaggctggagtgcagtggcacgatcatagctcaccacagccttgaagccctgggcctgagcagtccttccacctcagcctctgaatagctgggactacaggtgcaagctactgacttggctagaatttggctgttttcactcacaaacatacgtacataccgtttttaactttaataaaaggttactttatttatttatttatttatttatttatttttgagacagggtctggctcttttgcccaggctggagtgcagtggcatgatcacagctcactggagcattgacctctcaggcccaagtgatccttccacctaagactactgagtagctgagactacaggtgcaagtcaccacgcccagctaattttttattttttgtagagatgggatctcatgatgatgcccaggctggtctcaaactctttgggcaagcaatcctcctgcctcagcctctcaaagccctgtgattacaggcgtgagccactgcacctggccaagattacttcctttattgggtagttacctaaataataacacatatggcaagcaaatctaaaagaacagaggagtaagaagggcataaggtaaaaatcaaaggcaagatgaccagctagtcctggtttacctgtgactaccccagttttaaaagtggaagtcccatatcccagtaacccttcagtcacaagcaaacccaaacagcccttcatttcccaatccctctctctccccagatcatcactattgtttccatactcttccagaaatttccattgcatatggaaggacgtgtattatgcacatatgcttacatatttaaataaattccttttaatggcttagaggacaagaaatatctttcgaggctaatctgtttctaacaaattttaaaaacaaaatttaaatatgcatagtaaggaattcaaacatggaagaatataaaacaaaaccttcattttatataacaaaacatttataaaccttcgtttataaaacaaaacaaaggtttggttttgttttataaaggcacaccagcattttgccagtttttgccaaattgctctcctgtggcatactcttttacttttctatcaataatgtatgtaaatactggtttccccagtctcggcagtagtaggcatattgatattttagtatttgctggtctgaggtgaaagggcacagtacctcactgttttgatttgcctttcaagcgtgtagcagctgctggacatccttcacgttcgtacttcttttccggtggaccttttacatactcttttgtaaatggtttaaaagttactttatactaacttttttgtaaatcaaggaaattcatctgtcataagcattgcaattctttttcccagttttttttttttttgagacttttcctgagaaagttttataaacacttcaaataatatgatataggaagtaattcctccttgcctggaagtggggctgagactggagtgctagggctggtgtggaaccaaggccagtgacaaagcagacactgttgcttctatgtggctgtattaaaatgcacccrcccctctgcacygccccacagaccaggatttcaacacagccctgtcgacttgaaagcccaagttcctaaccctgactttgtttcactctgctggggtaaaaccttaccgcagaggctggcatttgctgaaatgaggtcgaggaagtgggaaaggtggttgggagtccaatccaagtctcaccaatgattggataaacacagccaagtgcttcacctccctgcactgcaatctcacagctgtaaaatcacagctgggtsatcagtgatgacaccagcctagaagtgtgggtagcaccattagatgagtctgtgggggaggaaagcactttgtaaactagttatgttgtgcatgttggaaggatgggctgaataacaagaaacccaggtgytcagggatcagagtctggcttctttcatgatagaaaaagaacctcagctaacaggttataggactaacgctaaagaaactgtcagcagaatggctggaaccagacccagacatctgcctccctccttyaaaacaaagctgtgcacctcagacctgcaactatcagccttgatgccctcctcaaccaagactttttgcttttccctaggcccccattgccgtgcggctgggcaaagtagccattgaccgaggaacggaggtgagagggttttgggttgggacttgggtccactaaagttggtcgcggctgggacacagtgctttcagagctcagacagcacagctgggaaaaactcaggaagtggactcttctaacagacttgaactctgacctcgtgctctacgtcagtttacacatctgcaaattggccagacagtattattgtttacattctatcctcatctttctcccttggagagaggatgagattgaggttaagaaagggtaaatgatttgcccaaggtctcagaggaagtgagtagaaagaacccgggtctgtgtggctgccagtccatgctgcaagatttgtgctggcagtaatgtggcctcagggcagggcttggggtgatgccttgggtgtggctaatccatctgtccacctcaactctcccatctagttaatccatctgtccacctcaactctcccatctagtcactcatcacacactgaatccagaacaaagctgggaactgggatacagatggatgagttaaacatggtcactgcccccgggagggggcagatacagacacaaatcaaggataatggtaccacgctgacaccccagaaaggttagagctttgcggtccattatgatatccatgtgtggcttttaaattaaaagtaaaatgtggtcaggcgcggtggctcatgcctgtagtcccagcactttgggaggctgaggcgggcgatcacgaggtcaggagatcgagaccatcctggctaacacagtgaaaccccgtctctactaaaaatacaaaaaattagccaggcrtggtggcaggcacctgtagtcccagctactcaggaggctgaggcaggcgaatcgcttgaacccaggaggcggagtttgcagtgagccgagatcgcaccactgcactccagcctgggcgacagagcgagactccgtctcaaaataaataaataartaaataaaataaaatgttcagtttctccttcacgctaatcacagttcacgtgcttgacattcacatgcggctagtggctaccatactgggcagtgctcggttaaagactgttttctacagttggactgtgggaaggataaaaattccagaggaaaagtatgggcaaaggcacagaggaggataagcaagcagctcgtccagatgagagtgagggaagaagagagagtgcaagttcgaggcactaggctgtctgggttcaaagacctgctcttccacatactgttgtgaactttgacaaattatttcacctttctatgcctcaggtttctcagctgtagaatagggatactaacccttgctgtgaaaattaagttcacacacacatggtacttctcttagaatgaggctttcaagtgccagtcagtgggccctagaggctggagcaattgccagggcccaggtcataaaggttcagaaattaacgggtgacaggaagcgtggtgaggcagccggatgggaaggagaactcctcttctctggcaaaatgtctcagtctgtctcgtttctcccagcagttttgtcatagttacgaatggtgtttcttctctaggagggaaattccttctcatagctatctctgctcatatagatgtctgtaggcaatagggtgggctggcttccagtgtgggtgaagatggacaaggtcagaccaatccagggagcacrtctttcttgcaggtggacattgcatctgggatggccattgaagggatgtgctatgcccaggtatgtagcaaccagcccatgcctgcttgttaacataggctgggccaggctagagggactttgtatggtacatgaccaattttagaaggttcttctcaacacaaacagtctgaccgcatccatcgtccctcataagtcacctggagtggcttgaggagagccatagtgcttctctctgggacttttccctcaaccatctaatgtactggggttcatcctgcccacttaatgccgagaatcacagaacacaggtccttaagaggaagaaccacatcttttgcctctgtatcrgatgccactgtaaagttcaggatggagttgggaggtcaagggcttggttgtagcctgcaggctgtgttcaatgtaggggctgtacacttgggactgacctattaaatctcttactcatgggtgagtaaaaaatgctaatctccacgttaacagatatccaaaatactcctaaggggtcctgggacttggagaaactagtgtgaacctggattcaaagccagatttcttactgcaaagaatttttttctctactgagcagcctcatgtcagaccactgcagacggcagctgagttctcaggaggcatgaaagcagtgtgcaagtggaggctaatgctgatggggcacagagaatacaaaggctggcctgtcttccccaggagacaaagcagccacggaggcttatacctttgcatgcctcaagatcagagtccagagacaatggaaacacttggaccctggccttgtcttgggctggacaagcttaagcaactctttttgggcctgtggccytgctcccccaaaactaatattttgtaccttgttgcagaatattccaacccgggaccggctagagggcatggcagccttcagggagaagcggactcccaaatttgttggcaaatgacccccattttaaccttcagcatgggagmtgcatgccctgaagagcaggatccagaaggaagatttgtggccagattgccttcatcatttcacctctccagacttccatttcttcacaaggatgatgatggaaataaaatgactggcgtgatgcctggaaccaaggtgctgatcctaccacctactgctaccttccttagcttcaccctggctagaaataatcacgagggttgggtttgctttggaaaatgcctgtctctctacytgaatgataaagaattaaattagatctctctgagtcttggtatcattggctctcagcccctgacctctctcagttatcaggcactcattagagatgtcagaagattttaagatacccctagtttcttcctgtgaacaacagaggtaataaataaactctgacatcggttgaacatgtgtcaggggtcagactgcagatcccagtctctgccagttacttgctgtataaccgtggacaaattgtttaaatgctctgggcctcagcttcctcacctacaaaacaaaacttgtgaagatttagcaaaataaaaacacttcatattcaataaatatgttttaattgttaacttacagtgttttcgtgaggaccaaacgaaatcatcactgtgaaacacttttgtaaactacagggtggcagaaaattctttttattttttgagacagggtctcactctgccacccaggctccaggctagagtgcagtggcgccatctcaggtcactgcagcctccacttcccaggctcaagtgatcctcccacctcagcctctggagtagctgggactacaggcaaatgccaccatgcccagctaatttttgtatttttttgtagagacaggatttcgccatatcacccaggctggtcttgaactattgggctcaagcaatccgcccgcctgggcctcccaaagtgctgggattacaggtgtatgccactacacctagcctccaggagactctttgatagcatttaggagcactgagaagaaaggggcaattaactctaatggaaagaagggaggatccggaaatgggcaactaacattggaattgaagcctgaaggattaaggaacatttcaagtacagaagaggaagcttgacacagcatgagcaaaggtgaggaagaggatgatacacttagaaaaccaagagcaggctgatacataaccatactggtcccaatacccctccctcctctggtaccaaggctacatcttaagctatgcctttgcagtcattctccaactggatctgagcgctggctaagctgagcctcagcctggcctagagtcactaaaccatgggcatggatacaatataaataacattgcggatttctgcaaaatacaaatgtgctcccagggttatgcttgcatcctggaaggaagaataacacaggagagcccaggcctttacagtcagcacaaaccacaccagctatgacaacccaggaaagtaaccaccttactgaacttcctttttctcatctgttaagtgaggaaaataaaactcacctacccgtgaggattgttgtgaatgacacagaacttgaaaggatgtcttgtacagaattggacttaacacactagttcccctaacacatcctcacattagaataagctagcatctgataacaatgctctgaggtactagaacccaggtcaggaagatatccttttggaatcatgcaagagtgtgaaaaaatacagtacagtttaaggactatggaaggaagtaaggttacaaattctgcttatctggttggactctggtaatagtttggaacatggtttagagtaagagaatgagcttcttcctcatttgatttccaaagacagtacatggtactctagttaagaatctgaaccaagccagccaaaagcacaaaaatctaatcctaaaatgtgctaacagaaatttacttttattttctgaaaaacttaaacagataaatgacaaaacatgttcattaacagtcaacaataaggcaaggaaggaattcacactattcctcagagcagctccgcaaggcttatcaagtaagcttctgatatagtttatactgtagttgaagctggtttcagaaaagcccatgttttctttagtcagcatgcggggtaagaaaactccgtgaactctctggcaaagtctctttctggcctttcgtcttcctaccatttttggtcatggttccacccaaataaaatggagggattcagatttatcattacatgtaatctttcatctaaacactgtctgcaaatgcctaagtcccaccacgccctacaagctcactcacatacacagcatgtcatgctcacataacaggaaacatgccaaagatagacacccaaaattgtaaaaaggccaggtgcagtgactcacacctgtaatcccagcactttgggaggccgagacgggtggatcacgaggtcaggaggtcgagaccagcctgaccaatatggtgaaaccctgtctctactaaaaaatacaaaaattagccgggcgtggcggcatgtgcctgtagtacccagctactcaggaggctgaggcaggnnnnnnnnnnnnnnnnnnnnnnnnnnnnnnnnnnnnnnnnnnnnnnnnnnnnnnnnnnnnnnnnnnnnnnnnnnnnnnnnnnnnnnnnnnnnnnnnnnnnnnnnnnnnnnnnnnnnnnnnnnnnnnnnnnnnnnnnnnnnnnnnnnnnnnnnnnnnnnnnnnnnnnnnnnnnnnnnnnnnnnnnnnnnnnnnnnnnnnnnnnnnnnnnnnnnnnnnnnnnnnnnnnnnnnnnnnnnnnnnnnnnnnnnnnnnnnnnnnnnnnnnnnnnnnnnnnnnnnnnnnnnnnnnnnnnnnnnnnnnnnnnnnnnnnnnnnnnnnnnnnnnnnnnnnnnnnnnnnnnnnnnnnnnnnnnnnnnnnnnnnnnnnnnnnnnnnnnnnnnnnnnnnnnnnnnnnnnnnnnnnnnnnnnnnnnnnnnnnnnnnnnnnnnnnnnnnnnnnnnnnnnnnnnnnnnnnnnnnnnnnnnnnnnnnnnnnnnnnnnnnnnnnnnnnnnnnnnnnnnnnnnnnnnnnnnnnnnnnnnnnnnnnnnnnnnnnnnnnnnnnnnnnnnnnnnnnnnnnnnnnnnnnnnnnnnnnnnnnnnnnnnnnnnnnnnnnnnnnnnnnnnnnnnnnnnnnnnnnnnnnnnnnnnnnnnnnnnnnnnnnnnnnnnnnnnnnnnnnnnnnnnnnnnnnnnnnnnnnnnnnnnnnnnnnnnnnnnnnnnnnnnnnnnnnnnnnnnnnnnnnnnnnnnnnnnnnnnnnnnnnnnnnnnnnnnnnnnnnnnnnnnnnnnnnnnnnnnnnnnnnnnnnnnnnnnnnnnnnnnnnnnnnnnnnnnnnnnnnnnnnnnnnnnnnnnnnnnnnnnnnnnnnnnnnnnnnnnnnnnnnnnnnnnnnnnnnnnnnnnnnnnnnnnnnnnnnnnnnnnnnnnnnnnnnnnnnnnnnnnnnnnnnnnnnnnnnnnnnnnnnnnnnnnnnnnnnnnnnnnnnnnnnnnnnnnnnnnnnnnnnnnnnnnnnnnnnnnnnnnnnnnnnnnnnnnnnnnnnnnnnnnnnnnnnnnnnnnnnnnnnnnnnnnnnnnnnnnnnnnnnnnnnnnnnnnnnnnnnnnnnnnnnnnnnnnnnnnnnnnnnnnnnnnnnnnnnnnnnnnnnnnnnnnnnnnnnnnnnnnnnnnnnnnnnnnnnnnnnnnnnnnnnnnnnnnnnnnnnnnnnnnnnnnnnnnnnnnnnnnnnnnnnnnnnnnnnnnnnnnnnnnnnnnnnnnnnnnnnnnnnnnnnnnnnnnnnnnnnnnnnnnnnnnnnnnnnnnnnnnnnnnnnnnnnnnnnnnnnnnnnnnnnnnnnnnnnnnnnnnnnnnnnnnnnnnnnnnnnnnnnnnnnnnnnnnnnnnnnnnnnnnnnnnnnnnnnnnnnnnnnnnnnnnnnnnnnnnnnnnnnnnnnnnnnnnnnnnnnnnnnnnnnnnnnnnnnnnnnnnnnnnnnnnnnnnnnnnnnnnnnnnnnnnnnnnnnnnnnnnnnnnnnnnnnnnnnnnnnnnnnnnnnnnnnnnnnnnnnnnnnnnnnnnnnnnnnnnnnnnnnnnnnnnnnnnnnnnnnnnnnnnnnnnnnnnnnnnnnnnnnnnnnnnnnnnnnnnnnnnnnnnnnnnnnnnnnnnnnnnnnnnnnnnnnnnnnnnnnnnnnnnnnnnnnnnnnnnnnnnnnnnnnnnnnnnnnnnnnnnnnnnnnnnnnnnnnnnnnnnnnnnnnnnnnnnnnnnnnnnnnnnnnnnnnnnnnnnnnnnnnnnnnnnnnnnnnnnnnnnnnnnnnnnnnnnnnnnnnnnnnnnnnnnnnnnnnnnnnnnnnnnnnnnnnnnnnnnnnnnnnnnnnnnnnnnnnnnnnnnnnnnnnnnnnnnnnnnnnnnnnnnnnnnnnnnnnnnnnnnnnnnnnnnnnnnnnnnnnnnnnnnnnnnagcgctttgggagggccgaggcgggcggatcatgaggtcaggaggatcgacgaccatcctggctaacacggtgaaaccccgtctctactaaaaatacaaaaaaattagctgggcgtggtcgtgggcacctgtagtcccagctactcgggaggctgaggcaggagaatggcgtgaacctgggaggtgagcttgcagtgagccgagatcacgccactgcactccagcctgggcgacagagcgagactctgtctcaaaataaaaaacaccagatgttaaataaaatataattcacaaattttttaatgcatagatgaatgtacaaactaaaggaattttccaggagctggaaacaaagagcacttcagctagtgtaagctaacctgcagcttagcctgcggcagaaagaaactggcggtcttagtaattgaggcatttcaatttcagcttgcagagttggaggcaatattcctacataaaagtagacccacaaagggctagataagaaaagggataagatactgaagcatctctgtcatggatggggctgtaggggtatacgggagtaggagaggagaaatcttctcatgaccacaatcccaagtgggtaataaggtttgagtttacactacctgaatattgctgagaaattaatataaaaaaacgagcacaagcctatggaaacctctggagcacttcacagaagcgaatacaaaaccgcctcagggacacgccaatccattctaaaatgaattctcagaaaaataagccctgctaaagttgacttcacaatccaaaactgcccccactcaacataacacacataataagatcagataaagaccacaaaataattacttttaaagaagaaaaaaaataggaatatctggaaaagaagcaaataaaaagttcagacatttaaaaatgtatcactgaaattaaagacagtccaagagcagatttagacccagttggctgggtacggtggctcacacctataatcccagcactttggaaggctgaggtgggtggatcacctgaggtcaggagtttgagaccagcctgtccaacatggtgaaatcccttctctactaaaaatacaaaaacttagacgggcatagtggtgggcctctgtaatcccagctactcaggaggctgaggcaggagagtcacttgaacccaggaggcagaggttgcagtgagctgagatcatgccactgcactccagcctaggcaacaagagcgaaactgtctcaaaaaagaaaagaaaagaaaaagatttagacccagttaaagagaaataggccagacatagtggttcattcctgtaatctaagcactttaggatgcctgggcaggaggatcaaggcaatgtagtgagaccatgtgtctacaaaaaataaaaaaattagctgggtgtgatgctacatagtcccagctattcaggaggctgaagtgggagagtcacctgagcccaggttgaagcagcagtgagctgtgactgtgccactgcactccagcctgggcgacagagtgagaccctgtttcaaaaaaaaaagtaaaagaaaaattacctatcaagaaatgataattaggctgacagtagaccccaacagcaacaatagaaaataatgaaaatggccaggtgtcgtggctcatgcctgtaatcccagcactctgggaggctgaggcgaacatctaaggtcaggactttgagacccagaatggccaacatgatgaaacccggtttctactaaaaatacacaaaaaattagccaggtatggtggtgcatgcctatagtcccagctacccaggaggctgaggcaggggaaccccttgaacctatgaggcagagatcacgccactgcactccagtctgggcgacagagactgtctccaaaaaaaaaaaaaaaaaaaaaaaactaaaagaaaatatttttctcccaaatgctaaaataaagtaagtaactatctggaattctacatccagctatattattatttaagagtaagaataggggtggggtgacaaagagattttgtcagtaatgcactatcaaaacctgaatccagaaaaggagtggt

SEQ ID NO: 94064 - DNA, 13858 bp, Homo sapiens
caatctctgcctcctgggctcaagctattcttctgccttaccctcccaagtagctaggactacaggcacaggccacctcgcccagctaatttttgtatttttagtagagacagtgtttcaccatgttggccaggctggttttgaactcctggtctcaagtgatctacctgcctcggcctcccaaagtgctgggattataggaatgagccactccactcagccaaaatgatatattttaatatacatctgtatagagttgcacattggcaagtaaaagaaagcctttgaaaagcacgtaaggtcattaaatatgatttttattatacacttgacccaaatatttttctttggtaagatatctttttttgttttgtttctttttttgtctgtgtttttatccttgagatgtccttcaacttatgaggaaaactactggcaaaggatgatttgatatgtaaattttacaaagaaaatatgtttgatgtgattaggtagaatgatggtcacactgaaaatatgtatcagtataaattttttttaatggagtctcactctgttgcccaagctggagtgcagtgggtgtgatcttggctcactgccacctctgccctccccgggctcaagtgattctcctgcctcagcctcccagataggtgggactacaggtgcaggccaccatgcccagctaattttttgtattaaatttttatttaaagagttccttgctaatttcctgtctgcctgatgtcattccctagaggcctaagtaatttgagacccaaaattgatcatcaaatggattgttgtaccctctatgctgacactctgagaaaagcattgctccagaaattagttctaagagatagagagttttaaaccccaagcaagaaagagtaggtttagtcattttccatataccttctactgagaacagaaacacaaaaccatgttataaacatactaagtcaagtagatgactttgaattagacattggttaattctcttccttagcttggcaggtaatttccctgaattggctaagtaaatcatttgctgaagtttctcataaaaataactacagtgaataattttctcctgtgtgtcaaaggaaaaaagcaaaattcattgtgaatgatgagctgccaaactgtatcctctgtggggcaatcactatgaaaaccagcgtgattgaatttacagaaacctctgctgtctttgaagatgggacagtggaagaaaacattgatgttgtgatcttcactacaggatatacattttcttttccattttttgaagaacctcttaaaagcctctgtacaaagaagatatttctatacaagcaagtctttcccttaaacctagagagagcgacattagccatcatcggccttatcggccttaaaggatccatcttatcaggcacagagctccaagcacgatgggtcacaagagtattcaaaggtaccatgactctactgaaagtcctctctttggatcgtaaaattggtgccctgccatttagctaaaatcaaacagatgtgaactaaagtaacaaaatatttttaacattagtgtacaattaattgtatatgtttgtaatatgagggtgtgctgtgtcacttaatgtgactgaataggaaaagagattttggctctgtggatgagataaatttggacaacagaatataatcaaatttgtcaggttagctgaaattattgaaggcttcatgatcctgttctagcctagtctaatctatctactcctaaatcttttcatttagtactagaagtataattttatattgcttccaaagaaagatattggaataatatacactatgaatgaagttgagattagagacccataaaaaatattttagacactggaaactactttctgtcaattatgcaataagagcatagatactggagtcagagctacggaggtccaatcccaacttcaaaattctttagctttgcaagaacccctctaaatctcagccccttcatctgtaaaatggggataataaatcccgtatgacaagaattttgtaaaaaggataatgtctgcaaagcaattagcacagtacttgacatataactaacgcgtattaagtgacagggtttctctgaccattgctattgctatcatacctctctaaagcagggcaaattttagattagcaagcattttagttttaaagaactgcagttttctgtttttaaatataaacagccatagcaattgggcccatcagctatgctgtagaaaaattctgttcttaatgaataaaaacaattaccaataacttataaatagcatacaacatggtattaaatagtgttgacttctatcaaactgtagaaatataataggcatcaatcacacttaaaaccgtacgttctcctaagttggcacaaaaaaaaatgttatttgaatggggggaggggaaagaaggcagttagaaaatctcattttatttacattacagaaaaaaatcctacaaccctgcagtaaattaccacaaatttctgttttttaaggtcagttaaagagctttcacagcattatccaattacattaaaaccacagaagacttaattaactactggttttaaaaagtattttatggtgagctccaaaatggttattagaatgataaagctgacaaaacaaaactcttttagctcacaccataggagtaatggcatgcttctcctgagaacttccaaaaagcaatctaggaacaaccaattaaatcttgctagttttttagaggataaggtgaccctagtggaaagcagtccacagagcttagttggacctatctcgtgtggaaagtaaacacacaccctgggccagcacttggtacctgacaaaggcaggactggccagaatgggatggcaaacagggcagactaacaagggtcacaagtggcctgaggtggatagggacagtgaaggggcagggggtggggacagagtttacattataagagggagtatgggtgttctaggaacccagaagacaaacttggattttagtctctggggaagctggacaactgcagagaattatcagggtgcaagctgttaagggagaataaggtttagaattcagaaaaacaagaagagcagagtccaagtgctaagactgtctagatgggagattgggaatgagcaggtcctcacaacaaaagcagacagagcctgggtgagactgactgcgaaactgccaggccccttccacacatgaggctccttgtgtaacaaaaatgaaaatgttctaagacagggttataaagtgggttttttttagagaccagtcctcactccattgcccaggctggagtgcagtggcgtgatcatggctcactgcagcctccatctcctgggctcaagggattctcccacctcagcctcctgagtagctggaactataagcccatgccaccacacctggctaaatttttattttttgtagaaagaatatcttgctatgttgccaggctggtcttgaactcttggacttaagctgtcctcctaccttgccctcccaacgtgctggggttataggcatgagccactatgaccagcctaaaatggggtcattttaagtgtttacatctaaccaactaatagctttaacacaaacatgcacacacacacacacacacacacacgtacaatgtggagggtatacatacaatataatataaattatattatttatacagcaaaagcagatgaagagagacagggcaggccaactggcacaggtgcaggtgtctggtgagtgtggcgcaggctgacagctgggccatagaggcatctctcctcacaattctggcagtagagtaccctggttaagtgaactgggcggggaattttacctccagaaaattattttctgtgctgcatttccattctgagctttgactatcatgtgctctgaagttagagcagtgggaggctagaaatgagtgggtggagaatttaaataaaggaaaagccacatgtgactttagtgttgtttgtgatttttcccacaggactctgtaagatacctccatcccaaaaattgatgatggaggctactgaaaaggaacagctcattaaaaggtatgaaatgtagcttgctctagggcaaacttacagtatattctgttacaaaaaaaggattcagagtataaaagccattcctagagaagcagtatggcaggttggaaataactctgcattaggaatcagaaggatacatttttagtcctaactctgccaccaatcagacgtggccttagacaagtcatctggggacaccaggtcttttcagtggaacacacagcctggccccctaccagtggcaatcctgtcttcacttagtccaggaaatctattctgacttcactctcttcctacctctcaggctgctctttctctgtatttgctggtatcgcctcttcctcactcccaaaatttagtgagctccaaacttagtcctcaggcctcttctcattcctatttacacccactcccaggtggcctcatccaggcctgtggctttaaatatcatcatatactcagggctcccaaactgtgtctctgactcaaatctttctccagaacttcagactcctaattcccctccctctagatagctccacttagatatttaataggcgtctcaaatttaatatgtctaaaaatgaactcttgaccccctccgccccccatctgccctgtaaatgggctgatctgaaacttttccccatctcagttcatagctactcattccagttggtcaaaaccaagttcagtcaaaaaccttggattaatccttttctcttctttttttctcacatcccatatcggcaaatattgtcagctcctacctaccaaataaatccagaattcagacacttctcactgcccctactgctaccatcccagaccagaccaccaacatctctcatcaggacacttgctgccacctcttacctggtctccctccttccactctgttctacaatctaggcttgtcacagcatcaagagtgagccacatcacattgcccttctactcaaaaacctccagttgcttccttttcactcccaggaggctccctacagcctctgtggcccacagcacacccaaatattgatatgccctcactgcctactgctctccatctcatccatgctgctttaggcattccagcctcctacctgttcctcaaacataccaaacataaccccctcagaacctttacgctctactcttctgtcagcctggaatgttccatcagacacctaaaagactcactctgttcaaatgtcacttaataagagagaagccttctctgacaacactatatgtgacagcaacccaccctgactcaccattgcctctccccttaccctcctttctatttctcagagtgcccattattaccacctgatatattacatatctacttagttgaggttttttaataatgtattcatttcccccattaaaatacaggctttttgacagcaaggactttgttttgttcactattggatctccagcacctacaatggtgcctggaatgtgatagacacttaatgttcatttatttatttactcactgaatgaatgaatgattgacattgggacatcatgaaagtttactgacagaaataagtaaacttcatgaaaagtagaacatcgtggaagtttactgacaggaataagtaaataagtaagtttactgacagaaataggtatgaataatgccttcatattaatatataatatgctcatatctgtggaaagttcagtccacgtacaccaagtatggccttctcaactcacaattcacaccaataaaaaaatttaggtacatatgatgctttctggtcatgttcattcattcaacagctgttctatttggactgatcagacgttgttctcacatcaaatccaagaactgaaaacattatttaaagtttctctcgagtttttaagaacctacaactatttatggagaaaaagcagcccaaggatgatctttttgatagactcaatactggtattctgaataagcatctccaggatctcatggagagcttgacagccaaggtattccatacatacaatgcctccatcacgctacagcagcagctagaagaactcacagccccggatgagaacatcccagcgaagatcctttcttataaccrtgccaatcgagctgttgcaattctttgtaaccatcagagggcaccaccaaaaacttttgagaagtctatgatgaacttgcaaactaagattgatgccaagaaggaacagctagcagatgcccggagaaacctgaaaagtgctaaggctgatgccaaggtcatgaargatgcaaagatgaagaaggtagtagagtcaaagaagaaggctgttcagwgactggaggaacagttgatgaagctggaagttcaagccacagaccgagaggaaaataaacagatggccttgggaacctccaaactcaattatctggatgctaggatcactgtgccttggtgcaagaagtggggtgtcccaattgagaagatttacaacaaaacccagcragaaaagtttgcctgggccattgaaatsgctgatgaagactacgagttttagccagtctcaagaggcagggttctgtgaaaaggaacagtgtggtttgggaaagatggataaactgagcctcgcttgccctcgtgcctgggtgagagaggcagcaagtcttaacaaaccaayatctttgcaaaaagctaaacctggagatattataagggacagctgagccagttgtcctacggacaacttatttaaaaatatttcagctatcaaaattctagctgtatgatttgttttgaattttgtttttattttccagagggcaagtggatgggaatttgtcagcgttctaccaggcaaattcactgtttcactgaaatgtttggattctcttagctactgtatgcaaagtccgattatgttggtgtgtttttacagttagggttttgcaataacttctatattttaatagaaataaattcctaaactccctcccctctcccccatttcaggaatttaaaattaagtagaacaaaaaacccagtgcgcctgttagagtcgtcactgtctattgtcrtagggatcaattttcattaaacttgaagcagtcgtcgctttggcagtgttttggttcagacacctgttcacagaaaagcatgatgggaaaatatttcctgacttgagtgttcctttttagatgtgaatttttatttctttttaattattttaaaatatttaaacctttttcttgatcttaaagatcatgtagattggggttggggagggatgaagggcgagtgagtctaaggataatgaaataatcagtgactgaaaccattttcccatcatcctttgttctgagcattcgctgtacactttaagatatccatctttttctttttagccctgatctttcacttgaaagattttattgtataaaaagttccacaggtcaataaatttagaggaaaatgagtatttggtccaaaaaaattaaaaataattaagattttagggcttttattttttcttttgtaattgtgtaaaaaatggaaaaaaacataaaaagcagaactttaatgtgaagacttttttgctataatcattagttttagaggcattgttagtttagtgtgtgtgcagagtccatttcccacatctttcctcaagtatcttctatttttatcatgaattcccttttaatcaactgtaggttatttaaaataaattcctacaacttaacggaaaaaaaaaagtttctcttccatctctagtaaaattaattgcctccttttaccatctctagtaaaattaattagcttcacagataccctctgtagataaactcctttaatttctttcttcctaacatacaaaaacattcccaaatatggtttgatttcccccaaaaaatgtaacaaaatggtgggaggatgggtgggtctgataacttgagaaatgcagggcaggtgtgattaatgaaaggtcctccctcttttttcctctcaggggagtgtttaaagacaccagcaaagacaaatttgactacattgcctacatggatgatatcgctgcctgcataggcacaaagcccagcatcccacttctgttcctcaaggatcccagactagcttgggaagttttctttggaccatgtactccttatcagtaccgcctcatgggccctggaaaatgggatggagccagaaatgccatcctgacccagtgggacagaacattgaaacctttaaaaactcgaattgtccctgattcctccaagcctgcctccatgtcacattatttaaaagcctggggggcacctgtcctacttgcctctcttctacttatctgtaaatcttcacttttcttgaaattggtgagagataaactacaggacagaatgtccccttacctagtaagtctttggcgaggatgaacctgattgttacaagggttacaccaagtcatgctaattctatctccaagtatcttgtgcatccctcctctgctctccatcataactgctattagccaaattcaggcccagtcatctcctatctgaattattgtattatcttcttctttgttttcagtaccctctttcttgccaccctttccaatgcatcttctaccctgctacctcagtgattattctaaaataaatatatatgatatggtttagctgtgtccccacccaaatctcatcttgaattgtagctcccataattcccacatgccgtgggaggtaggtaattgaatcatgggggcaggtcttctcccatactgttctcatggtagtgaataagtctcactatatctgatggttttataaatgacagttcccctgcacaagctctctcgtgtctaccaccatgtaagacgtgtctttgctccttcttcaccttccaccatgattgtgaggcctccccagccatgtggaactgtgagtctgttaaacctcccttcctttataaattacccagtcttgggtatgtctttattagcagcaatagaacagactaatacaatatggtttattactctaaagtaaatatatggtttataaatatataggaacctctgattcccaggaaggtctcagtaggaacaaaatggcattcaaattaagttgagaaaattttttccatcacccaaactggaacacagtgatgcaaacatagatcactgcagcctcgaactcctgggctcaagctatcctcccacctcagccttctgagtagctgggaccatgactggctaatgtttttaaaggttttcatagggacagtgtgttactttttctttctttttttttctttcttttaaaaaaaatacggccagggtctcgctatgttgcccaggctggtttcaagctcctgagctcaaacaatcattctgcctcagccttccaaagtgctgggattacaggcatgagttatcatgtccagcctcactattttttttagatctcagatcttgaactcttgggttcaaacaaacctccctcctccacctcccaagttgctgggattacagacatgtgccaccatgcctgcctggaaattttaatatagagattattttaaaagatatgggcagagtgtaggaagatcatagagataatgaaacactcccagacttgtaacctttactatccatagacctaatgaggcgagagaataaagcaattactaaagagaaaaagcaagcactgcgtagagggccacctaacaagagcaatgaccttcagctgagtgacaaaggcaggtgcacgatgactacaaaagtagagatctgggggaataaattatctaatcttactctcttcccactctctgatcccttgctagtgctccccaagggccaaaccaaatgaaagtcagaaggcaaggttgccaacagattttatccacagaggtcaggctcctagggcacagagcagagcaaagatgatggagaggatatatggtgaggcacacaaaagggatccagtttgatcatgtcaccctcccatataaaatccttcattctctatcttgattagagataatagtccttggctgggcacagtggcttatgcctgtaatcccaacactttgggaagttgaggcgggcagatcacttgaagtcaggagttcaagaccagcctggccaacatggtgaaacctcatctctactaaaaatacaaaaatcagctgggcgtggtggtgcgtgactgtaatctcagctatttaggaggctgaggcaggagaatcacttgaacccaggagacagaggttgcagtgaggcaagatcacaccactgcactccagcctgggtgacagaaagagactctctcaaaaaaaaaaaaaaaagaagacataatagtcccatattccttagcataacatagaaggcccttcatggtctgagtccctttgcctgggtcagcaggatgcctgttatttcaaaccctcccatccagcactaccaaactatgaactttcataactcctccctttggcatcagctcttgcctctgccaggcacacaaatctataccgtgcctgactgatgagatcctatttatctttcaagagagctcagtgctctcattctgtgcagccttccctaaatccccaaagcagaaatggtcacccctgtgtagcagctgcaccttgtgtatgctctggtgctgctcttttcttactatagtatcattttctttttgtctgtcacctaacaaatggtgagttcctaaaaggaatcatatcatgttcatcggacacactgcctgatatgaagcattgctaaagaagtatttgatgaatcgacagtggccttgccagctggcactctttgttttctctcttctacctacattcttgtcttctgccaacatgataaattacctcagccttgcaaacaaacaagaacagtccgccaacagctaatgttataagtaaaggacaatccaagtggcaattagaagaaatagaactatacagtccagtacttgcacaggagcgaagtacactggttaagagcactaacttgagaatgagaactcaacttgttagctatgaagtcttggccatgtgacttagcctctctaagccttagtgtcctcatccggaaaacagtggtcataatagggcctaccttactgtgaacattaatgagaaaatgcacggtgtttggtccaaagtaagttaactactaatagctgcagaatcggggacattttctattctctgaattaaagaaaggacttgaaactattgccaaatcccattccctgttgtgtaatctggaggcatggcctttgctctccctggattctctggcagcactttccagttaacgatcgtttttgttgttgctgctgctactgataaacggacatgtttaatgacacattggtcttcacagagatgactacagagacttttaatctataatccagtagtatacaaccatgcatcacagactaattagccagatgtaaaataaactagcttcttaccacaactaccctataaacattgcaactattctttccaaaatgaccctagtcttacatgaaaacacctattgtggggaaaccggaaacctagttatgtgaccaaaactaaaaattaaaggaaaaattgcaattcactggtgaaagttggtgaaagcagaggaaattcagtgcccttcactatgctactttgatgttacttgtgttcttttggtccctcttcttcagcccatccatgttagttctcagtaggtttgaataagccatccggaacttattcacttctttggagctcaccacaatgctaaccttctttttcccatcagtagttcttaacagacacctgtctgaagactcaaagcccgcaacagaacctttcactagaatgggtttggttcaacctcagttctcaaggaacaaatggtaccaggaaaagtccgctgtaagtgaacccattttaactgagaatcaaaacatcatagtaaatagtatggaaaaaaattaggtttggtcaaaacttcaacttgagaaataaaaccagaaattataaaaataagtttgctttactgttcatttaactgagttagattataattggaactatgtacaaatgggaactgcctaattgtctgacaacttatattacagcaagataaaacattccccactttatacaacattctttacttcccatatgactttcaaagcaagattacaagattgccctttttaaaaaaattcacagttttcattgattttgccaagtatttacatcattctatttgaatttcctgtcttgtcattatgtttgccaattctctctatgttattcttgtatttcttacatgatttaactctgcaagatctagacttgccaatggcttaacagttctccagtattacttcatcaacttcaacattcttcttagttgcaggtgatatggtttggctgtgtccccacccaaatctcatcttgaattgtaactcctgcaattcccacatgttgtgggaggaacctggtgggaggtgattgaattatgggggtggagctttcccatgctgttctcatgatggtgaatgagtctcatgagatctgatggttttaaaaacaaaggtttcccagcacaagctctctctttgccccctgccatccatgtaagatgtgacttgcttctccttgcctttggccatgattctgaggcctccccagccatgtgagactgtaagcccattaaacctctttcttttataaattgcacagtttcaggtatgtctttaccagcagtgtgaaaatggactaatacagcaggatatgtaacttctctttgccattgatttgcatcgtatggtctgcattatcagacaattatcagagactgaccacaaacacatttgtgaaatacatttatgggaatgatatccagagtagactgtactgtcaaacagtcctgttggatatgtgtttgaggaaaagtaaacttttttttttgaagacagagtcttactgtgtcacccaggctagagtgcagtggtgcactgactgctcactgcagccttgacctctcgggctcaagctgggactataggcatgcaccaccatgtccagctaattttttcattttttgtagaaacaaagttttaccatatttcccaggctggtctcaaactcctgacgtcaagtcatctacccatttcggcctcccaaagtgctaggattacaggcatgagcaactgtacctggccgaaaataaacttttaagtggtcagttaatttgttcactcaataaaacttattgagcacctaatatgttccaagcactattctagaccatgaggaaatagaagcaaatacaaagagataaaattcttgactccatgaaatttataatccagtgtgagaggcagaaaatgaacaataaaatgttttatagtgatcagtcttaagaagaacaagtaagtttaagagacaaagggtgatgggggttagataggatgctcagataagacttctcctaagaaatgactcttgaaatgtttttattggaacttgcataaagtgaggatgtgacccacatgaatatgtcatagaacggtattgtttctgaaagacagatcagtaagtaggcctgagtcagggatgttagaacagtgctttccaatcttgttcacactgtgacacatagaagattatggtaatgggccaggcacagtgactcatgtctgtaatcccaacactttgggaggccaaggtggg

SEQ ID NO: 94065 - DNA, 53023 bp, Homo sapiens
attgctataaaaaatagtgttctacatagactcctttttttgttgtttccgcctttttatttttaagatattcagtatcagttttatcttatgtcaggcaatttcatttttagcttctataatgtatcacaaatgaccttgattcatttcctcatttgataagtaaacatttcacattttgataatacatttgtgagaatacttaatcacaagttcagctagtgttatgctttaaaataatcacaaggatttttagtgtccttgttagtatacggaaattaaaatgcactatcccaatttgggggctttaagagttactgcctgtagaagctgcagtctttagagaataaattgtctccaggcactatatttgcaattcttactaaattacctggttgcctggatatctccctggcccagagagaagaaaaccaccaatttgctctttttcataatctcaaatccagaacctacaaatagagtaattggtatgcagattctttgatgactagctctgctctttggagagcatgttatgagtattttagccttttcttttaaaaaggttagatttattcatcctttgacttcctcccaccaatcagtaaataagcaaaaacaagtaacatttcagtaaaatatccaacaaataaaattttatacctattgccaatgaaagtaataaagaatgtggatagtccttacggagtatgcacagagggcctctgagaaattacaaaagaatcctggaatcctgtcaggggtatccaatcttttggcttccctgggccacactggaaaaagaagaattgtcttgggccatacataaaatacactaacacaaatgatagctgatgagctaaaaaaaaaaaaaaaaaaccaaaaacaacaacaaaaaaaagggtcggtgcataaatctcataatgttttaagaaagtttatgaatttgtgttgggccgcattcaaagccatcctgggccaagggttggacaagctggctgtaattacaattggattgcaaaggacttgctccttggccctgttaatccagtgagccagaactcaaatcacttctttctgctgaatcatcaagcccaagttaacaattgaacactgcatcctgaactgaaaggtgcaaaggtgaaagcaagtttaaacaatcccaatgatttttctctttgttaaatggcagaaaacaaccagttgagtatttatccttttgcaaaaccagttaactgaattccagttatttgttccaattcagagttcagttttcattgcacttcatactgagtggttctgtcactgtttcttttgacacagaagtaggcccggtgaactgactaccatcgatacagcttgttctgtcaatgtcaaatcagtcttgaacctgtcaatccaaattaatcaacagtattactttggtgacaggcaatcatatgtttaattagtaactcatgcttctggcatgaaaacagagctagggttctcaactctgggctgcaaagcaaaatcaggtagcagcttttaaaaaatacaggtgcctgacttgtcctaagatgctgattcaggagatctggggtagggcccaagtaactatttggaaaaagctttccaagtgactctaatgcaacaggggcagagactgtcacaaaaggtactgatataaataatacatgatggaaggggaagtctgtacttcttcaacaaggacaggaggcattgtgtcaaggactactcaaagtgcaaagatgatttcacatcttttttttttttttttttttttttgagacagggtctcgctctgtcacccaggctagagtacagtggtgcaatcttggtttactgcaacatctacctccctggctcacacgattctcccacctcagtctcccgaatagctgggattacaggcatgtgccaccacacctggataatttttgtattttagcagagatggggtttcaccacattggccaggctggcctcgaactcctgacctcagatgatctgcccacctcggcctcccaaagtgctgggattacaggcatgagccattgtgcccagcccgtttcacatctttctggaatgtcaattttacttgacaggtaagcagtttaaaatgtcatttttattttgggtggtgatttcatagatatatatatatataactgtcaaaactcatctaacatttaaaatctggacattgaattgtatctttattatatctcaataaatgtcattttaaaattaaaatatggatacattctagagtataatacaaaatctgcattttctttttagatacactctgagacttgaaagaagtcaccctctgagatgggtccctgatatggtttggttatgtccccactcaaatctcatcttgaattatagctcccataatccctacatatcatgagcggtacctggtgggaggtaactgaatcattggggagggtttttcccatgctgttcttgtgatagcaaataagtctcaagctgtgatggttttataaatgggagtttccctgcacacactctcttgcctgtcgccatgtaagacgtgcctttgctcctccttcatcttccaccatgattgtgacgtctctccagccatgtggaactgtgaatctattaaacctctttttctttataaattacccagttttgagtatttcttcatagcagtatgaaaagggactaacacagaaaattggtaatgcagagagtggggcactactgtaaagacagccgaaactgtggaaataactttggaactgggtaactggcagaagttggaacagtttggagggctcagaagaagataggaaaatgtgggaaagtctggaacttcctagagacttggagggctcagaagacaggaaaatgtgggaaagtttggaacctcctagagacttattgaatggctttgaccaaaatgctgatagtgatatggacaataaaattcaggctgaagtggtttctgatggagatgaggaacttattcagagttggagtaaaggtcactcttgctatgcaaagagactagtggcattttgcccctgtcctagagatctgtggaactttgaacttgagagagatgatttagggtatctggcagaagaaatttctaaatggcaaagtgttccagaggaagcagagcatacaaatttgaaaaatctgcagactgacgatgcagtagaaaataaaaacccattttctagggagaaattcaagctggcagcagaaatttgcataggtaataagaagctaactattaatcaccaagacaatggggaaaatgtctccagggcatgtcagagaccttcacaacaggccctcccatcacaggcccagaaacctaggaggaaaaatggtttcatgggtcaggtccagggtccccctgctgtttgcagcctagggacttggtgtcctgcatcccagccatgccagccatggctaaaaagggccaatgtacagctcaggcctggcttcagacggtgcaagcctgaagccttggcagcttccacatggtgttgagcctgcaggtgcacagaagtcaaaaattgaggtttgggaacctctgcctagatttcagaggatgtatggaaatgcctggatgtccaggcagaagcttgttgcaggggtagagccctcatagagaacctctgctagggcagtgtggaagggaaatgtggggtgggagcccccatacagagtccctcctggggcactgctggtggaactgtgagaagagggccaccgtcctccagaccccagaatggtagatctactgaccacttgcaccatgtgcctagaaaagctgcacacactcaatattagcctgtgaaagcagctgggagagggggttgtagcctgtaaaaccacaagggcagagctgcccaaggctgtgggagcccacctcttgcatcagcatgatctggctgtgagatacgaagtcaaaatgatccaaagatcattttggagctttaatatttgactgccctgccagattttgaacttgcatgggggctttagcccctttgtcttgaccaatttctcccatttggaacgggtatatttacctcactcccgtgcacccattgtatctaggaagtaactatcttgcttttatttatttatttttaaatttaattttattattttttttgagacggagtctcgatctgtcccccaggctggagtgcagtggcccaatctcagctcactgcaagctctgcctcccgggttcacaccattctcctgcctcagcctcctgagtagctgggattacaggcgcctgccaccatgcccgcctaattttttgtatttttagtagagatagggtttcaccgtgttgaccaggatggtctccatctcttgacctcatgatccgcccgcctcggcctcccaaagtgctgggattacaggtgtgagccactgcgcccagccactagcttgcttttgattttacaggctcataggcggaagggacttgccttgtctcagatgaaactctggactgtggactttcgagttaatgctgaaatgagttaagactttgggggactgttgggaaggcatgattggttttgaaatgtgaggatatgatatttgggaggggccaggggcagaacagtttggctgtgtcctcatccaaatctcaccttgaattatagctcccataatccccacatgtggtgagagggacccagtgggaagtaactgaatcatggggaggggatttttcccatgctgttctaatgatagtaagtctcatgagatctgatggttttataaagggcagttcccctgcacacgctctcttgcctgccaccatgtaagacatgcctttgctcctccttcaccttctgccatgattgtgaggcctccgtagccatttggaactgtgagaccattaaacctctttttctttataaattacccagttttgggtatttctttatagcagtatgaaaatggactaacaccgtccacatatgcagggaggcaaccacttcactctcctctgcttggggtggggttgaggggttgagaaaaagaggggaagaccttttgaaaagacccaggactacagtttgaaaatgtctgggtttagaaatcgtttcacttccagtgcttctcactcatttcactacccatgacccactcccctctcatctctttactgtccacttatcactgttctttttgcttaaaatgactccaaatcctcaaaaaattaaaagttccactgtttattacaattggaaattttatgtttattgtcactgagcagagggtctaatgactccaaggcagtagtttcagatattgcacattgcaaacgattttcacacaaaaatgttttaaaaggctatcgggtgcagggctggttgtaggtagggacccaacctaagaattatgaaacgccatagttcctaattttggaaagatattagcggagagtaatatggattagtagcaagggctggagaaaacagtgctctatactaccttcaaggtgctcttttcatcgcttgtgacccaatggctgaatagtgggtaggaaacaggattcaggatctcaggcacggtctggatctactgactctgagcgtcattttatctcttgctggggtacacatctgcttctggatttaagtaacgtgcgctacaataatttaaggactataaaaccacaaggttatgagagcgtaaaccacaaagcgtgtaagtaaatgcctagaaaacgcaacgcggtagcacagcagcaacgcacaaacagccccagcaaacgacgcgcgccgggcttcccagctcccggcagcctttgcgcagccctccccaagtccaactgggcgcccggggcggggtctggaccgcacgcccttaccacaccccctccgcgccgcaccacgccccctccgtacctgctcttagcgcgccttccgccctgaatatgcgcatgcgccattctccctttacagccccgaaaacgctccagctgrccgactcggagacaatggcgagaggcctcagagttcggcttcttacctgctttgcataggcagcaatctcctgctagtcccgcctccctctggcattctggcgsgcgaatggaggagccgagaagagagcgcagttctgattggagaaygcgcgtgtttacattctcacctctcccgggaagtggacgaatttagaccgcctcttccttcccgttgtttaaggcagttggttgccctcctgtccgtcagaggtgcagtaccagaggtggcgtgctgccgayttcgcgtttsccttgctggatgattccgcwtgtttgccggctgcgtgagtgcttagagcttttcggtggaagatgccggacagtaacttcgcagagcgcagcgaggagcaggtgtctggtgctaaagtcatcgctcaggccctgaaaacgcaagtacgatggaccttcctggaatgaaaggctcctacggaagctggcggggaccgcgatgttgtcttggagacgagtagaaatgggcgatgggggtcggggggttttccttttagcgcccgggagggagggaaggatgtggcgatatggtggggccttgggagtttactcccctgttcttcgttcctcaggatgtggagtacatatttggcatcgtaggcatcccagtgaccgaaatcgccattgctgcccagcagctaggcatcaagtacatcgggatgaggaatgagcaagcggtgagtatggactcaggtggctgaatgcgttactgggaatgatcagtaatagcggtaggtatgcattgcaaacacccagatagcgcttaccactcttctgctactttacatatatcatatcaatcactgttgaatattaactgttgttacaccaagttgacagatgagaaaagacacaggttaagtaaaacttgcctttggtgacacagctggtagtagcagagccagggtttgaacccacgtattctgggtctgagtccattctcttactactatactgtatgtcatgattggaatggacagtttatgagtaaagtctgacttccctattaggctacaagctccattagagcagggatattatttcttcacgacacatctgtacccccagtgcttagtgtggtgcctgcataagaaaggtgttcagagattacctgtgggataaatgagtgaaggccaaggctttgttgtatgattggttcggggcagggtggaggatatcacaaatggtagtgccttgatggaaactcagatggctcagatcctagcctgatgctttttccaccacatcatgctgccacctttcttagaggcttatttggaagcaggataaggaagatacgacrttttgtcaatccactttaagtgcatcctctgccaatccaccttgctcttctctcagtagtgcgggcttgaaaggtcaagaatccacttctgtgatatcacatactctcagtccagctgaggctaaatattcctgctttacactcccaccgttgccttctaatttaaattcttgcctcctcttgcccaaacaactgcctggccaccctaagtggtgccttttgccatcatacatgagtgcctggagggcagaagttgtgattcatttgttatatcaccacagtgcctggcttggtttgtgctttcacgtggtgtagatgcttaatattatacattatttattaattgaatgacattctttattgaatgacattctttattgaatgacattctttatctacaaggtttgagatttgtattttttaatcttaaaactaggaggttttgagtttctgttgcttctacattttacttgtctttgttagaacaacattctgttctttcatctgtgtgaaaaaatgaagctattgacctatgaatggaacctatacttaactgtttttgtagagatgacatatctgccactgatttcttcatacagcaaacatttattgactaagtactgtatactaaggattgtgctacataacctgtaggagagagggatgtaaagaaggagtgaggtttagtcttgatcttcacgttgatcagtcctggaaggtgagggtaagacttacagaaaaagactcatctattataactctcacaatagatgtagtagcacagaaggggtgactggttctctttgaggacagagaagattgcctgtagaggtaatgttagttcatgtggttccctcaaggtaggtaaaggcatggtgagctgtgagactggtaggtaggttgaggggaggttgtgggaaatctaaaaagagtttgaatttttttttttttttaacagtaggcaatgggggagactaaaggtttttctaaacaggtgggcgatgtaattagatttgtacttcagaaagatgatgcgaggcatggttgtacatgccagtaatcccagctacgaagggggctgaggcaggaggattactcaagtccaggaattagaggctgcctgggcaacatagcacgacctctgtctctaagttttatttcagcccctataagcttagttgagggttctttaggtcccatgtgctgtgttgggtgctggatacagagatgaatgatagttcctggctttaaggggcttacagccaagctgtggagacagacacagacaattgtattataaggtggtaagtgctgtgatagagagatatccagggtgctataaagcccagagaaggagtacccaggctcagcttcccacaggagatgatgtctgagctgtcctgaaggataagcaggcattaaccagttaggaaagaggaggcaggctcctctggagatgattcctagattttgggcttacttgattgattgtgtagatcatattgtctgtgactgagactgggaatatagagggaagagccagcttggaggagaaaggtgatgttcaattttgaacacatgcatttgagatgttggtggaacatcccagtgcatatgtccctcaagcatcctgactctatggtagtcaaaggaagacttaaatggtacctgaactaagggtagtgacagaatgattcagagggaacatgaaaacaggctaaggcattcaggacatgtttgtgataaagagaaagatgtagttgggtgtgacttcattgtctttgattagatccatagagtaatcaagacatactgaccaattggccagcaagtaggcagattgtcagcaagttcattgttcttgagagcttactgtgtgtgggcactattttgagtgttttacacatacgaactgatttcatcctcacagcagtgctttgaattattttcattttatagatgaagaaacagagatttagagcaacttgccaaaattacacagtagaaagtggggaagctgggatttaaatcaaaacagattggctcgagagtccactctctaagtaccatgtacactgttctgcctgtgaatggaggtagtttagtagaggaacagatcttttatggtcataaaaccagttatggccaggcgcggtggctcacgcctgtaatcccagcactttgggaggctgaggcaggcagatcacctgaggtcaggagtttgagaccagcctgaccaacatggagaaaccccgtttctaaaaatataaaattagccaggcgtggtggtgcatgtttgtaatgccagctgctcgggaagctgaggcaggagaattgcttgaacctgggaggtggaggttgccgtgagccaatattgcatcattgcactccagcctgggcaacaagagcgaaactccgaaactctgtctcaaaaaaaaaaaamaaaacaaaacaaaataaaacaaaacaaaacagttacctctcaacttttgacatttcctaccagaggaatatactttttgttacrtgttgttgtatattttgcattgcctagcaacatttcttacctagctatcataagtgggcaattcttttgggtgtctaaataaagtgttcttattgcagcaggtatttacatgcctgcatttcttaggagttgtcttattctcctaatgtgaatttggccttatgtgcaaaaggaaagagagatggggccagtagagaatagcgacacaggaaaagagcagagtctttgtgcaggttctcagtgggtgtatgatagtagagccagttaagattatgatccataaacatttcctttttttttttttccacatttatgtcgttaatgtggagttctttaagacagtatactacttcatttaaagctgaatgaaggctaggaaatacgcaattcattattatttctaaagaaatgagaagaaataatactgggaaaaaaatgatgtcccagactaagaagaatttgagagagcactcagcattttcccaggttatcttgtgtgcatttaatttagtgccccctctcttcctgattatgagctgaagtagagttacaaggtaaaaactatccatatgcaggccataaaggaaatctcaataaatcgccaaggattgaaagcgtgcagtatatgtcacctgaccatgtggaagtaaagtggaactcaataagagatcactaaaaagaatctcagacctttggaaattaagcaacatactttttggtattttgtaaatatttgaaaagattaacaaaatgaataaacttcaagatagactgattgagaataaaagagaaaacagattaccaatgtcaggaatgaaaaaggaggtatcactacagatcctaattaaccaatgggttgaagaagaaatcacaatggaaagtagaaaatattttgaatagaatgataatgaaaagatgcaactcaaacttgtaacctataactaaagcagttcttggaatcattttaaacaaattattagtaaagaaaattaaaaaccagtgttctaaatttgtattttaagaagctagaaaaagaaaagcaaatcaaattcaaaatgactgaaataataaatacaagaacagaaatcaatgaaatagaaaacaaacaatagagaaaaaccaacaaaaattttcgaagaactaaaaaaatttgttctttgaaaagatggataaatttgataaayccctcatgagactgatgaagaataaaagaaagaaaacaaattaccaatattgttaataaaagaggacattcctattgatcctgcagatatttaagcaattgtaagaggatgttttgaataacatacatatgaacaaatttcctgaaaaactaaaatttagataaccattatttgaaatttatgtgtagaacatttattactaaggttggaaatattttaattctgcctttaccactatgttcttgtctattatttaatagtaagttgctgtcataaatgtactataaggatcccaatatgctcaagtcccagtgttgttttctcgtaggcttgttatgctgcctccgcgattggatatctgacaagcaggtaaactaaaatttgtttcacttcaattactttaatattttggggtagaactattacgtctttcagctgaaggatgagttcatttggaaagattatagaaaaatatattaaataacaaaggataaaaaacatttaaaactctctgaggaccacatcaaaagaataatgataccagaagtgtttcagagtggaacacattgccattttgtagagtgaatcactggtgatcagatagtgagttgatgtatgataccttgtcttggatctcacaactaccccagcacacttaatacaaaaatgcttggttcaaaatgtgactgttgagagctgttccacacgttctgattttttagtgtgtatccatgttacctaactaccaccccctttttattattaaaaattaatacatttttaaaatgtccattttggaaaacttggaaaatatagaaagcacaaagaagaaaatgaaaatcgactaggcacggtgggtcacgcctgtaatcccagcactttgggaggctgaggcaggtggatcacctgaggtcaggagtttgagaccagcttggccaacatggtgaaacaccatctctactaaaaatacaaaaatcaccctggtgtggtggcatgcgtctgtaatcccagctactcgggaggctgaggcaggagaatcggcttgaacccaggaggcggaggttgcagtgagctgagattgcgccactgcactccagcctgggtgatagagtgrgactccgtctcaaaaaaaaaaaaaaaaaaaaaaggaaaaaagatgaagaaaatcacctatgatctcagaactgttaagaattggtcattttcttccagttttttcccttatctatgtattttttaagcagaatttggactctcacaggaatgtgtatcatacttttttcacatatgttagttttaatacatttttttatttccaaaaatgaaactagtaattcagttgctaagaaatgcaaactaataagattctcaaagtctagacctcaccagaatagttttttttctgtgataaggaacttgtgaatttgaacctgaaaaaaataggccatcaagtaacactattgtcactgttttctgccgctttatttacatatgacaaatattttaatcttttcatttagcttggaaagcatttaaattatagttattaattaatgccttaatgtaaaaaatgctagaacaatgattaagagaatggttaaaagttcatacttttttttttttgagatggagtcttgcactgttatctgggctggacagtgcagtggtgcaatctcggctcagtggaacctctgcctcctgggttcaagcgatcctcatgcctcagcttccccagtagctgggattacaggcatgcaccaccacacccagctaatttttgtattttagtagagatggggtttcactatgttggccaggatggtctctgtctcttgacctcatgatctgctggccttggcctcccaaagggctgggattacaggcgtgagccaccatgcccggccgaaaagttcatatttaaaacatttttgctgtttgaatgaacttctggagctgcactggcaagtatagtagccacgagccgtatgacttgtttacatttaaattaattaaaattaaataacatttaaatcatagtttatcagtttgtagtagccacatttcaagtgctcagtaaccatgtcagtagtggctaccgtatcatactgcaaatgcagaacatttctattactatacaaagttctgttggatagtactgttctagaagtttagtttacttggtggtaattacttattttcaagtctgtcttaaacagaaatttttaagaaattattttataagtgtaaaatggtgaactgaattatattgagatacctttttcccgagtggtttaagcttagaaagtcacactgaagggtaaaacattcaagttcaatatttatttatttggagtctcactctgtcgtctccatgctggagtgcagtggcaccatctcggctcactgcaaactccacctcccaggttccagcgattctcctgcctcagcctcccaagtagctggcactacaggtgtgcaccaccatactcagctagtttttatattttttagagacagggtttcatcatgttgcccaggctggtcttgaactcctagactcaagtgatccatctgcctcagcctctcaagatgctgggattacagacgtcagccaccgtgctcagcctcaaattcagttttaaaagattttggggaccaggcgcggtggctcatgcctgtaatcccagcactttgggaggccgaggcgggtggatcacctgaggccaggagttggagacaagcctggccaaacatggtgaaaccccgtctctactaaaaatacaaaaattagccgggtgtggtggcacatgcctgtaatcccagctacttgggaggctgaggcaggagaatcacttgaatccgggaggcggaggttgcagtgagccgagatcacaccattgcactgcagcctggggaacaagaacgagacttcgtctcaaaaaaaaaaaaaaaaaagacaaaaaaaaaaacacaaaacattttgggcagagcactgcattcagaattactttcctatcaaagatcagtcgacgttatatttatttgttaagaaatgaaaaaaaaaccttttttcatacaaaaatgaactcagcagtcaaaaatttgcttctgtataccattaacttgatttagtccagatgtagtccagatcaaaataagtggttagagacataaggtgtgaaaatgataggtaccttatttctcacaagaaatccgatatctttctttttttgggccaggcatgctggcttatgcctgtaatcccagcactttgggaggccaaggcaggcagattgcttgagcccaggagttcaagaccagcctgggcaacatggtgaaaccccatctctaccaaaaaaaaatacaaaaaattagccgggtgtggtggcatctgcctgtagtcccggttacttgggaggctgtggtgggaagatcacctgagcttaggaggttgaggctgcagtgagccctgatcatgccactgcactccagcctgagcaacagagtgagatgctatctcaaaaaaaaagtgtgtatatatatacacacacgcacatatatatgtgtgtatatatacacacatatatacgtatgtgtgtatgtgtgtatatatacatatatacgtatgtgtgtgtatatatacacacacatatatgtatatgtgtgtgtatatatacactttttttgagatagcatctcactcttgcccagagtatatatgtacatatgcgtacatgtgtatacacgcacacatgtgcgtacatgtgtatacacgcacacatgtgcgtacatgtgtatacacgcacacatgtgcgtacatgtgtatacacgcacacatgtgcgtacatgtgtatacacgcacacatgtgcgtacatgtgtatacacgcacacatgtgcgtacatgtgtatacacgcacacatgtgcgtacatgtgtatacacgcacacatgtgcgtacatgtgtatacacgcacacatgtgcgtacatgtgtatacacgcacacatgtgcgtacatgtgtatacacgcacacatgtgcgtacatgtgtatacacgcacacatgtgcgtacatgtgtatacacgcacacatgtgcgtacatgtgtatacacgcacacatgtgcgtacatgtgtatacatgtgtatatgtatacaagtgtatatacaagtgtatatgtatacaagtgtgtatgtatacgtgtgtgtatgtatacgtgtgtgtatgtatacgtgtgtctacatgcatacgtgtgtgtatacgtgtgtctacatgtatacacgtgtgtgtatacgtgtgtctgtatgtatacatatatatagagtatactctgttgcccagagtatatatacatatatgtatacatatatatacgtatgtatacatatacacgtatgtatacgtatatatggatccatatatacacgtatgtatacgtatatacgtatgtatacatatatacacgcatgtatacatatatacgtatgtatacatatatacatgcatgtatacgtatatacgtatgtatacatatatacacgtatgtatacgtatatagtgtgtatatataygtatatagtgtgtgtatatatacgtatatatacgtatatacgtatatatacgtatatagtgtgtgtatatatacgyatgtagtgtgtgtatatatacgtatatagtatatactataggtatatagtgtgtatatatatacactatgtatatagtgtgtgtatatatacacgtatatacgtatatatacactatatacatatatagtgtatacactatatacgtatatgtgtgtatgtatatatatcgcgatatatatatatcgccttgttttttaattaaaaatattctaataattgttttatcagttatagtaaagacttgtatgtccttcctttgaagtccaagattgccatgtttcacactaaagtgttatgaatcagttgttacatttgacctgattttaataaattctgttttgcttttaggccaggagtctgccttgttgtttctggcccaggtctcatccatgccttgggcggtatggcaaatgcaaacatgaactgctggtaatgacattattattactgaaaacattttcttaaaaaggtcactgcaggattttactgagtagagctaatgctgatctagggtagaaagacttggaaaaaaaaaaccccttcaattcttagaaactgaaagtagagttagttaccggggagggaatgaggaggaggagggggaatagggagataggtcaaagggtacaaagtttcagtcaagtacgataaagcctggagatctaatgtacaacatgaaagccatagttaataatattgtgtattgtaaatttgcaaagagagtaaattttaggtacttttaccaaaaaaagtgactatttctacaatatcttaggaaaaaaagtaacatgaatatgttaatttgcttgactgtagtaatcatttcactatatgtacatcaaaatatcatatggtataccttaaatagatataacttaaaaaagagtattaggaagaaaattcaaagcaccagtaatttagttacttagagataaacactttctttttttgagacggagtctctctgtcgcccaggctggagtgcagtggtgcaatcttggcacaccacaacctctgcctcccaggttcaagtgattctcctgcgtcagcctcccaagtagctgggattacaggcccctgccaccacgcccggctaatttttgtatttttagtagagaagaggtttcaccatgctggccaggctggtctcaaactcctgacctcaggtgatccacctgccttggcttcccaaagtgctgggattacaggcatgagccaccgcacccagctgccataaacacttttaacattttagagttcctaatatgtgtgtgtatgtgtgaacgtatgtgtagttctatttactttaagtgaagaattatttttttaaagatccaagctcagtgtgtaaaatgtggctaatttttcaccttgttttgcataggtaggaagatatttgaaattcttatattcatttagtttgctttatatataaactatttagtacttattctctgatcttgcccttaactccgtctctggcactttaccagtgagatcaggttgaggggggttaggttctaatcaatttggaacatatttaatctttctagtggaaaggacattgttttctttcttgccctgtgtttcttatagtttcttctttactttccttttgatctttctcttctttatctactttaaggtgttatattttttaagtaccttaaggtttcccatatcttttttttttccacattgaaggataagaatttcattgctgaggaatgtcacttattttgcaatttctaaatagattcacttaggaaagtgtaaaatttttcttccccttatcccaagaataagaaaggcataaaaatttattttatgtcaatatacctggaagcttagcgtcagcatccaaaaggggaaggggaagaagggaaggaaaacatttactatacattttgtctttttctgatattaaggaaagttctctcatatcaggttgcttcttagatattttttaatctacaatttctttctttttttttgagacagagtcttgctctgttgcccaggctggggtgcagtggcacaatctcggctcactgtaacctctgcttcccaggttcaagcaattcttctacctcagcctcccaagtagctgggattacaggcgcccaccagcacgcctggctaatttttgtattttttgtagagctggggtttcaccatgttggccatgctggtcttgaactcctgatttcaagtgatccacccaccttggcctcccaaagtgctggattacaaggggtgagccacctcacccagccttaatctacagtttctaagaaaaaaatataatattctctccctttaacatttattatttgttgtgaattagacactgtgtttagtgttttacatgatgatctaatttgtaattatcttgttaaaaaaatgattgtttcaggcccttgcttgtgattggtggttcctctgaaagaaaccaagaaacaatgggagctttccaggagtttcctcaggtatccaactttaagattttggttttttttatttttaatttttgaaacaggatcttgctttgttgttgaggctgcagtgcagtggtgccatctcagctcactgcagtcttgacctcctgacctcaagcaatcttcccacctcagcctcccaagcagctgggactacaggttcacaccaccatgcctggctaatttttgagttttttgtagagacgaggtttcaccatgttgcccaggctggtcttgaactcttgagctcaagcgatccacctgcctcagctttccaaagtgctgggattacaagcatgagccaccgcacttggcctgcaactcttaagattttagtaacacaatacatacacaccattaagaggtagagagaagatataaaaaagcctcctgtttgcaaaataaaataaataaattagaagtacctgaagtaacttaaaggtaattatcttgagctactataagacaacttcagggtggatattaagggtgagcttaggccctgcttagaaacaagctttcaagaaatacacctttgtgacaggattttaagctctgaaaataggctcttaaaggagtcaagaagatgtaggaataaaaatgattttggactatgcctcccagactttagggaaataagaggaaaaaacttactcaaaatgattatcagtagactctggacaagtatatttttattttagaaggaggaaagaaagcatgtcaaaattaaaagaaacttgaaagaatatgtcaacaaaatgctacagttttaagaataaagctggacacgtggttcgtaactgtattcctagctactcagctactaggctgaggagggagaattgctggagcccaaatgtttgagaccaaacatatgtctgtacaacatattcaggtcttatctctgtctttctttctttcttttttttttcttttttgagacaggatatggctgtgttgcccaatctgcagtgcagtggcgcagtcttggctcactgcagcctttacctcctaggcttaagccatcctcccacctcagcctcctaagtggctgggactataggcacacgccaccatgcccagataatttttgtactttttgcagagacagtgttttgccatggtgcccaggctggtcttgaactcctgacctcaagtgatccaccaccttggcctcccaaagtactgggattacaggcgtgagccaccacacccatccaagataccgtgtctttagaaaaaacagttgttggaaacaaatagctgaaagtgaatgattgacacttaagatataaatatatttgagcatttacaggacaaagttaaaatcattagacagccgggcatggtggctcacccctgtaatcacagcactttgggagccccaagcgtgtagatcacctgaggtcaggagtttgagaccagcctggccaacatggtgaaactctgtctctactaaaaatacaaaaattagctgggcttggtggtgggtgcccgtaatcctcgctacttgggaggctgaggcaggagaatcacttgaacccaggaggcagaggttacagtgagccgagatcgtaccactgtactccagtctgggtgacaagagtgaaactccatctcaaaaataaatacataaataaaatcattagacaaagtctatttgtaaatcagaaatcattactgagaacttcaaaaaataaaatttcatatatgataaactaaaatactgaactctagtatargttaatgcaaaagttatatttttatactcttagaagggaatcgaagttttatttagttaatagtagacgataacagttatttaaaagatgcttatgtgtttggaaaataagtagagcagattaagttaattaaaaggaaatctaaagttactgcagaaactatatacgtgaaaaagaaaacaggataaatgtccactacatatttttttcctgaaatggaaaataatagtttattagatcaaatttaaaaacagaagagaaagaatccaagtatctggtttttgtggaagtccttaaaactaaagggcatgaacatagactgaaaatcggagggtgatcttaattttgtcatgcctgtgggactatcagcttttcatagatttcatactaaaacatcaagagaaacagtttctatataatgcctcaagatatatagatctgaggcattttcctgaaatggaaaataatagtttattagatcaaatttaaaaacagaagagaaagaatccaagtatctggtttttgtggaagtccttaaaactaaagggcatgaacatagactgaaaatcggagggtgatcttaattttgtcatgcctgtgggactatcagcttttcatagatttcatactaaaacatcaagagaaacagtttctatataatgcctcaagatatattaaacagtgaaaaattatcactactgaattcatatattcgaaacaccatagcaagaaagtatataaaaggaacactggcagaaatgtaagaatagattattattataacaaaatctaacagatgaagttttatattcttatctgtgaaattgctggatccaaagatatgctsatttaaattttttgtagattttaacttcctttcccatttatagtctcaccagcagttyatagaagtgcctattttcctgtgttgtgttagatggtgggtattatcagacttttgcatctttgccaaaagattttgcatctttggtatgatacgcttcctgaatcataccaaggcaaaactttgtactttgaataggcttttaagggacagtctaggcaatatattttctccatcttgcctctaaacataaaagaaattaatgacttaacattttgtcttctttcaggagagtaacatgattgtgagctgaattttaagtgattttcattttccatgtaggttgaagcttgtagattatataccaagttctctgcccgcccaagcagcatagaagctattccttttgttattgaaaaggtacagtatttaataacaagctctccaagtcaactgatttttctcagttgctcatacttactgttatttttattctcaaaagaatgagtgacaattaggaacatacccaggcagttaaaaatggcattgttagaaagctatttacattttagtgttcactgtcattacatttaattatagagaggtaaaataagttatttttggaaaaagtttctcctgtgttttagtttttaaaattacctttttaattatacaaaagtaaagagaaaggtttataatgaacccttgagtaccttttctcttgtgcttttgcaaaagattatttttgaaaattgggattaaaccaaaaccctctaagaccctccgttagttaattaatacagcatacaggttgattattccttacctgaaatgcttttcagaagtgtttctgactgcagattttttcagattttagaatatttgcatatatataatgagacatcttggggatgtgacccaagtctaaatatgaaattcatttatttttcatatgtaccttatacacatagtctgatgattatttttcccttggggatgctgaataaactgtttagacacctgcattttgactgtgagctgtcacatgaggtcagatatggaattttccacctgtatcatcttcttggcacacactaagtttcacattttggaagattttggatttttggattacagatactcaacctgtattataaattataatcagcatttatacgtgaaattacattktagctgtttcaaaaccaggagttacagaaaccatttgatacgtgtaacagcatcacagtttctgaaaacactgccagattactaagattaggaagcagatgaaagtacatattacagtgcaaaaacttggcaggcagagccgggtgaataatttcccaagctaaagtgtaatagaacatgaattttaaagccctaaatgaatactttcttatctctctcccttttaaacaaaaaatctttaaaaatgtagtcaatagaggacatttcgattttcatcataattatttttttctccacaaggatgtccagaaaaatgaaaagtgttcattttccagttttaaattatctttgagtagaatatgataagactgagattttacaaatcttttcttctacttgtaatgaacgtaggcagtgagaagcagtatctatggtcgtccaggtgcttgctatgttgacataccagcagattttgtgaaccttcaggtgaatgtgaattctataaagtgagtaatagttatgctggaattctttcttcaatgtacatgtattatcataatgcctacctttttagaagaatttacccagcagtttataagttaatttccatttgtcttaacttgattatttagtaattaaactgaatcctagccaaagggttaattttcttaattaaaatgatattagtagttatttatggatttaattactaaaccaaatacttagaacttcctgaactcctcgttgaaaatattcctccagtaaccataaatatacatccctcgttaatgtaatatgggtccttgagaatctttataatgtaagccaagaggttgggtgattattaaaaagtattaggactcaggataaaaaacatctagctgtctctctctgtggttaacaaatattccagtatagaggtttctatgatttctcatattctcatatttcttaaataaacactaagtgaaaagaagtacaaaaagcatttttcactggtatctaaatcatcccctgatagagataggtacttagggttaaagcatcatgggtactgtttagtgcgtttctgctgttgtggaccaaatggttctctagtgactacagagagtcagtgggtcttactgtatactctgtgtaccaaagagtgatttttttttcaatttgagactgagtctctccctgttgcccgggctggagtgcagtggcactatctcagctcactgcaacctctgcctcctgggttcaagcgattctcctgcctcagcctcccaagtagctgggattacaggcgcccgccaccatgcttggctaatttttgtatttttagtagagacagggttccatcatgttggccaggctggtctcgaactcctgaccttgtgatccaccaacctcggcctcacaaagtgctgggattacaggcatgagccaccgtgcccagccaggagtgattttttatttcggagagtcagataaaaaagacacttgtttattctgcctaatacctgaacatgataatcaaaatactactaaggggaggagggtaagctcaggtaagttaactctgtaagccttcttctaaattttatacagattgtccttttttattatatgtctaaatattttgacaatatgtctaaattttatacagtataatttatattaattagaataaatgaaatagcacaggacttggtgtccagaaatacttaactgtgacagtttgaatatttcttttactaatgcatattatgatactaaaatattaacacccagtgagtggaactgtagtggggctgggtgcggtggcttacacctgtaatctcagcactttgggaggccgaggtgggtggatcacctgaggtaggagtttgagaccaacctggccaacatagtgaaaccccatctctacgaaaaatacaaaaattagccaggcttggtggcatgtgcctgtagtcccagctactcaggaggctgaggcaggagaatcgcttgaacttgggagatggaggttgcagtgagccaagttcgcaccgctgcacttaagcctgggtgacagagtaagactctgtctccacaaaagaaaaaaaaaaagaaaagaaaaaaaaaaaagagaaatgtggtaaggtgtttaaaagcatggactttggagacagaatgactagttcagtcctgtctctgccacgtgccatctggagatcttggacaagttactttctctgagtctttttttcctcagtggtgaaatggagatgatgttaatacctaacctcattgttttgacagttaaatgagaataaatggcacatagcaaatattagattttattatgtttttactgttaggacagctactgctgctactacagtacaaagccattaactcagattttctgttaatgaattggccatttcactggttattagatgatatcagggaataactgttaatttactagatgtgataatgatgtgatagttgaatataggagaaggtccttattcacagctgcatggagaaatttttaagggtgaagtgtcttgatgcctatttactttaaaatagttcatgaaaaataaatgcatgtttatgtgtgtatatatgaaacaaatgtggtaaaatgatattaagttgttagatctacatgggggtgtatggagatttattgtactattttttctacctttctatatatttgaaattttcacaataaaaagatcatagttggcctcttttaattaatagggctctttttttccaggtacatggaacgctgcatgtcacctcctattagcatggcagaaacctctgctgtgtgcacggcggcttctgttattaggaatgccaaacaaccccttcttatcatcgggaaaggtagcatgaatagaactctaaatcttgctaggcttttgaaagtgccaattctttttacaaactttcattgtttattaatgtctattctaatgtttgagattggaataagaattctcttcatccatttagcattatttgttttgaaattacagacttattctttaatgcccagagatttcacccttttaaggaaatactacctatttaatttctttggtcttattagtgaaatgtgcttattctattataaaacattttggaaaaatcaagaaaagtagaagttccttcatctaaggtaactttttaatatttagtacatttctattcctttttacacatagattatgtactgtgctcatattatagaccgttttatattctaccttattcatttaagattataatatttttcatcttaaaagtatttcctaaatataatttttaatgtctcttcatgtgtacgttaacacttactttcctggcaaatatttaaatctttgccagtaactgtttagagtagctgtggcagacatgtttgtgcctaaagctttttctatatttaggatttaagtttcctagaaagaaaagttagagggtatgagtatttttaagacttttagtgtatattgtcatattgctttctctggaggtgttgtaccaaccaatttatactcctgtcagcaatttattatagtatccatttcgtgttctggaactgaggctgctgggatcacctatgaccatgctaatcaattatcaactgcttaggaactaaatctgtagaaactaaaaatagtttgatagtgtatgacaaaaaaattgaggtcagaactgagtggaatgtgttgtatgatgtattagctctgtgactttgggaaacaactgctttgagtctcagattgcttcacttgtaaaatagggatattaactacctcaataggatataattaaatagcaaaatatgtggaaagcactcagtggatgctagttttcattcttcttttaacaaacatttgatgaatgcttatgataaggcagggattacacaaaacattcatgagggatacagagaaatagtggttcctacctattggggaggggagatagacctggtaacaagtaagtgcggtatgttcttgcgtggtgtgtacagagaggttgaggtgggttttcaaggaaagcagcaacaatttgcttgtgtagatagtatggaaggactatccagaagagatgacacaacagctgcatcttgaaaaagcagacaatagttcaccaagtggacagagaccaaaggcaaagcaggaagagagaactgagtgtacaaagacattgagacaggaaggagaatacaagaaaactttctggattaaagaaaaggaactatttttcatcatacatgtatgagaagggattttaaggtagttttgtagagtggagcattatattgaatctgcaagtgcatgatactgtttactaggattcagtagagaattatatatacagaatatggaataatatactagccttgaaaaattataaaatagcaaaaaaaaatagtggtcttgatgacattagaaatggaacatttgaacaataaggtatttttaatgtcatcaagggaatagggcagagggttattcccaggcacataactgtgaaaacaaatgataacgtgggccgagtgtggtggctcacgcctgtaatcccaacactttgggaggccgaggtgggcggatcacctaaggtcaggagttcgagaccatcctggccaacatggtgaaaccctgtctctactgaaaatacaaaaattagctgggcgtggtggcaggcgcctgtaatcccagctacttgggaggctgaggcaggagaatcgcttgaacccgggaggtggaggttgcagtgaaccgagatcgcgccattgcgctccagcctgggtgacaagagtgagactttgcctcaacaacaacaacaaaaaagataatgtgtcccactggggttagctctgttacaatcacagaattacagagcctgtagaaagatctgcagatctttagaaacttaatgcaccttagaatttccatgcctggactaggaggccttgtgtagaggaggtttactggagatgaggaccaacatatgagggtagagagagcctttctctttcagggcaacatttttccctggccacctgggcctctcaatgaagatagtgtgttcagggacttgtagagtgtagtttagtaggaccatagcatagaatgggtaagtgacagtagcaagagctgtgagatgtgacttttgttttgggatagacatccttcaggataattgagagtgttattggtggaaaattagaactcttactttgttaagcattttaaaataccagcgataaaaactgtaatcacaatttgttttgagtttaagcccaggtataggcagaaggagagtatttgagaagatctacaagtaatttcttaggaggtcaaggaaggaggattgcttgagcccatgagttcaagaccagcataccagctgggcaatatagggagacctcgtctatacagaaaattttaaaagtagctgagtgcggtggtgatgtgtgtctgtagtcccagcaactcgggaagctgaggaggaaagattgcttgagccagggaggcagaggttacagtgagccaaaatcatgccactgcactccagcctgggtgatagagtgagtccctgtctcaaaatataaataagtaaaaagcaatttcacatgaacttttttaagggtcacagtgcctatagcttaactgaattgtccaatacatttgcatttcttataggtgctgcttacgctcatgcagaagagagtatcaagaaattggtggagcaatataaactgccatttttgcccacccctatggggaagggtgttgtccctgacaaccatccatactgtgtaggtgcagccagatccaggtgtgtggcattccagattttaaatacaatggcttggtagattttaggctaatttaaattattttgtgatcttcatctaggatggagttctgaaagaatcatggaattttaagcatacctgtttatttttggactatcttctggctttcatttcatatgagaaatctgcagtcattcaaattattgttgctctgtatgtaatatgttgtttttccatggctgttcccaagattttcctttgtcttttgttttcagcagtttaagtatgatgtgyctggaaatggtttattttaatttagccttttgggattctcaaatcttgaatatttaaatttatgtctttctctaaattgtctttctctaaatttggaaagttttcatcattctttcttcaaatattttttctatgtcaaccttcatccattttgatactgtctgacatgtccccgagtatctatctgttcatttctttttaatccttttattttatattttgcttctctgctgagatcttctatttttacatttcttttaagaatatttttctatacttcatgatggggtaaattataatagtttctgcagtctttgtttattaattccaacatctgagtcatctcagattggcatctattcattatcttttcttttgagagttgatcacatttttctggctctttttgtactgagtaattttggattgtatcctggatttttggatattgtatttggagattctgggtcatattaaaatcctctgtagaatgttgatttttgttggtttctcttagcaatcagtcaacgtgattagattagcttgactacaaatcgaagtgtgaacttaaccatatataagtagttccagggtcacttcagtttcagagcctttgctgtgctgttttgagtctgtctgcacatgtccagctcaggggtgagccccagacatgtactggttcatacccagaattagggatttattttctctcctctgtaggctccacacccccactctcccattctcagttgccccttttcctggctcttgctgctcccttatagtatcacataactaaagctgccctctgaacaagctgcagaagaaaaaaataatggggattgtccccatactcttcagaccacagggaccctttttcccaatccctcttgcctcaaagatgacgtttctcttggaatttcagctgcttgggagccaccaccatgcagctctgcagtaaggctgccctcagagcagagcttggagataaagaaaaaaagaaaaaaaatctgacatttccccccatactctccagcttgcagtggcccttttcctgatcctttggccaaaaaaacagtttctctgcaagttttcgctgcttgcagttctgcaactagggctgcctttgagtcaaagccaggagacaaaacacgggggagaaataccttggaaacttaccctctgtgtgggttgcttcttcaaacttagccaatcttggctggcattggaagtttcctctttttagatttttaaggcatgctttttaatatactataacttttttctttttaatttcttgaaatgtctttattatgaaatattctaactatacacacaggaagagagaataatgtaatgaacacttacataaccaccactcaactttatcagcatcaacataaaaaatatagacagatgaatctctaagtaaaaaaaggtttcatttggcagtaatgtataagaagtaggattgcatcagttattaacattgttttatattgctttagggtttttggtttttttttttttttttttttgagacggagtcttgctctgtcacccaggctggagtgcagtggcgcgatcttggttcactgcaagctctgtctcctgggttcacaccattctcctgcctcaccctccctagtagctgggactacaggcgcctgccaccacacccggctaattttttgtwtttttagtagagatggggtttcactgtgttagccaggatggtctccatctcctgattttgtgatccgcccgcctcagcctcccaaagtgctgggattacaggtgtgagccactgcgcccagccggtttttgggttttttttggagacagggtcttgctctgttgcctggactggagtgcagtggtgcaatcacacctgattgcaacctctgcctgctgggctaaagcaatcctcccacctcagcctcccaagtattaatagctggaactacaggtgtgtgccactacaacccagctaatttttgtattttttgtagaaacgaggtttcaccgtgttgcccatgctggtcttgatctcctgggctcaaggaatccacccttctaggcctcgcaaagtgctaggattacaggcatgagccaccatgcctggcctaaggtgttttttttttttctttttaggaagcaaaaaattatggattcatttgcagtcccctaaatatcttttttgatgccatttcttgcttccctttctgtagtttattactgtcatgtgtttggtgttcttcatattttcattcatgggttaaaattaattctgagggtttttgatttttattttgtagagacagggcctcactgtgttgcccaggctggactcagacccctaggctcaagtgatccttccaccttggcctcccaaagtgctgggattacaggtgtgagcacctggcttctgagggctttttaaatgtaatgtttgctgctagatctttaattgttcctcacttaatgctatcttaatatgttgtatttttatttatattactatatacagtaaccaagttaattcttacacttaatttttttatacttaggttgaaatgaagtttatcttcagtctagccagattttaagaggataatattaatgacattaccagtgtaaaaaaggttacragggactataaataattgaatcaatgatttcaagagttttagagtatcagtaagcaagtccgtcctgctgattgcagttatctgtttgttaaattgggtctcataggactaatacaatattaaagatgatttttgagtatgtactcaatttatgagtatataatttctgtgaaaaattgcatttatcactgaagaagacaaaagcagtagatacagatcctgtatggcaaaagacaggaaaaaggggaaacagataaaaagcagaaaaatgagaagtgaaaaacaaaacaaaacccacagcaattatgacaattatgataataaactctcctggaaaaaggcagacattcagattagattagattagtaataacagcaactgtatgtgttataagagccacatcggaaacgtaatgatacagctttaaaacaagactgggcaaagatatgtgaagtaaagaaaaagaaagcaagggtggttgtttacgaaagtagaaatcattaaaagattagaagttatattgacaaaagtattaaaatatataaaataaaacttagaaatctaattggtgtaatattttagaaagcaattctggaatatgaatcaatagtcttaaaaataacctgcttctagggaccaatgtgaagagtgcattaagacttaagtgtgaagatgtgcaagccagcactattaataacaaaatatctagcaattgagaaaacattaaataaattttggtatattgtgttcagcaaaatatgtagcctttaaaagttgtatttaagaacttaatgagaaaggaaacctttttttttttttttttttttttgagacagagtctcgctttgttactaggctggagtgcagtggtgtgatctcggctcagtgcagcctcgacctcccgagctcaagcaattcttctgcctcagcctcctgagtagctgggactacaggcacgcaccaccacaaccagctaatttttgtatttttagtagagatggggtttcactatgttggccagggtggtctccatctgttgacctcatgatccacctatctctgcctcccaaagtgttgggattacaggcatgagccaccgcaccaggccaggaaaacatttatgtaagcaaaagtatatgagacagccaggtgcagtggttcatgcctgtaatccaaacaatttgggaggccaaggtgggcgaatcacttgaaaccaggagttcgagactagcctgggcaagatggcaaaaccccatctctacaaaaaattaaaaattagtcaggtgcagtggcacgtgcctgtagtcccaactgctcaggaggctgaggtaggagggttgcttaagcctgagaggagaggatgcagtgagccatgactgcaccactgcattccagcccgggcaaaagagagagagaccctgtctcaaaacaaaataaaaaaagtgtatgagacagtattatagtatataagctcaactatgtaaaaatgtatttgcgtagaaaacaaaagtagatgaaaatttgccagtatattcataatagtttataagttgaaagtattatggggtgattttgttttttgccttatactttttctgttttttttctggattgcctacagtgtacttgtactaatttttctaattataaaaaagtaataaaagagtgtagatacagcttatggtaatgttttttaacttaatttatattttagataactatttatatagaatggttttataaattattttagcttgaaagatcaaatataccctagaagctgattctgaagtctgatgtaagctccaaatgatttagacttttcaaatacttcagagatgaattttcgaataattcaaataagaaatgtagttatactttcatatcaatttttttaatagggctttgcaatttgctgatgtaattgtgttatttggtgccagactaaattggattttacattttggactgcctccaagatatcagccagatgtgaagtttatccaggtacttagagaggaggaacttaaaatcagaaatgtctatgttcattattctycctatcagccgtaatcagctctgttatcttcttgattactattaaaaaaactgttctctttttacacaagtagaattttacaaattgtctaacataattataggtaccaaaataagcttccttttctagcctatgaaatatagtgtgccacttctagccagaaaacctttcaaaatcaagtttcaaatagtttagaaagcataatttgtcttttattcacaattcaagtatatttaaaggtagagaaaagagacttaagtaggatggtagactagaacaaaacatttggccttgttagggagtgaggttttctttcagatgccaaaactttcacccttccaatgggaatttctaaatgacactgttttacaagtcattaaacagcatccggaatgtattctgacctgtctttgatgattcttgtatcattatgacccaccttataagccattttctttactggtgtggaaagtactacctgcatagtggtgtgcaaacctttttgccctacacggattcgccccattttacttgatgtttttgcttggttgtttttgagacagcatcttggctctgtcacccaggcaggagtgcagtggcacgataatggctcacttcagtctcaacctctcgagcttaagtgatcctcctgcctcagcttcctgacatgctgggactatagacgcgtacaacaatgcctggctaattttaatttttttgtaaagacaaagtctcgccatgttgcccaggctggtctcagcaattctcctggcctcaagcaattctcctacctcagcctcccaaaatgccagattacagacttgagccactgtgcttgggttgcttgatgtttgatgagccagctacagttgcccttttcccagtctaccttttacttcttaaggagtcaacttctaattgctcctttcccagctgagccagttgagaactaaaactgcagacaaacaagacagagttacctggaagatgccaatacctcttgattgccctcttgattatagaatgagatacatcccctttggggtggctaaagtattcctccttgcagaagccatcatttgtccatggccatccagacatggaacttctgagtaaatggagaagtaatcgtgccatgttcttggaattgttctctaaatgtggttccctgggccaggcgcatcagcaccacctgcgaaacctgttagaaatgcacatttctggaccctacgccagacctattaaaataaaaaactctgaggtagactcctacagtttatggtttatcaagcccagaatataccaggtgactctgatatatgcttatatttgagaacccacactctagataggaattccaaatgtaattcaatagaacttactgattagatgcaaaactataattgatcaggtcaaatgcattccctatgggtataatgaagcaataccaaaattccatagagtagatttttaaatgagggaagataatgaggctctctatactagctatgatactaatatagttctatggacttttactttttttattaaggaacttctgaatatcaaatcttctttatcatgtgttctatatacacagttcatttattcaatcgtaattgccttcttacatatttttcagaataaacatgggttgttctttagccttgtctcttttttaggttgatatctgtgcagaagaattggggaataatgtaaagcccgctgttactttgctaggaaacatacatgctgtcactaagcaggtgagaacttttgttttagtttatgtggagtgcttattagggaatagtcaattcttgaaaatgttttaatcttgattcacttggtaacgggtctactattcatatctgttttaaacaaaatgtatgattgaaaactattcttaaatacaactttggaacttgttaagtccaacttctggtacatagctcatttttatgtaagttaagcatttttggaagatgattgaaaatgtaacatctttcagtaggcaaacagtaatatactaaatttactaatttattaaatagcatccagctatctgaaaaagtataccttccaaaggaactgaacttactgccaagaagtggcaagaatggcttagcactggaaaaatctaaaagtatttctttaggtaaaaaagagctttttactcttcaaactaatcagtgacttttccacaggttgttattatttgtacatagtttgtacatttcactgtgacaggagataaaatatagtcacatttatcacttgattttggatgatacaatttggtattgttgtcatgattacacaatataggatataatcttgaatcacatattaaatcactctggagcatttggtctgtaccataggagtccgtggttatttgttggttttcctgcaagagttctgtggaaggagtggttttccttccagtgtcaaagaccgaggagggtttcagagcccttgcttgaggtgtggaggaggtagcactccagtctgtcctatgggcatcccagcatctggcagaaacccacactgaccaaacaaaagccttccatgttacccattgattttctatcaggtgttagcatctggcagacacccacactgaccaaacaaaagccttccatgtttcccattgattctatcaggtgtttactaactggaagaaaaaaagagtctgagtaatgtgaagggtagtatggccgtatagtcttctttaagaagatacttccgtgttaatatgatttaaatttatttttaaaaagcagactgggcatggtggctcatccctataatcccagcactttgggaggccgagacaggtagatcacctgaggtcaggagttcgagaccagcctggccaacatggtgaaacttcgtctctactaaaaatacaaaaattagctgagcatggtggcaggcacctgtactcccagctactcaggaggttgaggcagaagaattgcttgaacctgggagacagaggttgcagtgagctgagattgcgccactgcactccagcctgggtgacagaacgagacttcgtctcaaaaaaaaaaaaaaaaaaaaaaaaaaaagaaaaaaaaggcaaagaaaaagtttatgtgtttgtgtgtgtgtgtttttttttttttaagcttttagaggaacttgataaaacaccatggcagtatcctccagagagcaagtggtggaaaactctgagagaaaaaatgaagagcaatgaagctgcatccaaggtaaaatcggacctactgacgctcaataacaggtcaggctcatgattcagttacttctgccgtaatgtgacatgtgcattcctaaaaatcaccttgatgtgcaaaattgtgcagtgaaaaccccaggtctcatggaaaaagggatttagtggcacaactctcaaaaactttgtgtaacataaaaataagataagaacctaatgttttaaacgtgttaaatggttaagaaatatatgccaatgaatatagcattttaccttgaaaaagacctgaagtttctgaaaggttgtagcttgtgagttactgtgagctggtggaaggaaggtgattggacattggatagaaagtcataatagtggaagtggatgggtgtgccttcagtttgatggtggcatagaacatcacaattaaacacctgtaatcctagtgctttaggaggccaaggcagtaagatcaattgaggcctggagtttgagaccaacctgggcatagcaagaccttgtctctacaaaaaaaaaaagaaaagccagatgtggtggcacacacctgttgtcttgtctcctcaggaggctgaggttggaggattgcttgactctaggagttgaggtggcagtgcagtagtagatcatgccactgcactcaagcctgggtgacagagtgagaacctgtctctaaaagaaaaacaaattaactattaagtggtttttttttttttgaatccttaaatcttgggttgagatgtttttctgcttttaagatataggtccttcagggcgtgctattataatagctgtttcataaaaattgaaattttgatccaatgtatagccttcttttttatttaacatttttatcactgctggaaatttttttgcagcgctctcatttgcactcttggctttgcctggtagctaaggttttggaaattgtagtgatgatactagaaaccatcaaactgtctactactagcactaaaatgagtcagtgctgcaggatttggcgatttctagtaaagtgtgtgtgtgtgtgtgtgcatgtgtgtgtattgtgctttccctatgtgagaaaggtggtttttttttattgttttgtgtattcatatgtatctttgttcagctgggtgcagttttctgtgtcttatgcgtgattccaccagtgtttcttactggtggaatcacgcataagcaaatataaaatttgagttatgctcacttggttccctaatatatcaattgtcttagaataaattcacattttcgcatcaaacattatagcagaattgattgtacatgaatctgtcttacattggaattttttttttttttggggacagagtctcactctgtcgccaggctagagggctggagtgcaatggcgtgatcttggctcactgcaacctctgcctcgcaggtttaagcaattctcctgcatcagcctcccaagtagctgggactacagacgtgtgccaccacgcccagctaatttttgtatttttggtagagatggagtttcaccatgttggccaggatggtcttgatctcttgacctcgtgatccgcccgccttggcctcccaaagtgctgggattacaggcatgagccaccgtgcctggcctacattagaattttaatcaatgactgtttctatctggagccagtctcaatttttttttttttttgagatggagtttcactcttgttgcccaggctggagtgcagtggcgcgatctcagctcactgcaacctctgccttccagtttcaagcaattctcctgcctcagcctcccgagtagctgggattacaggtagctggcaccatgcctggctactttttttttttttcttttttgagatggagtcttgcttttgttgcccaggctggagtgcaatgacacgagcttggctcaccgcaacctccgcctcctgggttcatgcaattctcctgcctcagcatcccgagtagctggattacaggcatgtgccaccatgcctgactaattttgtatttttaatagagacagagcttctccatgttggtcaggctggtctcgaactcccgacctcaggtgacctgcccacctcggcctcccaaagtgctgggattacaggcgtgagccaccgcacccagccaatttttgtattttttttagtagagacaggatttcaccatgttggccaggatgatctcgaactcctaacctcgtgatccgcccgccttggcctcccaaagtgctgggattacaggcgtgagctaccatgcctggccaccagtctcaattttatttcctgagtcatatcatgactaatcttttctttcgcataggaacgatgttggtttaagatagaagggacttgcttctcttctttagtgcaggagtataggagggtccctctttaccttgtgtataatctccagcagaacaaagtagcataggtgaagaggcagtcctggggccagatgggactgttgctgctaaagctctctatggctttttctcagccctgaaaggcatgtggctagacaaaggcgtttaccttgctgtttttctctccattcagggactctttagaatagtgggggtaagatagctcctttaactcttaagtgtgttgggggaaaaactagattttcagattgtattctaaaattgtgacattttaagtttagggtcatagttcagatgaaaatattctggaataaatttcactttttctaaggcaccgttttcctaagagtgctcaaataagaacgtttagttttatgtaacccagtgcttctcagctgtctttactgtaggacttctcaatgtctttaatacactcctgtgcattgcagatctccaagaggcgggatattcccgagcttatttaattgtgttcccaactgggactgtggtacacatgtcccccagggctgttcacaggtcagccaacttctcagagtggccattttatagccatttggaaaccttgtagcttgtagttgttgcgtatttccaaataagtttgatagcatcttattaacattggttattttcattgtatcccaatttaatttgattatattcccatctacttttcaggaactagcttctaaaaaatccctrcctatgaattattacacagtattctaccatgttcaagaacaactacctagagactgtttcgtggtaagtgaaggagcaaatactatggacattggacggactgtgcttcagaactaccttcctcgtcacaggtaagacttctaaagaagaaagaagtcgtaattcattataatgtgtttaatatgaaactgtaatagtgcagattaagaagacgtttgagaattaatacatgtttagtatgtaaggacatatttcataaaagtatccttaggtgaggttttgtagagtttttatgcttgatgtgttcttggtatcatgataattgtttacttagtattctaggaatatgtttatagtcttccaagcaaacatgggtggcttttttctatccttgacaaattagttcctagcagtctaaagattttatattgaagaaagagaatgtttttatggttcttcatttttccatcaaccatgtaaatatgactagaaggtttgtgccaatcccatcctctatgacatgccccagagggtttcattttaactttgttctccaacaggcttgatgctggtactttcggaacaatgggagttggtttgggatttgctattgcagctgccgtggtggctaaagatagaagccctgggcartggatcatctgtgtggaaggagacagtgcatttgggttttctggcatggaggtagaaaccatctgcaggtaaaacatcatcctgaatcagagcatttgattctctagaatatgaaaaatgacacacaagacccagtcacctgacaaatacttatgaagcgttcaccaggtgccctgtgcacagcactgtgttctgtcctgaggatgctagtggcagtaacccrcggtytttctcttccagaaccgtatctttctggcctcctcactgtatggtaaaaacctgtaaaactgtggggagtggttttgaggtcactgagaaaaaaatgttggggactgaaagaagcttgtttcctgtgggaaatagcaagtgtggtggttgaagagcatggcttctgccagtcatggtggctcacacctgtaatcccagccctttgggaggccaaggcaggcagatcactttaggtcaggagttcaagaccagcctggccaaaatggtgaaatcccatctctactaaatatacaaaaaaaaaaaaaaattagccagacgcagtgatgcatgcctgtaatcccagctactcgggaggctgaagcagaagagttgcttgaactgggaagtggaggttgcagtgagctgaaatcgcaccactgcactctagcctgggtgacagagcgagactccatctcaaaaaaaaaaaaaaaaaaaaaaggcagcatggcttgtgggacaaatggcctggatttaaatactggttctatcaagtcagagccatgtgactttaagtcacttaaccaaggctgggcgtggtagctcatgcccgtaatcccaacactttgggtggctgaggtgggcagatcacctgaggtcaggagttagagaccagtctggccagcatggtaaaaccccatctctactaaaaatacaaaaaatagccagatgtggtggtgcatgcctatagtcccagctatttgggaggctgaaggcaggagaatcgcttgaacctgggaggtgtaggttgcagtgagccaagatcgcaccactgcactctagcctgggcgacagagcaagactccatcgcaaaaaaaaaaaaaaaaaaaaagtcacttaaccaagcctcagtctcctctcttctaaagcaggaatagtatcctttaggcagaaattccttgaaaaaaaaaaagtaggaatagtaatagttcctaccttagaaagatgattatgaaaaacaaatgaggtaatccaagcagtttttttttttcaagatggggtcttgctttgtcacccagactggagtggaatggcgcaactgcggctcaccgcagcgtcaaccacccaagttcaacggatcctgcctccttagccttctgagtagctgggatcacaggcatgcaccaccatgcccagctaattttttgtatttttttgtagagacagggctttgccatattggccacactggtctcaaatttctaagctcaagcaatccacccgccttggcctctctaagtgctagaattacaggtgtgagccaccatgcttggccccagctaaattctgaggtgatgctcagtgaacatgagtcatttggatcatgtgtgtagttatgagaattcatggagaaactcatgaattgtagatcctcactatagaaggatgggggttttatttttccagctatatttaaactgtagtaaaaccattctattcttagccagggctcttattagggcttttgtgaatcatgttttggggttggcaaagctttggtagataaaacgttcaagatttgggaaggtatagttgtccctctatatcagtgggggattggttccaggaccttcctcaaataccaaaatccaaggatgctcaagtaagtccctgatataaaattgtgcagtatttgcaaataacctatgcataccccccatatatttttaatgatgtctagattactttaaaatactgaatacaatatgaatgctatataaataattgttgtgctgtattgcttagggaataatgacaagaacaaagtctgtgcatgttgagtacagatccaattttttttcccaaatatttttgacccgcaattggttaaatccacggatgcagaactcagataatgaggtctgactgtatgtgtctgttagagtgtctttattgacaaccaagtgatatacacaaaaaagatgacttatggggaagttagccttttagtggataatgactccttttgagcatggagagcaaataattaccacagtcctgttatttaacagtatgcagtttagttttgtttttaccacttgcccttggaaattatgttagaaaataaaacctacattcttttcagtcaataacatttaatcaaccttttcttttttgtctttgctatactgtttagcacactgttaaatactccttttctgtactgactacaccatgtaatgtgtttctgattatgtgtgtggtagtttgagtgcagattgtgtgtgctagttacttgtgtatcttccacagcatctagcaagagctgggtgtctgtggggagctcagtaaatagaaaggtacgtttcaaacactgttcctaggaaccaactagaagtggtactttagagagtattaaatagggaaggtgttcttcatatacyatctagacttatgaaaacccagattcagaaaagctcagtgatttgtctgaggttcatagctaatagctaaaggactatcaactttttttttttttttctgagatggagtcttgctctgttacccaggctggagtgcagtggtgtgatctctgctcactgcaacctccgcctcccgggttcaagcgattcttctgcctcagcctcccgagtagctgggactacaggcacatgccaccatgcacagctaatttttgtatttttagtagagacggggtttcaccatattggccaggcttgtcttgaactcctgaccttgtgatccgcccacctcagcctcccaaagtgctgggattacaggcatgagccatcatgcccagccaggactaacaactcttaatcttgcattctttctgcctttccatgatgtttctgttaattatttgatattctttcttaggataataaatgcttgatttttagtcttcctctaataatacaaaaagcttataggaaactattcatttttaagttaaagtttcaacccaaagaaaagaaattactttaaaatgaagaatgatttccttcatattttactctcactttaggtacaacttgccaatcatactgttggtagtgaataacaatggaatttaccaaggttttgatacagatacttggaaagaaatgttaaaatttcaagatgctactgcagtgtaagtaaccaagaccaatgtctgtttactttctctttcccgttttaatctctttttaaaaagtcttctatattggcagtaatgtgcctacatggtatgagtattgtccgtttcgattgtcagcccttctaaagagaaggaatcctgtcttagttcctctttgcacaaatatccatgattaggtgcttcagtaaataatcagggagccactgaagactcagataaatgagtgtgatgtctgagccttgttaatgaaaaggcttattgcaaaatgctccctggactgggagcaatagtaggactactgattcctgttacaccatttggaaatgtggatgtttacgtattatttgtgttccagaggtctaccttcctttcaccacttagctaaatcttgatcatctgatggcagagccagattaagacagtattgtagctggccgtagaatgtgagacagatatgaatttgtgagccagccttggggtggaacagggtatgggtgtgtctatttatgcctcactaactttatttgttgttttcttattatttgttgttttgcagtaatctttttttttcatgtttttcttctggattcataatagttgataatgtagcctgtgctgtctagtatagtagccactaggcatgctgcaactgttgcaaattagatttaaattacttcaaattaaatgaaattaaaaatttagttcctcagtttagtcacatttcaagtgctcacagcaacaggtagatagtggctactgtcttggatggcacaggtttaaaacatttctatcatcacagaaagttctactggacattgctatatagacaattataaatataggaaaaactcagtgtactggcatctcagcttaagtgttgaagataaaagtatgcctttgagttcagctgaaatttttttaatgaagtatttcagagaatgactttttttctacaaggtttaagatttaaatttcattgactcatgaccttgtttttcagggtccctccaatgtgtttgctgccaaattcacattatgagcaagtcatgactgcatttggaggcaaagggtattttgtacaaacaccagaagaactccaaaaatccctgaggcagagcctagcagacacaactaaaccttctcttatcaacatcatgattgagccacaagccacacggaaggcccaggtaaatacagttgctaagcagaaagcaagaaatgcatctgcttcccctatccccctccaaaaagtatctaccaaacagaacaccctctatcatccacagaggtctttctaaaccatttctgagtttggcagtttcatgtacttgttcagtgaatattgagatatgtgttaggtgctacgaatagcatggtgagccaaaccaggctcggtcctcacgacttcatggagcttttgtagtctggtaggggagagggacagtctggtaacctcacaactgaacacactatgacagagtgaagcaattacttggaaggaaaggaatccagttctgagcaaacgtaccacaaaggaatcagatttatgttggggttacagggaaggcttctcagaggaggtgattcttaaacggagatcagaaggataagcagagactaactcggcaaaggggagagggaagagatgtgcaacaggctctgtagcaagaggaaagaggaagcatggcaagtctgaggaagagggagatgcaactgtaatacaaggatttgtgcaggtacattcaaaattagttactttgacctccagggtgaaactgcagtgttgattacagcagtaaagtaaatgacaaagttcatagcatgagcctctcctatcccagagtaagttgcatttcatacttaattttctactgccatcctggttctgccacttgccgcctcatataacctgtcttccgtgcgaacagtttgtgtatcagccactcttatcagagcagatatttttttcaagtactttctgtcttggttcttatatatatggaatctctttcttttgtgaacaaagcggtggatgaatgggtaaacagatacctggataatcaatgaaatataaattaactaatttagacactaaaatatatagaattctattgaaattctatttgtgtaaaaacagatttcaatgactttggcatttacttcctagcagagagaggagatactcaagaaacctagtgatgaggaagatgaatgcagaaaaactagcctagtaagctgaagggcagggggcattagcagggatttctgtggagcaagcaggcagactgttttaagggagggtctgccactttcagaatctatctgtactcctgtgggtttgtggattgccttttctttttttaagttctatttaaaatgatttatgctagtcagacactcaatagacaggctttttcatctcatgccactttatggatttataactaggtttatactttccagtgactgggatgttagtttggtaaccaaaaacaccctcctccgggcatcaggccatcagagccctggggaaactaaagccactgtaagaagcttaatgaatacatataatcttgatggctgggcacggtaatcccagccctttgggatgccaaggtgggcggatcacttgaggctgagagtttgagacctgcctggccaacatggtgaaacctgtctctactaaaaatacaaaaattaactgggcatggtggtgcatgtcagtaatccctgctactcaggaggtggaggcacgagaatcacttgaacccaggaggtggaggttgcagtgagctaagattgtgccactgcactccaatctgggtgacagtgagactgtctctcaaaataataataatcatcatcatcatcttgagacctatgttaatcacagaaaagccctaacaaattctgtcatctctgctagtgagttcatgctattgatttgcttccaatgatctgttctacagtttctctatgaattttgtttggatattgctggatattgctggagaaatatgagttctcgtcttcctcttttacaattctatgaggattatttttatatttcttacatttatcactttgaaattatttattttcattccagtggaatttacatacattatactttccaaactgttgatttttgtctttctgtccgtctgccatttatcattgattctcagtgtaggctggccacttcctgcctcaatatgggaatgcctatatctgtgcctgtgtccaggccatatgtataggatggtgttagttctggaaaagacttccgtgcacagttcttcctactcatgtcctcagacctgggagctcagccctctgtgggcctccttcatctcccttctccttctgagtgtacttctggttcttttagactatagtttttgtgctctgattactgtgaatggaagaggacccagaatgccattttaggttgttttataggacacagcaggaagattcactaataggtttttaggtcctttttgggaaaagcaccagaacaaagacaaacctcattttgccaccattgtgtaggacttttaggttttagaacaagtgaaacaatgaggatataatttgagacaatcatttcttttgactgaatgtttgttgtcttctttttctaggattttcattggctgacccgctctaatatgtaaataaagacgccagttggtggtcttgagttttctctttcttgcaagatgaaattttattttccacagcaaaattactctactgttaaaattgtgcaaaataaaataaacatttaaaatgacattttacagtaaaggaattgattaaaaacagaaaaagttagaaaaagtaacagaaaaagttattctgccacaaaactacttacagatgaatggagagcttttattacataatagcattgtaactgcctaaatgttgatttacatatcaatattattttactgctatagcttggatgtttgttccccaaaacctcatgtagaaatttgatccccagtggtggaggtagggcctaatgggaggtgtttgcgtcatggggatggatccctcatgaaatgtttgatgagttctcagggtaatgagctctccctctattagttaccactagagctggttgttaaaaggaacctagtggccaggcacagtgactcatgcctgtaataccagaattttgggaggttgaggtgggcagatcacctgaagtcgggagttcgagaccagcctgaccaacatggagaaaccccatctctactgaaaatacagaattagctgggcatggtgatacatgcctgtagtcccagctactcaggaggctggggcaggagaatcgcttgaacccaagaggtggaggttgtggtgagccgagattgcaccactgcactccagcctgggcaacaagagcaaaactccgtctcaaaaaaaaaacaaaaacaaaaagggaatctagcaccccgcagggaacctagcaccttccctgcctctctcctgctttctctctccctgtgtggactctgcacacactggctccccccatgagtggaggcagcctgagccctcatcagatgcccagtcttgaaccttccagctatcagaactgtgagctaaataaacctctttttaaaacaagttacttagctttagtaaatattcctttatagcaacactaaacagactaaggcagttacctgtcttttaaaaattgaagaaaaaagctgtaagaattgtctaatgtagagacatgttcagttagttgagatacataggctctttctgcttcctattttattttttgaccactcagtacctaagtgtcaccagtatttaatggggctggtcctatattttatgaggttgttttttttttttcctggaaggaatttactgagccaaaggcaaagtcacatcacacccaaactaataatttcaggatatatttggactagcgacctaagttcaagcataccacatttagaccaacagagttaaccttaatctataaagaactcagactagggacagtggctcacacctgtaatcccagcactttgggaggctgaggcgggtggatcacttgagatcaggagttcaagactagcctggccaacatggtgaaaccctgtctctactaaaaataaaaaagttagccgggcatggtggcacactcctgtaatcccagttactcaggaagctgaggctcgagaatcgcttgaacctgggaggcagaggttgcaatgagccgagatcccgccactgttcttgagcctgggcaacagacttagtgtgactccctttcaaaaataaaaaaataaaaatataaagaactcttatatataagaaaaatattaaggtgccagtagaaaaatgggcaaagggcgtgaatgtacaattcacagaaaaaatataaatgctcagtaaaagcatgaatatgaatatgtaagttatactgaaaatccctttttttttcctggcctatccacttggcaaagaactttctaaattaatctgaattttggtgaagtggaagtgaaaatggagactcctatgctgctgatggaagttgaagttggtacatttctgtagagtaattctagcattgcaggtatttggagtcttaaaaatgttcataccgcgtaagttttgaccccgtgagctttttttttttttttttcaagacagggtcttgctctgttgctcaggctagagtgcaatgacatgatcacggctcactgcatctttgacgtccttggactcaagtgatctctccatctcagtctcccgagttgctaggactacaagcgcataccaccatgcctggctactcttttattttatttttgtagagacagggtctcactatgttgcctaggttggtcccaaactcgtgggctcacgctatcctcttgcctctgcctcccagagtgctgggaatataggcatgagccactgtgccaggccccattgagcttatttgggaatatatcctgaagaaataataaaatatttggtcaaatatttatataaaaggccatgtagcgtagttttatttaggaacaattccaatgtttaatagtaggacattggttacataagtgatggtctatcatcataaaataaaaattgtattatttattaattgaaaaataatcacaatacaacgtgtgaaaagggcaagctacaaaatgaaatggagtgaagtaaggaaataaccataatcatgcatacctgcttgcttacagaacagagatgggcacaaaataaactaaaattgtaatacaacttggtagatggaattgtaggcaatttttatttaattttttcctttatagaattttaaaaataattatgtaatttttattatcagaagcaggcactattttaaaagaatatttgaaatggaaaagcatcacttattttcagggtcattcgtgttttttatctgcagttttacataaattgaagcataggactttatatcaaaattcagcttgtttgcaccacccatatcagacttgtctacactggctagtttaggcacaagtgaccaccatgaagtggtagacttcagttttaggggtgaacccagaagatactgtgacttggcccctgacaggctcgtggaagcagcctcatttctcaggtattcttatgtcctgcacaggaggaagagactatgaaaaggagcattcagactggatagttcatgtaacctcatcagtctcctcccactctgcctccggacacacctctggcagccgaatgcaatataagattttgccattaggtggtgtagagggcttgattaatatttgtaagttgaactgtgtaaatttgttactaaatactagataaaatttggggaaaatgcccctttcctaatcatactctcagagaaaaaaaaaatgctgacaggttattagactgtccagcagaggtcagtctaagtgtataaagaccacattagtccaggggcactaattgacagagtccattgactgcttatttagtaaaaatgatcttgaaattaatctcctcatagaagattttccttagaaggataaaatattgaaaatacccctctaaaatgaatctattggttgatagatatttgatagaatattttgtagcccctagtttaataatgaatttcttatgtgatcctattatatgtgttaataatatccaattgcctcataaaaactgagcttcgaaagattatggcagttttcttaatttagaaaaacccagaatccagggttgaggagatgaatgggaaatgagttttattattattatcattattttgagacagcgtattcttatgttgcccaggctggagtacagtggcacagtcatagcttactgcagcctcgaactcccgggctcaaatacttctcccacctcaccctcccaagtagctaggactacaggtacatgccaccacaactggctaatttttaaagttttttgtagagatgggtctcacactgttgccgaggctggtctcaaactcctgggctcaagctgtcctcccacttcaacctcccaaagtgaaatggtttcttaggttactttctctactaatagtctttccagaaatctttcatatttcatggggttatttggggattcagaaagccacccagaagctcctagcccaatgcctggcatataaaaggcactcaataagtgccactgcattttaggaaggtgagaatttagagaagagaacaccacttggaatccctgcttagcggtgaatgtgaaagtagacatagtggtttcccttttctcaagtgactgggtcttacttcaagtaaattagacatttcctggagatcaggggttgtgtattttcacttctctatatagccatagtactctttaagagttcactaactacgtgttaaatgggaactcatgatggttaacaatagctcagtggagatgttctacagttatttcatacatgctactttgaagtagctcagcttattttgtgaagtgagtgtatgtgccatagggaaaaaaagtctcaaatccattgcaagaaaatggtaggacttttggacactgaaggaaaaagaaaatgaaatggaaaattatatttaatcccaaattgtttttgttcctttattttcaagacagttaggcagtggggaagcagtgcatgccaatgaagaagcagcccatgactctgaaataatgcaaatgtaaagtgattacagtagaacatcatatgactgttttaagaaagtaggaaaccaggctgggcgcggtggctcacgcctgtaatcccaacactttgggaggccgaggcgggcggatcacaaggtcaggagatcgagaccatcctgactaacacggtggaaccccgtctctactaaaaatacaaaaaattagccgggcgtagtggcgggcgcctgtagtcccagctacttgggaggctgaggcaggagaatggcgtgaacccaggaggcggagcttgcagtgagccaagccattgcactccagcctgggtgacagagtgagactctgcctcaaaaaaaaaaaaaaaaaaaaaaaagaagaaagaaagtaggaaaccagttacattccagatgggaattatgactgagaaaccccaagaaaactgactactgactattacagagagtaaaatacagatgaagtgtaaattatctggtgttttctggttgcatttgctgctgctaatctgaataaatggaataatgtggaaagaagaaattgacaatcctataaactttactctgggaagagatggagataaaagtgtatgccttggattctgatctgactggcaggattgcctctggcttttgctagattatcttgaatcttccctcccttccagggccctctcttttagaagaggcgctagctggccagtgaacccatggcacatccaggttgtatggtcactcttccatttagggagctatgaaaggaacacatagaaactcctggatctcctgtttcaaagtttgaaggaaccactttaaattttgattcagggcctagaaatacctgcagagatggcaagatccatgattttccttctatgcagtggttgctggagcctgctctgtggagtggctaatctacagccatgtagttcactcccaaggctcacttccctcgtccctccatatttgcaggaattgcctccccattgcacagtcaagttagactcaagaagtcagacctggtttcacctcagccccagctttgcttgtgctgtttctgctgtgatgctctgtacacacccacccatttttgccgtgtggagttggctatatgcttcaaggcccagctcaacagtccactcttccatgaagccttcctttctctgaatgttcctgccgcacctggggtgcacccctgtcacaaactcagtgttcacggtgagctaaattcccatctccctcaccatcttgttttgggaaggaagtaatccaggaagggtttatatcacaaaagctatagcagacaattttaaacaaggatgcagggtgaatggatgaactaccaaggatcagaggtccaccctgatgcctgggtattaagtaagcccagcggttcttagagcaatgctggggatggggggctggtgatcgtgaggccctaaaatgactgaagttttatttccaccctggcaaaatgaaggtcaaaattaaaattagatagaattactgaaaataaatatttctttcacactgttgtggactgagatttatatccactacattcatcaaaccatttaatggttcgtagtgccat

SEQ ID NO: 94066 - DNA, 166020 bp, Homo sapiens
  misc_feature (1)...(166020): n = A,T,C or G
atccactcccccttttctggtgtctgtagctgattttgatgagatccccctgggcccccacccttgtatgtggtagtgatgggactgccaatcaggccccccaaccttcttctggccgggaggtaagagtgagcccctgcagtagagtcctactggcctctctcccgggagtatctgaagcagagtgacaccgcttcattgtggcagtggtgcccaaaactaaataatctgttatttcccactcttgacgctgatggttccagtacttgcccaggtctggttgttcagcatttcctttgattttgtaaattgcctacactcttcccaaccttctcttcccctctgcattttggaattcaattagccagagtcaaggaaccctgacaggcacagcctttatcacactgcctggcatacagattctggtccttggattgtcttaaagtcagggagggcagagcgtgcatccctgtgcccaccagtaccttggtgttcggtaggttgaagagtcgaaagcaataaatggtggcccagtaacacaaacccaaagctccacagtttgactaagatggattggaaacccatgagagaccatataggctgaagacaaaaatcggatcaagaaatatttaggtacggatataggttcataaagggtctgactccaatgctgagcatctgtggaacaagcttatgtttttattcaggtcatccatgctgggtaccatgcttttcataaagaaaaatgcaggggccaggcacagtggttcacacctataatctctgcactttgggaggctgaggcgagaggatacttgagcccaggagtttgaggctgcagtgagctatgagtcatgccactgcactccagtctgggtcatagtacaagaccctgtctcagaaaggaaggaaggaaggaaggaagaaaggaaggaaggaaggaagggaggaagggaagggaacagaaaataaaaatgcaggcgtagaaccaccatgaatttaaccccgtgtggtgtttctgacactggtatacttgttgcggtatctagcctcaaaaaatggccaygcctaatcaaccatgctgcttagtgctcatgcccctgtgtcatccactcccacactgagcctggcctggccctgggtgaccagtacaacatggctgaagtgactctgtgacttccaaagctaaatcacaggaagccctgcagcctccactttgttccctgggaacacttgccctggagacatttcctctttgactcttgctgtcatgctgtgagatacacaagccacatgcagaggccatgtgtaggactccagaaaatagcccacatcaactgacagccatcttccaggttcctagggccacccagacctcctgaatctaaacctgttttaaaaagccttccaggtgattctaatgcacattaaagtttgagaagcatttctttctttctttctttctttctttctttctttctttctttctttctttctttctttctttctttctttctttctctctctctctccctctctctctctctctctctctctctctctttctttctttgagacagagtctcgctctgttgcccaggctggagcgcagtggcgcaatcttggctcactgcaacctctgcctcccaggttgaagtgattctcctgcctcaacctcccgagtagctgggacaataggcctgtgccgccacgcccagctaatttttacatttttagtagagacgatgtttccctgtgttggccagactggtctcgaactcctgacctcaggtaatccgcccgccttggcctcccaaggtgtgagccactgtgcccggcctgagaagcatttctgttattaatggtgctctgatttttttttccactatagcccatctcaataaaacagaagattctttggctcatatggccctcacttggtctggtctcactttccagggagatggaatttgataataagaaaggtcttggtgactggtgggcacctgctacttttgcctataccatgttgcttccttattcctctttcacagtgccctgcttttttgctttcttttctctctctttttttttttttagagaagtcttgctatattgcctaggctaggatacagtggccattcacagttgcagttgcagtcatgtacactatagcctccaactcctaggttcaagtgatcttcttttttttttttgagatggagtctcgctctgtcgcccaggctggagtgcagtggcgtgatcttggctcagtgcaacctccgcctcccgggttcaagcgattctcctgcctcagactcctgagcagctgggattacaggcgtgtgccaccacgcctgactaatttttgtatttttagtggagatgggggtttcaccatgttggtcaggctggtcttgatcttctgacctcgtgatccacccgcctcagcctcccaaagtgctgggattacaggcgtgagccaccacgcccagcttcaagtgatcttcttgccccagcctttggagtagctgggacttcacgtatgtgctgccacgtccggctaatgcgccctgctttttgctggagggcttgtcctctccctttccttctggtcatggtgggactataggcaagtgtcccacctccagccctggtaagggcaccagtcaggctggaacatcacagtatcacttccattggaacacagacaatgggggacactgacccaagagagccaatcagagttctttctggaacagccagaccaagttgaggaaaaggatcctcaccaggtggtgtaccggagactctgtgagcccagagctgataaccagccatgcctgacgctgtccattgctagactatctggttgtgcgagccaataaattcctttaaattgaagccatttgaaatttggcttctgtcactggcagccgaagagtcctgactatgacaagcaaatctgaaaggatgaggcatatgtctagtatagcaatagatggttgatagattcatagttgagctgaaattcagacatgagttgtagatttgctataacaggctgaaagctcagtcagtggtgtatgcttcctggcacactatggtgttcatgtgccacctggctagctctggcccaaaagatgcaaatgagagtccattggatcagggttctgggaaagcttttgctttctgggtataaagggtcagactcagctgtcacatgcccttttttcttttctttcccctccttcctgcctgaaatgcagtcatgatgcctcgggtggagcaggaatcttgctagcgtgaggagcaggccacatgctgagagagtggtggagcagaaagcaggaggcagcctgatggtcctgggagctgttgtcccatccaggatttcctccctcttggcttcttgatatatgaggaaaagtaaaatctgatttggttgggcaactatggctgggtttctgttacatgtagccaaatgcaaccctaacatagacaatgccctacactcattgcatcccaagaaaagcctggaattttcagatcaagttttagcctatcagtggcccacacttagagacttgccacatttttcaggtgagggacctggatccctgtatttgtttcttgtcactactgcaagaaattaccatatacttagtggcttaaaacaacagatttattattatagttctggaggtaagaagtcctaaacttgaagtaccagcagggctgcattccttctggaggctctaggggagaatccaattctttgccttttttagcttccagaggccacctgcatttcttggctcatggcccctttgtattcaaggccagtagcacggtatcttcacacctctctctctgacctctgcttctgctgtcacacctccttctctgactctgactctctcctgcttccctctttcccttatgaggactcatgtcattatactgggcccacctggaccatccaggataatctccctacaggagcataggctctgcaagatctaagtcccttttgccatgtcaggtaatatatttagaggttgtggggattgggaggtggacatctcaagggggcactattctgtctactgtagtcgtagaaatgaaaagggacttgcccaagagtacccacagagctgactgaaaagaaacaactatgggtaggctcacaccactggcagaagcaccccttttcctcctccttggcatgaagctaaagcccagccattctccaaggtccatttcaggctgcccctgcccagaagccacagctgccctcctaggcctgcagaggtcatcctcttgactgtgtctgtgtcactcattgccacttggcacacatttggtcagcagtcgtgaaggtcttccattgttctctgcccagtcttgatcctggaaggcaaggatcacaccctagaacttttttgtgcccactgcacagagtagggtctcaatacgtgtacggttcatgatgttcctagcagattctccaaactgactcactcagcccctggaacactaaaaactgcatttcccagactcctttgcagmgtgggctaggttccaccaagccagacacagtgaaagtgagtgggtggccacaggtggagggcacagtggtggatatgttttgttcttttgggggcagctatgctgggggctgcactaagtgatggggcagtggtcccaatggagtagtaaaattaagtgttgctcctggctgtgtaggacttagacccgtcatctgtaagctccttcacctcatgtaaacaaaacccctctagctggagtggtgtctattgtctgcgactaagaacccttatataaggtatactactccccaaccccattagtggaaatcccaaagggtaggaactatattttatttcacttgtaaacagctcccctagtaagcatgtcaacaaaatatacacaattcattgaaccccataacatttcaacgaattcctcatcctttctgtgaatcaagagcctgaaaagaaatggtgaaataatatgatcctctcttctttgaaagctcaaagctatgttggaccagaagtaaagtgttctcgtttctatttaataacttgaaaggttccgaggggccattgaggaaactcctcccttttaatatcaatgtgtatttattgcaaaaataatgtagcatcgagtggtattttatagcttatccaaaaacctcctgggtttaacgcattgtgatagtcccgttttcttctcagcccaggtcctatgcatcctcatctatgcagggctgttatctgcatataattttttttttttttaagacaaagtcttgctctgtcgccccggctggagtgcagtggtgcaatctcggctcactgcaacctccgcctcccaggttcaagcggttcttccgcctcagcctaccgagtagctgggactacaggcatgcgccaccacacctaggtgatttttgtatttttagtagagacaggggtttcaccatgttgaccaggctggtctcgaactcctgatctcaagcgatccacccgcctcagcctcccaaagtgctgggattacaggcataagccactacgcccggcctcaattttgtattgwactttttctttctttctttaatagagacagggtctcactatgttgactaggttggtctagaactcctgggcacaagctgtccgcccgcttctgcctcccaaagtgctgggattgcaggcgtgaaccaccgcccctggctacagttgccttcttgtctcaatttgcctttgacctttcttagggacttgttttctgcttttcctgctctttgtccgctgatctcctgggaagaaagcttccgaaaaggacaccgtttcaggggcgagtgacgccggggtgcccaggccgcgccccagttccgggtttgcacccggtcttcttgccctgccccgctcgcgggactacagttcccaggcgcccctgcgcggccgcggcgccggcgcmggcgtcggttgggacgcggagcygaggagcagggccgggcgccatggcaccgtggggcaagcggctggctggcgtgcgcggggtgctgcttgacatctcgggcgtgctgtacgacagcggcgcgggcggcggcacggccatcgccggctcggtggaggcggtggccaggtgagtgggccccgggacgccgctggggccgccgagctctaagctcagcccgctccctggctgccggcagggggcggggcggcagggggcggggccgcggcgcaggccccgcctcggtctcccccttcccaccccggtgcgcgcacagtgctgaccacggacgaccccactgttgcccccggcgagcaccaggactctgctggttagggctgcgcggtcagacagggcggccacctggtacgtgcgctgctgagcgcttgacctgcggccagtctgaattgagatgtgctgtaagcgtaaaatgcataccgattaacaagacttagccgggcgcggtggctcgcatctgtgattctagcacttgcagaggcagaggagggaggatcgcttgaggctagggggttggagaccaccctgggcaacatagggagaccccgtctctgccaaaaatttaaaaattagccgggtgtggtggtgcacgcctgtaggcccagccacttgggaggctgaggcaggaggatcgcttgagcccaggaggtcaaggctacagtgagctgtgatcaccccactgtactctagcctggactgcagagcgagacggtctcataaacaaaacccccaaaaacaccagacttcgtgagtaaaatgtaaaataaaaacatgaaaatgggttatgttgtttgcctgttgaaatgatatactttttgtttgttttgttttgttcttttcagatggagtcttgctctgtcgcccaggctggagtgcaatggcacgatctcggctcactgcaacctccgcctcccgggtgcaagtgattctcccccttcaggctcccgagtagctgggattacaggcacccgccatcatgcccagttactttttttatttgttttgtttgagacggagttttgctcttgttgcccaggctggaatgcagtggtgcaatctctgctgactgcaaccgccgcctcccaggttcaagcgattctcctgcctcagcctcctgaatagctggaattacaggcatgtgccaccacacccggctaattttttgtatttttagtagagacggggtttcaccatgttgggcaggctggtctctaactcctgacctcaggtgatycacctgcctcggcctcccaaagtgctgggattataggcgtgagccacatgcccagttgataatatttttaatatactgttttaggttaaaatatttgaaattaagtatacctttttttttaacttttgttaatgtgcttattagaaaactttaaattacctttgtggctctcattataattctgttggactgcattggtttaggtgagaggaggaggaagagaacatcgtgccagccaagacttgaccatgaggacacttttttttttttgagacagttttgctcttgttkcccaggccggagtgcagtggygccatctgggctcactgcaacctctgcctcccaggttcaagtgattctcctgcctcagcctcccaagtatctgggattacaggcacccgccaccacgcccagctratttttgtatttttggtagacatggggtttcaccatactggctaggctggtctcgaactcctgacctcaactgatccacctgcctgggccttctaaagtgctgggattacaggcgtgagccaccgcacctggctgacacttttctttgtataatttttttttttgagacaaggtctcattatgttgccagggtggtcttgaactccttggctcaggcagtcctcctgccttggtctcccaaagtgctaggattacaggcatgagccaccacacctggcctaatttttttttctttttttttttttttttttgagacaaggtcttactttgccacccaggctggagtgcagtggttcaatctcactgcaacctctacctcaagggctcaagagatcctcccacctcagcctcccaagtagctggaactacaggcacgtgccaccatgcccagctaatttttttgtgttttttgtagagatggggttttgccatgttgcccaggccggtcttgaactcctgggctgaagtgatctgcctgcctcagctcccagagttctgggattagaggtgtgagccactgtggccagccagaaggacactttcagtagcatggttggcaccactggacctgggctttgtaaggcctcctgttggcatcccaggtcagcactgccatgtgttgataggcagccgggaagggctaactgccaggacttggcctcccggagtcactagctgaggcaccctggcttggtagcctgatgtcactgggactcaatatacctatctgtaggtggcaattaactgagtctcttggtccttcttagagaccccattctaccaatctgcatgtctgatgtctgggagctgctgagataatrgggacccaaacggtcccgcatagtgaagccggaggtgtttgggaggctgggaactgggaacagggagacttggcttccaggagcaagcacaaagggcagcccagacctaggacactccgctgggtcctgggtctgctctcagtgttggctgaagttcagggttaagtgcattcctgaccttattctccattactccaaagctttagactagctcagtcacagatgagagcattctgtgagtggcactggtgggaatccagcagagggctctgggcagtgttttggggtgaagtgggcctcatctggggagcaggaagccagagctcaatgctgtgactggggcaggcaaggcctcatgggagaccctgccactcattgcttgcrgaagatacatttgacattatctaccagtggttccacttctgagaatttgtccttgtctcatgcgtgagaaatgacatgagtacaaggtcattcctggcagtaccttttaaatagcaaaagactggaaacagctcagatacccatcagtaggggagtattagggtctgatgtgtggaggggagagggacagtaaagctgcaggcacacaggtaaatcatcctcacaggtgggcacacgggtaaagcgcatcatcacaggtaggcctaaggggtgtgaagacgggagggtactgagagtgtgatggacgagggtggcctgtgctagagagggggtcgggacagctctgaggagaaggcactggacagacccggagggataagagggaactgtctgcaggaagaggcggaggaagcgcattccaggcagaaggaatggtagctgcaaagacctcaggaagagagcacttggcgagttcgagggcgtggggtgggggagtgggtacaccaggcaggaacttgaggggcacggagaggtgtccggactttatcctgagtggcaggaagtcagtgaagactctagataggcatatcatgtggtctgatttatatgttttaaagaaatacaaatgtaaaaagtgagacatacaagtcaaatgaaagcaagggagatttcctttgaaaccttggagagaaggcctttacatccaggccttgaaatctagaaagcaaaaacaacgaacaagcagcccaatagcaatatgagcaaaagatgcaaacaggtcatggaagaggaagtgagagaggctccgccttactcaaataagaggtgtgtgatctcggctcactgcagcctctgcctccygggttcaagccactcttgtgcctcagcctcctgagcagctgggactacaggcatatgccaccgtgcccagctaatttttggtatttttagtagaggcaggattttaccatgatggccaggctggtcccgaactcctggcttcaagtgattcacccaccttggcctcccaaggtgctgggatcacaggcgtgagccactgcgcccagcctgagaaatgcaaattaaaactatatcaagctgccctgtttcatcartttgacaaaattggccaaaatccaaaagtttgagaacactttctctgtgagagtttgtggaaacagaccctgccacacattgcttgcagaagatacatttgacattatctaccagtggttgcgcttctgagaatttgtcctatctcgtgtgagaaaggacacaagtacaaggtcattcctggcaatgccttttaaatagcaaaagactggaagcagctcagatatccatcagtaggggagttttagggtctgtctgtttatacagcagaataacatgcagtgtaagaaggaatgagtaccttgtytatagacatattactartggagacagcaagcacacagcaggatgcacggtgcrctgtttctggtatagaaaatgcagaaatgcaagaatgtatttctcctgctgtgtttgcataaagacactggaaggacgcaggctgcttcagagtctgggaagagctggaggataaggaaagtgggggccactgtgtggttggagacagggtaggagaaagactcttcactgtataactttgtataccaacgtttttgtttttgtttttgaaacagagtgttgctctgtcacccagattggagggcagtggtgcaattttggcttactgtaacctctgcctcctgggttcaagtgattatcctgcctcagcctcccgagtagctgagattacaggcacctgccaccatgcctggctaatttttgtatttttagtagagatggggttttgccacattggccaggctggtttcraactcctgacctcatgtgatctgcccaccttggactcccaaagtgctgggattacaggtgtgagccaccgygcccagcctgcatatcatttttaagatttttaaactatgtgaatgtgttttctattcaaaatattacaattcaaatattaaattgaatattaaaattcaaaatattaacgtctgggcacagtggctcatacctgtaatcccagcactttgggaggctggaggtagaaggattgagaccagcctgggcaacacagcgagaccccatctctacaaaaaatacaaaaattagccgggcatggtggtgcacgcctgtagtcccaactacttgggaggctgaggcaggagaactgcctgagcccaggagtttgaggctgccgtgagctatgaatgtgctactgcactccagcctgggtgacagagtgagactctaaaaaaaaaaaccattgttttttaaataaaatatttcaaggagatctctctggctgcagtgtggagaacaggctggcagtagggcaggaggtgggggggcttggactgggtagaaggcaatggagatggggaggaaggcatgaattaaagaggtgttttggaagcaggacctatgggacctgcggacatacggggtattgtgggggtcagggagaacttgaaataaagggtggtttccggtgtctgactggaacagctggcagggtggagagggggcagggagggggtcatggggcgggaaccatgatggctcatgatgtatgtcaagttcctggcctggtgtttggcacacagtagacccacaacagtgtaacattaaagaccactttcttttctttttcttttttttttttttttgagacaggatcttgatctgtctcccaggctggagtgcagtgacacaatcacggctcactgcagccttgacctcctcctaggctcaaaaaaatctttctacccaagtttcccagatagctgggactacaggtatacctccacatgcaggtttttcttttgtgtgtgtgtgtgttttttgttgttgttgttgttgttgttttgagacagtctcactctgtctcccaggctggagtgcagtggtatgatctcggctcactgcagcctccgcctcctgggttcaagggattctcctgcctcagagtagctgggattacaggtgcctgccaccatgcctggttaatcatttgtatttttagtagagacggggtttcaccatgttgaccaggctggtctcaaactcctgacctcaagtgatccactcgcctgggcctcccaaagtgctgggattacaggcatgagccaccrtgcccagcccccaagggacagtttgagccctggtctgcccaacccagacccctacttggaatccttcagggagaagggggtgttgggaaatgtcacaggcttctctaacagcttattttgagcagatgacccccacgtgatatagaactgtccaacaaacgtgcagattccaggttgtgacattggaaagggttctgttaacttctctgggttctgggttggtgtcttctgactgattgattgccaggagggttttgtttggatttgctttggctcctgcagatttrtctagctgggggtgtctctggtagcagctatactgtatacatctaacagcaatgtaataayaatccygaaatayaccacagcctgttwtgtagctgggagaggctaaaatctcccttcccaaaagcatatgggattatttttggtgaggggacatcacacccgtgatmtgggaggttttgttattgtgctgtctgtgggcctgcagaaccgatggcctggtctctcaaccccatgggcttcccatgccataggaccaagtccccatrtcctgccttgtccacgaggaccttctcaactgacctttgtggcctcttccactggcccccagttacacagacttcttggtggggttttcactgaaggggccgctgagctgtccagcacccacaaacctgtttccgcccacaccagcgtgcccttcggctctcggcagaccttggcagggcccccttcagcctttctgttggcttttaagggcaaggcccctccactctggcccagtgcctctggggccagatcatcaccctcagggcccgggaagctccgtacaccctccctcgcatgcctgtggggctcgtggcagatgcccagagtggctgcgaaggtggtgcaggaaackccccctccaggaaagtgtgcctgcttttggaattttccctggggattttccagagatgcaggacacctgttttcctcgcctggtgattgagccgggaagccttcatggagcaggccctacttgcccaggtgaagtctgtgtggcctgcagccacgggggygagtggccctgcgcctttcatgctgtggcctccttgatatgtacagcctgctttgaagtcctgcaggagctcaaaggaagttcctggggtgagaccagccgccgcagagggaaaagtgtgattggagtggggtggggggtcttagggttggcagggggaayacatgcctccgtggcagctcccggcaccatgggctccctggcagcatcgtcygttctctgagcctgcgaggggcgacacactgtcaccattcttcttcttggattttctgtgrtgatgggtcctccgattttattgagggccacggagcacgggggaagtagaagctcaactttttaaaataatatccacagcaacagcagtcaccccgcatcgagggaggcctgtcgtgcgccaggcaggtgcttaaccacccaccttcccttcacaccagcccctgaggtggggggggcttcctcttttcaaagtgaggaccaaaaatcggagagattcaggaactggcagaagtagaaaatgttgccgagccctcattaaagatgcatgcacacacacacattcgttcatttattccttttttatttttttttcattcattcattcctttactcatacactcaacaagcaaacattgagtgcctctgctgtactaaagacaccatcctaggccctggggatgtgcagcagtgaacaggtggagccgatgctgcagtcatgggggaccrgcaggcgacagcgtgcactcrggaaggctagagcatctgagacaygcagygaggtggggagccctgggctgggtacctggcctcgcagatcccatggcgagggagctgggattggaggatgctgagcgagccagccaggcaggcatctgggctaagagcatcccagatgaaggagcaggaggcccaaacctctgaggccacactggtgctgctggccaggcagggcccacttgctgctctaggacttgtgggtgggcgtggtcacaggccggaggacatctgtaaccggccgtgtccccccaacaggccctttattgaagccctttcatgggcggattgggttcccygaggggagccattcagaggcagggcccagcacagcgaggggtgcagaggccggcctcggggccctggscctatggctgggaggcatctgcatgtgaaagggggtgggcatttactgcatcctgtcttgggccactaaagcacatctgctgggcccagcccaggcccggctcggcgtttttggagccggcggaaggaagaagacttggcccagggcagcctcataaagcarttcccacccaggaccgccccgatcgatcggcctggtgctgtggagccaggcccacagcccttccgtccagtagcacctctcaatcccctgtgtgtctgggtgccttcgggatcctgataaaacgtaggtgcctcctagtaggtctggaacagcgaaggccagggccaggggatctttgaagtccagctggtcctggcaccccagtatcccctccttcatgcccggcttccctggtaccatccagccctagggacacaggtccctgggagtagcagcaatagtaacaacaacaacaacaacaacaacaacaacaacaacaacaataataataatgtaggctgtgggcctgggctggaacttcatctctattgcctcatccaacccccacacgcggtgtggcacctgccggaggggtctggcaggacattgtagggagagggccatttgtttgcatttgtttaagccaacaggagttttcctgatgcaacctggaccttggacaaggggtgtttgtcgagaacgtgctgtcgtcacctgtggtcccatttgctgtcaggaggtgaagcactttgtcttcagagatgggagccggtgctctttcaccctgggttctgtgatttcagctgtcatttcaacattttaagtttcataagaaataggtggcctccttatgtaaacattctcaccagcctgtgaatatacagagtgaaaagtccaagtcctccatcctcgaccaagtcccagtgacttccccagggtgacacaatacatccttttccttcgtattcctcaaaagcacagaggattttgagatgcagccttccctgactcttgtccagttctgcgggcacctgccccatcactcttgaatgccaccgccccaccattgcccaaggcatgtgtttggttagtcacaggtcactggaggctggagaccccttgcaggtccccgggccaggagttttgaattctttgtagcctcagagcacttatccaaccaaatgaaattttgagtagaactccaaaattatatatatataatatatatatttatatattatatatatatttatatattatrtatatatttatatattatatatatttatatatattttatatatatttatatatatataaattttttttatatttatatattttttatatatttatatatattacatatatttttatattttatatatatttatatattttatatatttatatattttttatatatttatatatttatatatatatttatatatatttatgtatatttatatatatatttatatatatttatgtatatttatatatatatttatatatatttatgtatatttatatatatttatatatttatgtatatatttatatatatttatatatttatgtataaatttatatatatttatatgtatttatatatatatttatatgtatttttatatacttatatatttatatgtatttatacatatatatttatatgtatttatacatatatatttatatgtacttatatatatttatatatattttcttatgtatttatatatatttatatatatatttatatatacttatatatatatttatatatatttatatatatatttatatatatatttatatatatttatatatatatttatatatatatttatatatatatttatatatatatttatatatatatcttatatatatatttatatatatactcatatatatatttatatatatatttatatatatatttatgtatatattatatatgtatgtatatttatatatatttgtatatatatttatgtatatttatatatatttgtatatatatttatgtatatttatatatatttgtatatatatttagtgtatatatatatttatatataaatatttatgagaacagtgtttgaatagtatattatttttaatagggatgggatcttaatatattgcccaggctggtctcaaactcctggcctcaaggagtcctcctgcctcagcctacccagtagctgggattataggtgtgtgccaccgtgtctagnnnnnnnnnnnnnnnnnnnnnnnnnnnnnnnnnnnnnnnnnnnnnnnnnnnnnnnnnnnnnnnnnnnnnnnnnnnnnnnnnnnnnnnnnnnnnnnnnnnnnnnnnnnnnnnnnnnnnnnnnnnnnnnnnnnnnnnnnnnnnnnnnnnnnnnnnnnnnnnnnnnnnnnnnnnnnnnnnnnnnnnnnnnnnnnnnnnnnnnnnnnnnnnnnnnnnnnnnnnnnnnnnnnnnnnnnnnnnnnnnnnnnnnnnnnnnnnnnnnnnnnnnnnnnnnnnnnnnnnnnnnnnnnnnnnnnnnnnnnnnnnnnaatatacagagtgaaaagtccaagtcctccatcctcgaccaagtcccagtgacttccccagggtgacacaatacatccttttccttcgtattcctcaaaagcacagaggattttgagatgcagccttccctgactcttgtccagttctgcgggcacctgccccatcactcttgaatgccaccgccccaccattgcccaaggcatgtgtttggttagtcacaggtcactggaggctggagaccccttgcaggtccccgggccaggagttttgaattctttgtagcctcagagcacttatccaaccaaatgaaattttgagtagaactccaaaattatatatatataatatatatatttatatattatatatatatttatatattatatatatttatatatttatatatatttatatattatatatatttatatatttatatatatttatatattatatatatttatatatttatatatatttatatatattttatatatatttatatatatataaatttttttatatttatatattttttatatatttatatatattacatatatttttatattttatatatatttatatatgtatttatatatatgtatatttatatatatttgtatatatatttatgtatatttatatatatttgtatatatatttatgtatatatatatttgtatatatatttgtatatatatatatttatatataaatatttatgagaacagtgtttgaatagtatattatttttaatagggatgggatcttaatatattgcccaggctggtctcaaactcctggcctcaaggagtcctcctgcctcagcctacccagtagctgggattataggtgtgtgccaccgtgtctagctcagaatggaatatgttttctgtgttcaaatttataatgtttgttctgaggtcaactgatgagaatgatggaagtgtttttatgaataacaatgttgggctgggtgcagtggctcacgcctgtaatccctgcactttgggaggccaaagcgggcagatcacataaggtcaggagtttgagaccagcctggcccacatagtgaaacccccgtctttactaaatatacaaaaatcagctgggtgtggtgttgtgcgcctgtaatcctagctacttgggaggctgaggcgtgagaattgcttgaacccgagaggcagaggctggggtgagccaagattgtgctactgcaccccagcctgggagacacagcaagactctgtctcaaaaaaaatgttgaggtctgcagcagtgaaccacacaacacagtttatatgcttagaagtttatgtgagtgctggaagcgagcttattaggagggatgagtgaatgttttctggtttatccagacttcagactgttagacagctatgaaagaatgacttcgctctgtttggtgctgacattagtttatatgatatgagtgctgtatataccaagtgaaaaagctgtagaataatgtgtataaacttacttttttttttttttttgagacgcagtctcgctctgtcacccaggctggagtgcagtggtgcgatctcagctcactgcaaccttggcctcccgggttcaagcgattctcctcctcagcctcctgagtagctgggactacaggcgcctgccaccacgtctggctaacttttgtatttttagtagagacggagtttcactatgttgaccaggctggttttgaactcctgacctcaggtgatccgcccgcctcagcttcccaaagtgctgggattacaggcgtgagccactgcgcccagcctaaacttccatttttgttaagagaaaacaaaggaaacacaaccacccccgtatatctggggtagagtcataatagaatcacaaacttgaactgtatggaaagagactgaggaaaatctgatggctgcttgaaagctttcccgtggctctgctggcaggagtaaggtctgcttctcagtttctgatctcagccttggtgggcrggggtcaccctgtgaaaatcaagggcagccagggtgggtctggcacaggattattggtttaccctgcaggtgctgcctctggttggaagcccttggccaattacaaggggagtgtggcacaagttacaaagctcatgaatggagtcctgcccctacccccagtgccccacaacgtgcaagaagccatattggcaaagcagtgccacacctscccactgtggtgtgcagggtgatttcccaggcccccggcaacaggcacgttgctgtccagcttgtagaggaggaacttaaggttcacagaagtgataggacttattcagacaccttttgagggggactgagggctgctgcttctgccagggcaggcaccacctcttacctgttgcaaagcttaatcctgtcacagaaagtgccaggtgtcagctctagtgtgagagcgtgggtttccaatcccagcwctgccccatagttgccatgtggcctcaaggaagtcccttagcgttccgtcaccccattatggctgcagctcaagggccccagtttcctatgtgtaattcctgtacccaggctgcaagaattaagtgaaatattttctcttaaaccaatgtttgggtggggcgaggcgactcatgcctgtaatcccagcactttgggaggccgaggcaagtggatcacctgaggtcaggagttcaagaccagcctggccaacatggtgaaaccccgtctcactaaaaatataaaaaaattagctgggtgcagtggtttgcacctctaataccaactactcaggagactgaagaatcacttgaacctgggaggcggaggttgcagtgagctgagattgcaccactgcactccagcctgggcaataccagcgagactcggtctcaaaaaagcaaaaacaaacaaaagccaacgttttcctttttttttaagtttttgttttcttttcctttttaccttaaactatcaggagataaaagccaacgttttacttattccatatctaggagctaaaggagcattttgttgttgaagggtcaaataattttgaagagtgggttgctttgccctttttttttttttttttttttttttgagacagggtctcactttgtcacctaggctggagtgcagtggcacaatcttggctcactgcagcctcgacctcctgggctcaagcgatcctttcacctcagcccccaaagtagctgagactacaagtgcacaccactgcacctggccaatttttgtatttttagtacagacaaggttttgccacgttgcccaggctggtcttgaactccagagctcaacggatctgcccacctcagtctcccaaagtgttgggattacaagtatgaaccaccgtgcccggccatatgaagtcttgtagttgttgaactcggtgtacrtgctaaaccaaagcacacagttctgctcaaggagctgtattttccacatctgtttgtattttcatgaagccaacataaaaggattctcatcccagttctgtccctagacaagtcactgaayccctccaaaccacaggtcccatctccaaacagcaggtcccatctctaaaccacaggwcccatctccaaaccacaggtcccatctgtaaatggaaacatgaacccacctctcagactgtcaagaggattcgatgtgaacatgcsgttggggctcggtggaggaggagccagtcaccgggcgctgctgtagccactgctggggctcagttcaccctgggctccctgctggtgtaaactttcccctctttctaaaggtgcccctgggcgatacactctgggctcctcctgctggcctccttcccagggcacctggcttcctctcagaatgtacctgccccaacagtgggtttgtcagagacgtggttgtcattgtcaccaccacagcaattactgccatttatttagtatttgaaatgtgccaggtgcttctcatgtcttttttttttgaaatggagtctcgctctgtcgcccaggctggagtgcagtggtgccatctcagcgcactgcaacctctgccacccaggttctagtgattctcctgcctcagcctcctgaatagctgggattacaggtgtgcaccaccacacccagctaacttttgtattttaaatagagatggggtttcactgtgttgttcgccatgttggccaggctggtctcaaactcctgacctcaagtgacccacccgccttggcctcccaaagtgctggggattacaggcatgagccggtggtcaggagttcgagaccagcctggccaacatggtgaaaccccatctctactaaaaatacaaaaaataagctgggcatagtggcgggtgcctgtaatcccagctacttgggaggctgaggcaggaggatcacttgaacctgggaggcagaggttgcagtgagccaagatcatgccactgcactccagcctgggtgactgagtgagactccgtctcaaaaataaaataaaataaaaaataaataatatgatcttcatgacagccctgtccagtagctactgttggtgcctcattttacaggtgaggaaactgaggttgcagagggttaggtgacaagccacagtcatacagggaggaggtgtgtctgcttcccgagctgagctcccaccttacttacaggggcctggcctttgtcccctgcagccrccatggccctcagggacgtcgggctgctgctgaggctcctaggctgaggagtggaagaaaggagccaggatccccacccctcacccccacatgccacgaggcatttcctgtccctctgggccttagtatccccctctgtgaaatgagacactcgggctgtgtggtctccaaagtctctggctgccgattcccatgtacttcattctaaattgcgtttattgattcctgggacatcgatgcttgtgggatcaacatgtccctgtgatctgggctccgtggcacaggcacttcagagaacactctagatgggagttctgccggcaggtgaggaggcgcaggtacgggagggtgtgctgcgtgttttataagtgccctagctgggggccggccccagcttgacctcattgccgtcccgctaaggtgactgcccagctgacccagaccaggaggcccagctaggtcccagctcctgcgtcactgtgtctcttctctccattcaaactttggactctgatgactcaaggctctgtgcaggtgctcaacagcgtctagtggacctgttgccctggccggtcagctggaaggaggagcaagtgcaggaggctcagctggagccagtgtgaggccgtgccctgtgccaggggcccgtggcatctctgctgtgcccagcctttacctcgtctccttcatggcagccctggagagctggaaggctgggcaccaccatcacccatcactgtttatggctcgggttccaagactccaccagcctggtgcgcgcgccagggtgggaagccagaccccacgcccaggggacagatgccgatctgttgctgctcctacctgcaggtggtcccccagcccaagctggtgtgcttcatggtgcagggcacggggtgggctcatscgcacatcagtgtgggcgtccccggggcatatgtgaataactgtatttttctattgaaaaaacaactctgctctgcttacggggctcctgcttgaccttctgttttggaaaattggatttttggaggaaatcagcaccttgtgggtttcaattctccaaacatgcgtgttcaatctccattgctttccaaaaggggagcgactgaagatctgaaaattagacagtggctagcactgcccagaggccccgttattaaaaacatttcaaggcygggtgccggtggcttacgcctgtaatcccagcactttgggaggctgagactggcggatcacgaggtcaggagttcaagaccagcctagccaacatagcgaaacccgtctactaaaaatacaaaaattagctgtgcatggtggcacgcgcctgtagtcccaactactcgggaggttgaggcaggagaatcgcttgaacctgggaggcagaggttgtggtaagttgagattgtgccactgcactccagcctgggcaacggagtgagactctgtctcaaaacaaaaacatttcatgccagtggcattgctgagggcctggggctggtgctgcacctgcatctcttttcactacaacccccggggaagggggtggtcaatgtcctttcccctctctgaggaaactgaggcattgagcttgtatttctctgcactggttcccatttcagtagtaatagggaccctccagcacaccaggtgatgtctgcaaygtggccccagaggcaggagcaggctgggagttaggaggctgaagcctgatgtgggggagcgctgccccccaaccccactccctgggaaccaaccctccacccctttgccctgctgcctccacacccctttcctctggctgtgaatttctccattaccaagtgggcccgtcagatctggaacttgggtcagttaggtgcttctcccagtaaagcacctactgtgctgggtactgggtactgtgcccggtagattttgggcaggattctagagagcatctggcaaagttgctgcaggaaagggccagtcactgcctgccagtctcggcccctgtgaatgcacgagttgacatttctcaaattccagcctcactttgtgggccaggcagcccttctgacctatgagctgccaaactgagccttttgatgacactgcccccgaggattccctgcagccctatgtcctcctgagcacctggtggcccctctgtggcctccgagaccctggcctgggtgctcactgcccctcatccctacacaggagatgctggggtgactcctctgttggtaaaccaaggctctggttgctgaggatggggctggtcctgcgccagggtgcccccaggtgctgatcttggctccactgtggttgggcaccaggcatggcagaggtgctgagcagacaaaaccctgccctcccaagccccgggcttgcagaggaggcaggaggagggaggtggtgatgtcaggaccagagcagcaccaagggctgtgtgggcgcagctcggaggatgggatctggctgggtgcatggctgtggggcctccaggaggaagaggtgtatgaaccctgctttgtaggatgatcagggtcaggccccaggggagcatgaaagcaaagactcagggtgctatgagggcctctgggtcacacgaaggtgaccagtaccggggctagagggcagggggcccagctgggaggggctcatgctgcccttttcctgaggccccctgctgcctgcccagtctcccctccgagggatcccattctccctccagcctcaggaccctcggcggtccccagagggctagctattgagctgtcccaaggtcactcaggatgtccaataattgtcctaacagtttacctgctgtggaacagtaatgagagggttttcattatttgcgggtgagcgctcctggcagatgccaacagccagcagatgtggagagtccgaggtgatttgtaagggccggttcatctgatgcacggtaattgccccgggcgatgttgtcactcagaggctcgtcctggcctgctgagatgaggtaaaggtcagttcaaagatccagtttgggccaggcgcggtggctcaggccgggtgccatggctcacrcctgtaattccagcactttgggaggccgaggcaggtggatcactggagattgggagttcaagaccagcctgggcaacatggtgagaccccgtctctactaaaaatataaaaattagccgggcatggtggtgggcacctgtaatcccagctactcgggagactgaggcaggagaattgcttgaacccaggaggcggaggttgcagtgagctgagattgtgccattgcactccagcctggctgacagagtgagactgtctcaaaaaaaaaaaaaaaagatccagtttggctacaggaagtgggagcaaatccccactcccatgggactcctggggaggaggcagcgtgctgaggtgggggccatggtctcagaggggctatctggcagccaggaccctgcagaaggcccctttccccaaggttcttgggtggtggggtsggaacagcccatcccagagctgggcttgtccttctttgcaggggctctttgtacagctctctgcaagccttgctggggtcctggagccgcacctgactagggctttcctgatattttggaattcttgtacttcatgcctcccaaggcttagtctktgacatctggtggcaggccccacggagggatgacaaggktttgcttccttagctgtcctagtcggcctgggctgccataacaagtgccattgactggggacttcaacagcagacgtttattttttcacagttctggaggctggaaggctgatatcagggggtcggcatggccagtttctggtgaggccccttttctgggyttgtaagcaggtgccggcttgctgtgtgctcacatggcctctttgtgcattcatgagggtgctctctggtgtctcttcctcctaggacactgatcctgtcatgtgggagtcccacccttatgccttcatttcacctgaattactccacaaaggccctgtctccagatgcagtcacattgggggttaggactccccatctgggctcacaggccttgctgcttacaagctgtgtgaccttggtcaggtctctgtctcctggggcctccatcttctcctttctagagtggagataatggttcttgcctcataggctcgtttacccagtgggtacgacttactgagggccacctgacagccaggcacctgggccttggggatgtccattagggacagcaaataccttgggcacgaggacaaaatcagatcatggatcctgagtgacaccaccgtccttacccagatgcaaggctcagtataatgttgtattaatattttactctttaaacaatagtgcctactttctttattttcagtaatttaaaataaggaagaggcaacctggggctggtccctggtggtcagaatgggtctctggtgacggctcaaagsggggtgtggtccggggcgcagaaggacagaacccaatgggagcggacttaccccagcatttcacatccgatttttcagggayagatttmgtctctaaaactagcacttgatattataaragcatataggctgaatgaacttatattgctatttcagaggaggccagtggcttaagagtcccaaagtgagttctgtgacttactcatgtttcatccacatctgaagttgtgtttggaataacagatgtgaggcactgtcatctcactgtcacatcgattgctcactgttctgagaaggtcacatcatcattcattagcaataattagtcccaggggaccccctgcacttcttcactcaactgctccattaacttgggtgcaaatcacacgttccaggtgccaatcaatggagatctatccataatgtacaaggtgacgctattagttacaatatattaactgcctaatttaaaaataaaactatctttatgaagggcaattaaccactaagtgtaattgataattcataaacctctgattaggaaagacaaataataagaaaggaatgaatcacccatcctattgaagaagacrttgccagcctctggtctgcattcactatgtggtcagcagatctacagatttcttcctaaattgcacctgtcagctccagggctgggggtctggaggctcatttcagtgcagaaacatgtgttttcaccactgaagcctgtctgtttctgttgggggttataaggaggctgcaggctcaggacaccctcagggaagtagtgggtgaggtcatttagacttctcagtcagtcagtcattcagcaaatgttaatgggggattgtggagtgccaatccctgtgggaagccctggggatgccgtggagacccgaatagattcatccctgaactcctggagctcgtaggccagtgagaaagacaattgcgtaaatcagatgattggagacactggttagtgttacaaacaaaaactgacagagacagggcggaggcaatggcacactggatggtgggaggaagggacattggcctgagtcctgccacctttttgtagtagctgtcactaccactcatggctgtatttggggccctctctcactggtggggaatcgtgcctggcttatctgcccccyttttttttttttttttttttttgcgrcagagtctcactgtgtgacccaggctggagggcagtggcttgatcttggctcactgtgacctccacctcctgggttcaagagattcttctacctcagcctcccgagtagctaggactacaggtgcccgccaccacacctggctaattttttttggtatttttagtacagacaggatttctccatgttgaccaggctgatctcaaactcctgccctcaagtgatccacccacctcracctcccaaagtgctggggttacaggactgagccaccatgctctgccttatctgccctctcagtkgtcctccactccagcctcatttcctggctccaccttccacataccccacgctgctcgagttctttctatccgagagggtggggccagtgcacacctgcctgtgcgcaaggtgggtggcccttcccaccacctggcctgccctttcctgccatctccttgtccgtccctcaggtctccagttgggcctgaatccccagtcttttaagaccccacactgggctgtgtcctttccccactatgtgggagagctccaggagtgctgatttcctgttcctgactccactgtgtgtagatatcagctccatctccaaagtctcaggctcaagagcggaacagaaagcccttgacatttctgggattcagtccctcacccataacatggataaattacattcacactgggttcagtttgagttgagtttttagttgggtctcacttgctcagatggaagttgatttcaagccgtagttctagtaactgggttgaatctgcgtgtattcatttcattgggccacatctgtaaacagaacttgagcacatgcctcctctctatgtgtgttttctataaattttaaattattcatttaacactattgcttaggttataaaaaatacacaacttgaaagaataggtgaagagccaagatgtctgcatctttggagatcagtggaatgtgtgtgtttcgggacctgtctgagaacagtgccagatgcaattagcatggctgattaattttactagggtttcttaaaagtgcctcccggcccttgggcttgcagcttgatgtcttttccacgagtccacactgcagctccatgcagatgtcaaatatgaccrctgccttgttggggccggtttgtccrggaagggatcttgtgatcttggcgagggagccaggtcctgcctgtcaccctccccccaggtctgagtgacccaccccgcctgcctctgtaggttcctctagcacgctcgggtcccttcctggtgggcgccaggtcctccagcctcctctccctgcacagaagcaccacaccctggccctctctcttgcttccccagggaggcctcccctgaccttcctaccccaccttgtcaccctctgtctgctcaccctgtttatattctgcatagcgtctctctcttctcagtcacaaattgcccttcctttgcagggtctcttgttcctattccaacctcctcctattccaacctggatggtggcctggagatcagggaacttttccatgctcackactacagctctgtgcaccaggccagtgccaggcacgtagtaggygctcagtgacagtttgcagaagggtggatgttacttcatttggtgygttctgagaacttgcccaggtgcagcctggawtcgcgggtctcctatgaagtcaggagggaagaagctcggtgccgcyggccagtggcagcatcctgaagttcatgagacctccaggctgggtttgggcagggtccacgtcctgtctgtccatcccggaatgttggtgtccctgatgactttggcaaacctttctccattgacagtgatgagaagacaaacctgtctcgggccatctgcctttgtactttttgggaagtatggatccagagttagtaaggcgtggacgtgtgcagctcacttgcaagtggaaatgccaaatgtggtggaaagggacagagaaatagctgtggacattcagaggtggcccctagccaggctgagcaggattgtggagaggaggtattgcatggatctcaggggctgggtagaagtggccaggcaggtgggccaggcacggtggctcacacctgtaatcccagcactttgggacacctgaggtcaggagttcgagaccagccttgctaacatagtgaaaccccatctgtactaaaaatacaaaaaattagccaggtatgatggcaggcgcctgtaatcccagctgctctggaggctgaggcaggagaatcgcttgaatctgggaggcggaggttgcagtgagctgagatcatgccactgcactccagcctgggcgacaagagcgagactccatctcaaaaataaagaaataaaaaaaataaagaagtggcacaggtagagaggcggggggacagagttgcattccaggcaaggggagaggcaatgaaaaggggggtcaggtggggaacctcggggagcctcaggtgtatgaagtccagtgaggatggaaaagagttgtcggggcgtggtatgggggtcctctgagaagggatctgcttcagctcagaaatcccagcctgaacacatcctggatcagccaggaccccctcaggggctcgcagtggcctagtctgctctgggctttgctggatgcccttcgagaatcaccgcgcarcctccttcagaggcccaacactccacgtgctgacttcccgggcctgtgtctcccctgccgcagactgaagcgttcccggctgaaggtgaggttctgcaccaacgagtcgcagaagtcccgggcagagctggtggggcagcttcagaggctgggatttgacatctctgagcaggaggtgaccgccccggcaccagctgcctgccagatcctgaaggagcraggcctgcgaccatacctgctcatccatgacrgtaggcctgtcggacaccaggacctcacgggggtgaaagctcccctttcccagggtggrggctgtgcagagagcctytttcactgggccaaaccactgactgagctaggccaccaacactcatgggttgggggtaaaaacctcatgggacttcctgctgggggctgggggcaggttaggacccagctctgtccattccttggcctcacaccagagggtccttagagcaggttctggatggctcctgggaggaaaatcctaggctctctttcctgatctaggatggaccaagcggccagggaattgtcaaggtggcggagttctagctcctgttgagaaagagacagagagagagagagagagagagagaaaatgagaatgagaatgaatgaatataaatgagaagctacattgaggtccatagcttctaacgtctggcaccatagccttcaactatgtgaaaaccagccctgctctttggaacagtttgcaaatggcgtaggaacaaggtttgcatcctgattttagtctgaatgcaagaacagacagcccctttgaccctcagtggggaggttttcttggaaygaagcagaaggaacaatattactggtgcctcctgaatatttaaaaagaagagacattarcrattccagacacttmtccattggtccactgcaccttcttccttcctctgcacttgatatttttagttttacaaactgctaggcagaggcaarcatggttttttcctttccagggcaaggtgggggctctcaagaagtggcgggtgctccctggaaagcctagatgtcgacttcatagccctggtgccagttaagggtgacaggcctggcctttagaaatcatgtttctcaaaattccttctctgtaatctaggatccctgctagtgcctttagaacatggtcttcaaagaaagaagatttaagaaaaatatcttgccccaccctccagaaaagggttgctggacccgggagtggagctggaagaagccagcaggagagggaagtgggcatccgcttggagggtggccttggccagtgaatcagacaagcagacggcaaagctgggaggctgaagggaggatgaatgcccttcctcagctgtaatcctgcatccgtgttttcaataactagacccttgttttcagacttggaattttttttttcagtcattggtggattttctgtctaacattttatgaaaattttcaagcatccaacaaagttcaaataatttttacttggaatagttttggtttttttttttggagacagagtcttgctctgtcacccaggctggagtacaacagtggtgtgatcttggcttcctgtgacttccrcttccctggttcaagcgattcttctgcctcagccccccaagtagctggggttacaggtgtgtgccaccacgcccrcctaatttttgtatttttagtagagatggggtttcaccatgttggccaggctcgtcttaaactcctgacctcaggtgatccacccaccttggcctcccaaagtgctgggattacaggcgtgagccaccgcctccggtcttacttggcatagttttatacccttcacctagattgtcaatgacattttttgatattttcttcactttatatccatccatccctccgtctgtctatccatgttattatttagatgcatttccgagtaaaatgcagacacgggtatactyccctatacacttcagcatatcattggagtttggtatttgtttacggtttttcctgtttgatgtamaatttacatacaatgaaatgtacacacgtcaagtgtacttttgctgagttttgacatatgcatgcacccatggaacccaaccccgtgaagagctagaccatcaccatcactgacagctctgacagctacctcgcaccttgcccaggtggtcttcaccccttgtcyccttagaggcaaccactgtttggattttttccgttataaataagttttcctattctagaattttatgtaaatagaatcatacagtatataattgtgctggggcctccagtgctacccccaggctgaatgattcattagcaggactcacagaacttagaaaagrtattacactcccagttagacttattacygtgaaagaataaagattaaattcagcgaagagaggagacacatggggcaaagtctaggagaagacaggcatgaacttccagttgtcccttcgaaatggagtcctactgggcacacttgattctcscagcratgatgtgtgacaacacrtgggaagcattggccaccagggaagctcactggagcctcagtgtccagggtttttgtgtagacattagcacctgtgtgactgactttagcgactcagtctccagccccacagagtccaaastgatacagctgggccagggccgcagggatacagaaacaggtgttcactgtaagccaagctgttagcgtaaatgatctggtcagactgagagagcagggcccgaggccttgagcatacaaaaccccttatcaggtagaacattgcagtggctcagaggttatctcccaggagccagtcctgaagacaggccttttttggaatgtacagggtttgagcaacctagtcctgctgagttaaccctttccgtcacagtagtcttttgtgtaaggcttcttttacccaacgtaatgtttttgagactcatccatattrttgcatgtatcagcagtgttgttcatttttattgcagaatagtattccattgagtgaacagaccacagtttatccattcacatgttgttgatacctggattgtgaccagtttcagtctattatgagcaaatctgctatgaacattcttacacagttcttttgggtaaatacctagcagcgaaattactgggtcatagggtacatgtatgttcacctttgtaaaattctgccagacctttttttcagagggattgcaatattttacacgtcctccatctgctgcagctgttcagtatcctcaccagaccttggtgttatcagtctttttaattctcaccattstggtgggtatgaaatcgtatctcattgtgtatttcagtttctttctttctttctttctttttttttttgagacagagtctcrctctgttgcccaggctggaatacagtggtgcaatctcagcccactgcaacctctgcctctcgggttcaagtgattctactgcctcagactcctgagtagctgagattacaggcggccgccaccgtgccgggctgattgttgtatttttagtagagatgggattttgaccatgttggccaggctggtctcgaactcctgaactcaggcgatccgcccaccttgacctcccaaagtgctgggattacaggcatgagccaccgcacctggcctcagtttcttttcaatttagaaaggtcaacatctagtcctaagagagatgacagcatgtttcttctaggatctgaaaacacagatccaatgatttgatgtatccttgcaaattttcctattttaatttaaaatgggggaagacaaagaaggagaaggaggaagagagtttcctaagggagctggtgaactggacctgtggggatggaattctgctttttcttcaggacatatgtgtggggttgcctgaaatgtgtcaacggttcttacagtttgggaccagtagtgccaaccctccaaggcttgtgcrgccccatttcctcctgctgcaggctctcagtgtcttctgagcagatttcccttctcagtagcaaagctgtgggtttcctgcctgcgatagtgacctcagggagctcctggggctgatgtggtattgggatggagggtcctgggtgtgtccacctttctcctcataagccctntctgaggagccgaattccctcctctgtcaaataggaataacccttctgtgtctacctcccatggcagctgtgatgatcagaaagaaatgcatctgagaaagggggaggacatgtgaaaggtgtccctggtaggagatggggaggtaggccatgtcctcccagggctccgtggcactctgtctctctctctctttccaggagtccgctcagaatttgatcagatcgacacatccaacccaaactgtgtggtaattgcagacgcaggagaaagcttttcttatcaaaacatgaataacgccttccaggtgctcatggagctggaaaaacctgtgctcatatcactgggaaaagggtaagttggctccagggagagtcatttctcggtgctttagatgatgctgtgccagtctccaacttgcggaatcaggcagagaaggatgcagaaggggaggtgggaggagcaccggtgatcttcttttccctccctttttcatgctttctctcttcatttctttattcctctcctttaatcatttctttaggaaataggaacactgtcttcaggagctggttgatcaagcttccatgtggagtctagactagaagagggcgtcattgcagagggagaccctctggagatctcagaggccaagtgttgattgtcccaagtttagagcaaagaaggagaaggtgcatttgcataggatgtagcagggtgttggagaatgctctcaagggttgtctaattagtaaaacataggcttgagggcctacccagtctgggcaccgacagtctctggccacagatcactgtctctgtgaagttgtgattttgtgatcagtgttttgtctgagcctttagcacatgccttgccatctctttcttaaacaaaacagtgttggttatttttaacatttttcttacactgagatagcacatgttcattgaagaaaaattagacaatacagatgagcaaaagaagaaaccagaaagtatttttagtcccactgcacgaggaaaacacctgtccctattttggtgtatgtccttgcaagtggcttcctgtgcgaatagactattatggatggagatgttcacagcatcgatgtcacacttgaccttgttttgtcacctgttttttattgttcaccaaacaatatttgtgactgacttagcatgcagcaaatggatatgtcttggggcatggttatctatggtgtggctatcttgtatatatatatattttttaagactgagtctcgctctgtcacccaggctggagtgcagcggcgtgatctcggctcrctgcaacctctccctcccgggttcaagcgattctcctgcctcagcctcctgagtagctgggactacaggcrcccgccaccatcccagctaatttttatatttttggtagaggcggggtttcaccatgttggccaggatggtctcaatctcctgaccttgtgatccgcctgccttggcctcccaaagtgctgggattacaggcatgagccaccgcccccaacctcttgtaatttttttctttttttttttttctgcttataagtttattcaatgcaaaataaccctcaccagttttactgaggtggctgaccatgtccacgaccaaatacgcctgtaaactgaaattcggttgctgacccattcccagcctcagctttctcactggcaccagggggcagcactccatctgtgggtgtctctttctctctatggctgtctgtctgtgggtgtctctctctgtctgtgggtgtctttcgccatctgtgggtatctctctctgtctgtgggtatctctcccatctgtgggtgtccatctctgtctttgggtgtctctctttgtgagtgtctctgtctgtggttgtctctgtctgtgggtgtctctctgtgagtgtccctgtgagtgtctctgtctgtgggtgtctctcctcgtctgtgggtatctctccctgtctgtgggtgtctctgttggcttccccacttgtgggtcttgcaggtcggtcacgctccagacctttaggccgcagcctgccagtctccagaccgctgtggcatggggtagcagacacgctctccaggggcagatggtggtaatcgcagagattctggatccccatgtgggtgaggtaccagtagaaatgtctccaggcaaactccttcctgcaacctcaggacctgagagactgcctggccttcatgacgtgaaggttgggcacattctcatctgccagctccgggtcttaggcaggtggacattcttcttggctaccgtgactccctccttaaaaaggagttcataaatagcaatctggttcttcttaggcatcaacatctctgcagctgtagggtccaggtccggggctggaaagcatgatttttttctaactgatctctgctgatggcatctagattgttcctggtttttcaccataccagggctgtgatgagcatcttggtgcatttcggatgacgtctccagatacagttacagaacgagtatttttgaggttcttgaggcatgttgccaagttgtttccagaaagctgcacagacttattctgcacagcctagaattctagaatcacagggttctgcacaacctagagttctggaatcacagggttctgcacagctagaattctagaatcacagggttctgcacagctagaattctagaatcacagggttctgcacaacctagagttctggaatcacagggttctgcacagcctagagttctggaatcacagggttctgcacagctagaattctagaatcacagggttctgcacagcctagagttctggaatcacagggttctgcacagcctagagttttggaatcacagggttctgcacagctagaattctagaatcacagggttctgcacagctagaattctagaatcacagggttctacacagctagaattctagaatcacaggctcccagggttgcaaggacactttggagtgtctacctcagcatctcatgaagtgtgggaattccgaggcggtggcggaggaagtgttttccatcttcggtgctttcgttgcttctggtgacagcgctcactgcctctgcttgctgtacgggaccagctgatggaaccgacagggagggactttttatctggccattggccactgccacacactttgtgtaccccgttttgtgtaattctgactacaaccttgtgggatctaggcaggtcattgctgttttgcaagtggggttgttgaagccacaggagatgaaataagctgctgtcccccagccattgagtgctgayaggatcaggagtgccagttggtgtggctgaccccagaccctgtgcgtgttacctctaagctacattctagagcagactttttgcccacacaagccttaaatgtgggctggggacagtggctcacgccggtaatcccagcactttgggaggacawggtgggcagatcacctgaggccaggggttcaagaccaggctggccaacatggtgaaaccctgtctctactaaaaataaaaaattagccaggtgtggtggtgcgtgcctatagtcccagctactcgggaggctgacgcatgagaattgcttgaacctgggaggcagaggttgcagtaagtcaagactgcgccattgcactctagcctgggcgacagagcaagactccatctcgaaaaaaacaacaaaaccttaaatgtatttttgaggctgtgtttaaaaatggggatattttacacaaaatatccagatttctggattcttttgaagaatcagaagatctgacaatacggagcctcacattcctgcacacacagcagccatcgctggarccactgcctccattagtttgaatttactgcagaccccactcctccctgtcgtccctgtctccagaccacagagttagttgtcattgatcgtgtgccatttgttgtttttttcaaagtagagaagtacttcttcacgctgtgtctctatcaaaaatggacaagtgaaagatgtttcaagaaatgaaaagattttctttttagtgacaaaaaatttctagtatgtttctcatataaataaaatgtgtcctgtatgtagtcagggttcctcagagaagcccgaagctacaggatatagatatgtagagagattgtggaggcttggcgagtccaaaatctgcagggcagggctggcaggctggggactcaggaatgcgcgcagcagagtcgtaaggctgtgtgctggtgggattcttgctcggggaaggtcagtctttgttcttgtaaagcctgcaactggttggatgtggtccacccacattgcggaagggaatgtactctcctcctagttcaccgatttaaatgttaatctcatccaaaaacaccttcacagaaacatccagaataatgtttgaccacatatctgggcaccgtggcccagccaagttgacatattaaattaacccttgtagtccctttttaaacttacacccattgcaatttaggtcgctgctatggagcaagccacagaacctggcctcttaactcatttacccgggctgacccattaggcctttgagtcaccaacamctcactagagaacaagcataatgaagaagctctgctgtaattcgttaatgttaacacttttttctttaaagatgtctcatgctgagcttcgtggcacacgcctataatcccagcactttgggaggctgagatgagaggatggcttgagctcagaggttcgagaccagcctgggcagcatagtaagattccgtctctacaaaaaagaaaagaaaaaaagttgtctcataattattaaaaaccactattccagatcatggataataatagtcagaacaggtatattgttgaaaaagaaaaaaaaaaaaccggaagcagtcgctttcagctttgtaataccgcagcaaatgtcatagtagacaagggtttgtttaaagtaggagattagtggcgtctctgctgatgggggttctgggtgtttaaaaaccagagaaaggaaccggcggttttagggactaggtcccagcttctcaggacagcctgaggaccccccaagagctgccatcaccatgccgtcctcggctgtgggtcactgctggtgaggtccatcctgcactgcgggacacaggggcacaggctgagcggtgcccaccaaggaggcaggagcagcgggtggaggcgccggggcagactgtccctctcctggaaatggagtgatttacatttggcatctgtttggaccccagagtgggaattggctttgtaatttcttctgtcatgccgctctcagaaaattaagctgtttacccgacagactatggaaggttaacggctcttctgggaaaggtcaagtggtcatttgcagggaggctgtgctgaataatctgaaacggcagaagaataaagcataaaatcgcatctgactcctcctcccgggcttccccctttctttccagcatccacgggttcctctttgtggctagaacattcacgtcctaagtggggctgccgttggctgggttaaaccagtaaccagtaacaggagaaatacgtcgcatctctagtgtgtggagattaccgggcctttatattaaaaaaaaattttaagtgcttatatttgctctgtctctaaaaartgtttccaggtaacagttggcctcaagatgcctttttgtttttctgaatgaataaggaataaagaaaaattctgggcactataaaatcaagcccagattcagttttttaaaaaataaacgttaaagtttctcattttgatttctggaagttcgtgttctccttggactctaaagattagcatgcaaagacaaggttttgattgtgtattttmagttgcacgttcagtttttttaaaatcccatccaggactaaatttaaacataagaaaatccaggtttctttcgctttcgaagaggctgcagggaacttgaggccagaggaagtggcgccgcgtgggtccccttaggaggttttgccagatgatgggaggtgcttgctcccgtccacccaacctgtagctcctccagccggccccagggtagctgagggacaggggtctgggcccagaagcccccagaatcctcagctccaaacagagctgtacctgtcgcaatggagtagttttgttgatttcaggttttcttttgttgctgggtaagcatttcctgtgtggggtatattctttcctccgtcctggcttacttccacacatcacttcattagggaggccctccctacccacctcgatgccctccttctcctggcacaggtgggcaggaggggacgagggtcatggcctttgagggcctgcagagggccttgcctgtggtggcgtggccaccctggtcctcagcagggtgctcagtggattccaaggtgcwccctggacccggacctccccttcacttccttttagctcaggtctcagctttccatgcctctgctgcctccctgaacccagcctgtcccccgccctgttcaagcagactgcccctcccctgggtcctgccctttaaagtttgtctgtgggcttctttgcttccccaccagactgtgagtccctgtggagcaggctggggctgggagtatccctgagtcctgcaaagggctgtggagcatctgggatcgttaatgccaagggggaccaaggtaacctgggccatttgcagcaccagccagtgcaggccccaggacccggtgtcccctcactgtttcctgagaactctggaccccactaaggaaaccatcagaccaaagtagctgattgtccaactgggaaaaagaaaaagcagtacttttttaggccatgtaaatgcaaaatatacatttgaagtctgcgtttaagacatgaacttagagatttytaagcctgtttttgggggtcactctaaaagggagggcattttcaggtcccccctctgtgagcattcacagcatcccagccagcctgtatccctgtgccgtgaccccagagcacagagcctcagaggctgtggaacaggcctggggttcacgtggagagtcccaagcccacgtcatgacaggagatgcccacaccttcaacaaacagactccaagctccaaagctgcctaacaggagtggcagggggaccagccctggcaaggcccaggtttggctgaagcccgtacctgcagcccagcttgtaagtttagccgggaagcatctgaggcaggcagtggaggacgcacaggggtgagcggttcatctcacaggtgtggctgggtgcctgctacagcttcaaggcatcaggtggggcagaaagggacaggcagggtgcccaggagtggcggagctggaggaagggcacagccccagggcagctcccgaggagctcagttctcacaccccaggtggtcacagaacacatttcagcccccaaattgaacagggctgtgttcattttttccttcccccagctcatcttattgcttgtgtcagcctgggtgaaaggttatttataataatattctcctgtctcatctgggcagcttctgcatggaaggtaccgagttaataactttgcatgcgttattttgttcaagcttcacagcaatccgtgaggtaggtattgtttgttgttcgttttgcccattttacagattaggaaactgaggcccacaggcgtaagcaacccaaagtcacaccgttagaaggcagtgagatctgaatgctcaagtcagcatgcgctcttcttccctctcgttttctgcatacgtgctttctccacgtctcccatatcgtaagggcatggcaggaggagagggaaactgatgtgatggtggatggcaaaacattttagtggttccaagaatcaagcccccttgtgtattcttggctttcaatgaactgcgtcttcagagcagcgcaggttaaaccactttctcgcctcattgtagtcaattggcttagttcagccagagccaggtctggcccaccatgtgtctggactgtgagtgccttgaggctcagtgtgacgcgatcgtagggtgagcctggccgggctgcagccagccaccaagccagccctgggctcaaagagcagtgaggccattttgagagaggaatgctccctcgtgcagagcctgtctccacctccatgagacgggaaggaacagtkgtcttctcataaaagcatctggcgcccatgaaacctggcacctcgcttgacctccggctaacgggatgcggcagggtgctgtggaactaatggagttctcttcttcagccagcaattaggggttaattattagcaattaggggttcgccacataccccgtggacctgctgttccttcccaggacacaggtcacttgtcattctctgtgttagcaactgaaaccgtctgccttctgggtcccctgttaatcattgcagcagggtccccacgagtctgacagcagggttgcgttctgtgcgacctgtggcatccctggagctgctggctgctgcgctcgccccactgggtgtggcggcctgccgcccggctctgtggtgctggtcccctgcggtcattctcagcgtagcgcctggactgcccctcagccgcrgcttggctctgcagccagcgggacaggcccggcgctcagctcccgatacttagcatcctgcggtcagctccccgtgctcagcatcccgtgctccgttctgctctctcctaggcgttactacaaggagacctctggcctgatgctggacgttggtccctacatgaaggcgcttgaggtaccagccctggttctgtcccaarctctcttcagacctcagggcacctgggactttttgggtctttgttgagaagaggctgtgcttaattaacgtacaaatggccttttgggyttccacaaaggctgccttcctattctgggctcccctggccgggccctcgggccctcaggccctcagctgtcctcctccctccccatctctcccttcccatccttcccatcctccccatcctccccatcctccccatcctccccatcctccccatcctccagtgggcgcagccccccctgcccgccgtggaccctgccgctctcccagctgctctctgccacactcctctcgggcttgtggcttctgtatcagtgctgaccaccgctctcattcctgaccctgggcatctgcagcacctcaagcttgacgggtcctcactggcctccttcctgacttccccttcagtttccaaggccatctgtggccaggcctccgggtggggctcccctgggtccactctggcccaggtcccattagctgccccaggtcagcctcacatcccgtcccatcctcacagctgcagcccctcctgcctgcctgccgtcaggtgggagggagaggcagacgagcagatggagccctgtgatgagctgcgagtgggcaggggagaagagggggagaagggatgagaggacggaattgcaggcgagtgagcagagcactgctctgctggcccttgggagccctgtagttttgccagctcttggatgccttctgctgtgggtaggcctttgagtggatggcagggtgcctggtgctaggggacctgagtgacccgggcagccctttctggagttgtgaggctcctgcctgtgagatgagttctcaggcccacagcatcctgcttcttcaaggcccttgactcttgggggcacatttgggacagtgtttccgtggctgggcatacacctgttccttgatcccaaacttatgccatgtccctctctcttttcccagtatgcctgtggcatcaaagccgaggtggtggggaagccttctcctgagtttttcaagtctgccctgcaagcgataggagtggaagcccaccaggtaggttggcgccttgtgaagtgggtcaggggaggcagccccgtcagggaggccgccccgtcagggaggccctggagcttggaatggattrcaggactcaggcagcctgtggggttggccaggcagccaagcgtgggctccctgtgaaagctgacctggctgggaaggagggggaagacagcaaacgaaatccactgaatagtttcaaccgtgaagttactttcagtatgaaagcaagaagcagaaatgcctgcggcttttcctgagtttttgctgcttctctgaaaggataagaattgacaagtcctatcagtgtgttaatatatctcactggcaagacagtgtaacagcaagattacaacaatatggaggaaataataaagtcactcattttgcgacctttatattttgactattttgggatagattgcctttcaaacttccaaattttagaaaggaaaaagaatcggttatgattttattgtctacacctaccccaaccctaagtgagtctggcttcgtcctccagtgggttttcttttctttttcttttttttttttttttttttttgagccaatgtctccatttgtcaccctggctagagtgcagtgtagtggcacagtcatggctcactgcagcctggacctcccaggctcaagcgatcctgccatctcagtgcccccttaacccccttactaaccaggccccccccccgccaaccccaactgagtagctgggactacaggtatatgccaccacgcctggcaaactttttttttttttttttgagacagagtctcactctgtcacccaggctggagtgcagtggcgctgtctcggctcactgcaacctccacctcctgggttcaagcaattcttctgcctcagcctcctgatgagctgggactacaggtgtgcaccaccacaccagctaattttttatttttagtagagacagggtttcaccatgttggccaggctggtctcaaattcctgacctcaggttatctgcccgccttggcctctcaaagtgctgggattacaggtgtgagccaccatgcccagccccggctaacttttgtattttccatagagatggggttttgccatgttgcccaggctggttttaaactcctagctcaagccgtcctcctgcctcggcctcccaaagtgctgggattacaggcatgagccaccaacacacagccccctccagcaggttttctgaaagattgtaaggaatagtgggcagccggcatggaggctgacgcctgtagtcccaacactttgggaggctgaggcaggtggatcacttgaggtcaggagtttgagaccagcctggccaatgtgatgaaaccccatctctactaaaaatacagaaaaacaaaaaaaattagctgggcgaggtggtgcatgcctggtaatcccagctacttgggaagctgagggatgagaattgcttgaacctgggaggcagaagttgcagcgagccgagatcatgccactgcactccacctgggtgatagagtgagactccttctttaaaaaaaagaaaaaagaaacagagtccacagctgccccaggctgtcctgctgcctcctcagaagtgggcagcagaagcatgggttgggggtccctcaggtgtcaagcctggtgcatgtttcccctgtgtgcatttcggtccagaacactggtgcctcatggtgctttgagaaagatggcccaaagctgccaaaatctagacactgcacctgcacctgccctgagatccatagagatgtcagaagatgcaggctgtctggagtccccagaaaacacctgggaaatgtcacattagtctgttgagaaggaaaggtttgtgttttgaatgagtgagaactgcagcaataaataacctggctttttactaccttgcttcatagggcagaatttctttttttattagagatttcaaacatacagaaaagtagagagaatgatacagacaccccattatatccatcatccagcttcagtggttaagattttgccacattcctttcttctatcctcttttttttccttttaaaaaatttactggctgggtgtggtggcccacgcctgtaatcccagcactttgggaggctgaggcaggtggatcacctgaggtcaggagttcaagaccagcctggccaacatggtgaaaccccgtctctactaaaatataaaaattagccgggtgtggtggtatgcacctgtaatcccagctactcaggaggctgaggcaggagaattgcttgagcccaggaggtggaggttgcagtgagccgaaattgtgccactgcattccagcctgggcgacagagtgagactctatttccaagtaatagtaatagtaatgataataataaatttacttatttttttgcttcatattttaaagcaaatctcaattgtatcctttcatgttgtagcatgacatttaaaaatcacgatttttggatgtaaatacaatacattaaaactcctaacatggccaacaggcatacaaaaagatactcaatatcatcattcatcaggaaatgcagatcaaaactccagtgagataccacttcacactaagatgactgtatagttaaaaaaaaaaatagaaaataacaagtgttggcaaggatgtagagaaattggaacccttctctattgctgctgggaaggtgaaatgacaatgctgccacggaaagccacttggtggttcctcaaagttaaacatagaatttgccgtatgactcagcawcccatttccaggtctatacccagaagaactgaaacacgtgttcaaacaaaaacttgtacacagatattcatagcagctccatacacaatagccaaaaggtaaaaaaagccaagatacctgcccatcaactgatgaaaggataaccaaatgtggtatgtccatacagtggaatattattcagccataaagaggaatgaagttctgacacatgctacagtgtagatgaaccttggtagcattatgctaagtgaaggaagccaaacacaaaaggacacatattgtattcttccatgtatagcaaatgtctagaatgggcaaatccatagagatggaaaggagattagtggttggcaggggtcgggtgcaggggaatggggagtgcagcttcagggtacgaggtctccttttgggatgatacaaatattctggaactgggccgggcacagcagctcacacctgtaaccacagcactttgggaggctgaggagggtgaatcacttgaggtcaggagttcgagatcagcctggccaacatggtgaaaccccgtctccactaaaaatacaaacattagccagacgtggtggtgtgcacctataatcctagccactcgggaggctgaggtgggagaattgcttgaacccaggaggtggagattgcagtgagccgagatcgtgcaactgtgctccagcctgggcgacagagccagactctgtcttaaaaaaaaaaaaaaaaaaaagaaaaatattctggaactggacagtgatgatggtggcacgacgttctgaatgtgctcgatgccagtgaattgaatactctggtcacggtcataaattttatgtaatgtgtattttaccacaataaacattttaaaaccacctaaaaaattaacagtgatttttgttagtattatttaatagcaacccatatttaaatttccttgactgtctcagaaatgctcttttaccgttgatctgttggaatccaatctgaagaagctccgtgacttgtgtgtcgtttttatgttttctgagcctctctttttagccctccatcatagaacatttgaaatatctatgtcagtagagagggcagctcagggaactcctaggtacccatcactgtgctttaataattatcaactaataaccactttaaaattgttttcaacttttcattttgaagtaacttgacactcacaaaaagttgcaaacatagtacaaaatgttcacgtgtaccgttcagcagcttccccatcatcatcgagcagtgataaaaccgggaaatcaacactggcacaaggcggttagctaacctagagagcttattcagacaccaccagtcatcccactcatggctttctggggacacgttgcatgtagcagtcatgaccctagtgtcctttatctgtgaactctgatcacctgttgaggaggtgtcttccagagttctctactgtcattgctatttgtccctttcagtaattatctttttttttttgagacggagtctcgctgtgtcacccaggctggagtgcagtggcgctgtctcagctcactgcaagctccgcctcctgggttcacgccattctcctgcctcagcctcccaagtagctgggactgcaggcgcccgccaccatgcctgagtaatttttgtttttgtatttttagtagagatggggcttcaccatgttagccaggatggtctcgatctcctgacctcgtgatctgcccgcttcggctcccaaagtgccgggattacagacgtgagccaccacgcccagccttttttttttttttttttttttttgagcaggaatctcatcctgtcacccaggctggagtacaatagcatgatctcagctcactgcaacctcctccacctcctgggttcaagtgattctcctgcctcagcctcctgagtagctgggattacaggcacctgccaccaagcccggctaatttttgtatttttagtagagacagggtttctccatgttggccaggcttgtcttgaactcctgacctcaggtgatctgcctgccttggcctcccaaagtgctgggattacaagcgtgagccactgcatccaaccctaataagtatcttgtgggaaagttctttgacactatgtaaatattctctttctgatcattagttctaattttggcatctcttgataattcttttatttttttattttttgagacagagtttcactcctgttgcccaggctggagtgcagtggtgcctgggctcaccacaaccccctcctcctgggttcaagcaattctcctgcctcagcctcttgagtagctgggattacaggcatgtgccaccacgcccatctaattttgtgtttttagtagagacggggtttctccatgttggtcaggctggtctcaaactytcaatctcaggtgatccgcccgcctcggcctcccaaagtgctgggattacaggcatgagccaccacatccggccttcattggtgtattttatgtgtggcccaagacatttcttcttccagtatggtgcagggaagccaaaagatcggacacccctgctctagaggtttatgaccaaaatactgtatttaaagctgctgggaataattcttttttgtgggtggtattcccccaagtggacgctctttgaattcattttcattttgatgtttagggaattggcttaacatttacatttgttttgtagttatgtaaaacatttatatggttctaaaatcaaatccacaaagcaagacatattcaaagaagtccaacttcttttccttctattttgtttttacctgtctctggtaggtagccatgtttataaatattaaagctataaatattttataaatattatagctttttttatttaaaaaataagcaactatgtatatatttgtattcccctcatrggatgaatttaagagacaaattctcaaaataatgtgttttatatatagagagaaaggctaatgctttaagtttaaaaatcagtatttaaaagtttataagtaggctgggcatggtggctcacacctrtaatcycagcactttaggagtccaaggagggcggatcacctgaggtcagaagttccagaccagcctggccaacatggcraaaccccatctctactacaaatacaaaaattagccgggcctggcagcaggtgcctgtaatcccagctactcaggaggctgaggtgggagaatcacttgaacccaggaggcggaggttacagtgagccgagatcctgccactgcactccagcctgggtgacagagtgagactctgtctcaaaaaataaaataaaataatataagtggtatgatcacaaccatctcaaacagcccccttcccccgacccaaaacccaaacaaaaacaaaaccctgccactgcctggaaaataagacctggccaggtgccatggctcacgcctgaaatcccagcactttgggaggccgaggtgggcaggtcattagagcccaaaagtttgagaccagcctgggcaacacggaaaaaccccgtctctacagaaaaaatgcaaaaaaaaaaaaaaaaggcagatgtggttgcatgtgcctatggttccagctacttggggggctgaggtgggcagattgcttgggcccaggaggttgaggttgcagcaagctgagattgcaccactgcactccagcctgggcaactgagcgagaccctgtctcaaaaaaaaaaaaataggaaagcaagaaggaaggaaggaaagaaggaaggaaggagggaaggggaagggaagagaggggaggagacgagactggctgtccagatggcattgctggtgatatttggatggtctgaccttgggtggtctccctgcctttttcttgtggcattttcagttattttcacagtcagcttccttcacatttcgaatgagatacagcccacctcaccgccgaaagaagacccctcatgggggtctggtgaatctgggtttgtcgttttcggatgctggggcagtgcgtctgggagggagcgggsctgtggattcctggtgggtcaccgtggctgcttgaggctttggtccctgccgctgccatccaccctgagcatctgtggccctggagagcgaaagacttgtttcctctggtggytccgagcatatgtggcaaagctgtgtcttatttacctcccacatcatcatcctctcctaccctcatatgacatttctgcctgtccccttgacagtggagtagcagctgcatgttccgaacgtccccaccctgccattttcctaaaatgctcactaacgttatttgactctcaggatgtgtagacattttaaagctgtatttcaagataaggccatttcaaatgaactgtgtcttatgcacagggtaataattctctgttcctggcttttttatttttaatgaaaaatgcctgcaaggacctctcttgctgctgaatgccaggctgtggcaaaccttaaatttttccagctgctttaatcaataaagttatcaccagtcatttcccttgatcactgctgcttcccgagaccctgacctgcttcttgctgctgagttttcagtctgcactcagaatagatataactccccaaatccaattttcattttaacctttcctcagtggcctagaaatcacagattgctggtattaygctaatagattggaaattcaaacctcttagaggcaacctggccctttctaggattcagtaataaggcaaagaataacataccttaaaggttacttctagaaatatctaattctcacggtttmagcttctgaatcagtggatggttttatagcttcatatgagcacccaagtgatgtgaaggttttggcagttctccatcatcataagaagttctgtgggatgcaaatcctgcaggtttagtggagattgagactgttcaaaccagagcacttagttatatgtgacagccaagaaccctcgcctggaggggcccgtttcacaggtgaggagcctgaagcttagagatgaaacaccttgtcataggcgctttgcattcccaccatgaggttaagacaggatttctcaggctgggcgcagttgctcacacctgtaatcccagcactttgggaggccgaggtgggtggatcacgagcccaggagttcgagaccagcctgggtaacatggtgaaaccctgtctctacaaaaaaatacaaaaattaactgggcatggtggctggcacatgcctgtggtcccagctgctcaggaagctgacgcacgagattcgcttgaatctgggaggcaggggttgcagtgagccaagatggtaccactgtactctaggctggacaagagagtaagaccttgtctcaaaaaaaacaacaaacccccccccmaccccgcggtttctcaacctcgacacttggtgtttttggactgggtcattttgtggtgaggggatgtcctatgcattgtagggtgctaaacagcatcccactgtccgcccactacatgggaccacccccttcccaagctgtgaaaccaaaattgtctgtagacattgccagatgtgccctggggagaaccgcagcattaagcggtattaagagaacggttacggagaactctagtactgaacccaagattactttgccaatgaggagtgaagccaggcaccaaaccatcgtcttccagccccrtccagtgctctttgccatagcccaactctcagggaggaccagcggtgcagcagaatttcttagggaggtggggagggtagggaggatttcaggttggggggtagggaagatttcaggttggcgggtagggaagatttcaagtggggtgggtaaggaggatttcaggttggggggtagggaagatttcaagtggggtgggtaaggaggatttcaggttggggggggtagggaggatttcaggtgggggggtagggaggatttcaggtagggggtagggaggatttcaggtggagaggtagacaggatttcaggttggggggtagggaggatttcaggttggggggtagacaggatttcaggtgggggggtagggaggatttcaggtgggcgggtagacaggatttcaggtgaggggggtagggaggatttcaggtcggggggtagacaggatttcaggtgaggggggtagggaggatttcaggtgtaggggtagacaggatttcaggtgggggggtagggaggatttcaggtgcaggggtagacaggatttcaggtcggggggttagagaggatttcaggtgggagggtaggcaggatttcaggtcagggggatagacaggatttcaggtggggggatagggaagatttcaggtgtggagggtaggcaggatttcaggtcgggggggtagacaggatttcaggtgggggggtagggaggatttcaggtgtggagggtagacaggatttcaggtgggggggtagggaggatttcaggtgtggagggtagacaggatttcaggtggggggatagggagtatttcaggtggggagggtagrsaggatttcaggtgtggagggtagacaggatttcaggtggggggatagggaggatttcaggtgtggagggtagacaggatttcaggtggggggatagggagtatttcaggtggggagggtaggsaggatttcaggtgtggagggtagacaggatttcaggtggggggatagggagtatttcaggtgtggagggtagacaggatttcaggtgtggagggtagacaggatttcaggtggggggatagggagtatttcaggtggggagggtagacaggatttcaggtgtggagggtagacaggatttcaggtgggggggtagggaggatttcaggtgtggagggtagacaggatttcaggtggggggatagggagtatttcaggtggggggggtagrgaggatttcaggtgtggagggtagacaggatttcaggtgggggggtagggaggatttcaggtgggggggtaggcaggatttcaggtcgggggggtagacaggatttcaggtggggagggtaggcatgagggctgcagtgatcttcatggctcgcaccctcagaactgcctgtgaaaaatggsggtgaggtttgcaggcttatccagaggcctggccatataaactcaaaggtgccctaccatttcgttccctgattctcagggcatcagtcctgactataggggtctggggacagtctgtacccctagggggaggctggtgagtggggagtacatgtctgtccacatgggggccactccggcccagttctttctgctgtggcctccctcccccatgggtgtttccactgaggcctccccacgaactctgttggctgagccccacctcccagccgtgggcattttctttggattgtcagtgtggggatgaccctgctcaactcctgactgggagcaggctggcctgctgggccrtgcccacttccagcactgaaagaatgggcccaggacgggggtcagccctcctgcagccctggtttgaattggaaactctgtccaccgatgcctggcacctggcacctagccctgcagctgtgggtctgaaactgacgggagttgcaggagcttccggccctggctttgtctttgtgatgtgtcctagtcataaggtgctctgagacctcatggcttagttttccttcagagttttttctcccttggaggcttttttttttttttaagtagattttattttcttctcaaaacacaagtatttaaaatatctgattatgaagcaactcatgctcattaaaggagctaagaaaaattcaggaaagtacaagaagaaaagaaaccactcatttcaccagcccagaataacacaaatcatgcttgatcttgccaattttttgtgtctatatatacatttttaacacaaaattgggataatcttgtatctgctgtttgaaatctgagttttcccccttaatatcctattggggacaatttttgttaacttatattttaggttcagggatacgtgtgcaggtttgtgatacaggtacattgtgtgtcttgggggtttggtgtgcagattattttgtcctccaggtcataagcctagtacctgttggggtagtttttcaatcctcaccctcctcccaccctccaccctcaggtaggccctggtatctgttgttgccctgtgtccatgtgtattcagtatttagcccccacttataagtgcaaacacacagtatttggttttctgttcctgcattagtttgcttaggataatggcctccagttccatccctgtagctgcaaacgacatgaccttgttcttttttaggggacagctgtctttgtgcttattgaagcactttaacgaagcagttttcacagctgcatactattccactgttcagactcccgtcatattcttgaccattycctattgatggagatgaggctgcttccagtttcgctcttgtgcgtaaccctgatgaacacatcttgtatgtacatcctcttgtacatttctaattatttgctccaaatcctagtggtgtggctgggaggctgtgatgcatgttgcttatttctgtttcagaaaggtgtgtccgttcaccttcctgacctgctgcgtatacagatgcttgtttccccacatccttaccaacaccatgatttctgrctttttttttttaaagtggtctttgagttttgctgttagtcttgttccttatgaaggtgtccgaccacagtggcaatyactcagcattgcactgtctccaggtctctgtgggagcctgggttcctttggggcctggattcagggctcatcctagagtgagctgtcatctcagggcatctccctgggggatatgtgcmccccrgagctgcagttacagacactgagctcactccaccttcaccacccagccctgctgcttcccgccctaatcctcctggcagagcccctggataaggaaaatatttgtgaaccacggaagctctttggtgctggaattttgcactccaaagcatcgccgcctgttagatgatgtttccctccagcacctaggacactgaagaggagaccagggcaggcaggcagatgcgtaagagggaggattgactgctgtagcacccgacccaggacacctgcctctgggactgtggcgcctccatccggctctctggatcctgggttctggggggtccgacctttcatttttttctccgcctcacaccccaccatgtcgtgtctgaaaggaagcgaagcccagccctggcaggtggagtatttttatttcccctgacagcgcacctcctgacctctatcttcttgccagtgattttttaaatcctaaatgatttggcaataattgctcctccttgcgtgattattgcccttcaccgatagtaaatctgggaatcccctggggtcctgagcgcactttggtatgcggagcccacaagctggcctggacaggcatcactgctccaggcagctgtgcacccagccggccctggcgtcccggcccccagcctccgcctccctcgccgacagcttcccggggctctgcctggaggcagcctcgctttatcccgcagaacctccacgctgttcctgcatgagaactcttcctccaagagaccacgttcctctggtcctgtctccgtgggccacatccacaaatgttccagcccaggaagaaccaagtctgtattctgggagggaaacctgtgtgctgtctggttttgtatgtgggaggagcatgcacacagtttcattttccccggaagcatggaggtgtaggatgacatgtaatatttggaagacccattscatttccaaggaaccttctagcaggatggccctggagtctctggcagcagtggacatggtcctgaattggagtgctgtgaatgttcactgctgacctcacggtttgaagacaattccttgagaagggcagaggggacccgaatacgggggctctggccggccctgctgccagatgccagcagccgtgggggcttgcccggccagccctggcttttcccaaccctcagagtgccccttgtgcatgcagcagacactggtgctggtcccattcccgggagcacgcggtgccactggctgtgtcttgcctggccaggtgttggtttgatagactcgaaaacctcatttggatttggcaggattttccctaacatcagtcattctggaaaaaacactttgaatttttaccatatctgggtatttttaccatatctgggtacttgccactagctctatttacttcacgtttcttaaaattgattcattttattacttaaataaatgtattttaaaaggaacttttgatgactactataaatggaaaaccagaatctctcacttaccataatagattaatctaaaaataaagaccacatgattacattaaaatgtatgtccttgctctgcctggagtcaaatagtatgtcacccgtgtgcatgacacactctgggaagcacaggggtgggtggaggaaagatcagagaaaatccgtggaaagtatgaagtagagagcaccacaccaggaagacgtggttttatttcagtacctcatgtctcgcggtggcttgcggctaccagtaactggcagaattctcaacattgtggccctcagccacctcctccgagctctctctcagcaccaccatccgccgwggcttctctgagggaggcccctctggcctctgcttgactatgatacatgtcgagtccatgccgagtggcagaaaagctccgttttcagctgaaactacctccctggcctcagggggcctcattggctctgtctttgtactttctcaatggctcctgatgattccttggttatctgaaggcctgtttgggagacggttcccaggacagttgcttcaggcttatatgtgtgtgctttctggaattcacagcatggcgygcccyggtgartggtggggagatgggtagtgaacacgtgtggtagcccctgctgggcgtgtcccacctgtcctccatgtcctacaacctggttggccccttttgcttgtcagagcaaagctcagaacctcacctcctctgggaggcctttcctgaccacccacaagcccagtaggtcaggaggtcaggcctcacagcctcctgtgtgttatcccaggccctgatgatgagactgtggaattacctgattaatgtctgtctttagcacttgtcgtgagctccgtaagtgctgggactgcatgtgtctgattcacactgtgtgcccactgcctggcctggcactggcctgcgaaggcctagggcaaaggtatcaagtaaccagggcaagggtgcctgttgcaggtcgggggcctctctgatgtggtgagatagggaatttcctcaacgaaacatttcctcatgtttctgtttcctttgtaacatgtttaggccgggcgcggtggctcacacctgtaattccagcactttgggaggctgaggcaggtggatgacttggtcaggagatcaagaccatcttggttaacacggtgaaaccccgtctctactaaaaatacaaaacaaacagcggggcatggtggcagccgcctgtaatcccagctactcaggaggctgaggcaggagaatggcgtgaacctgggaggcggagcttgcagtgagccgagatcgcgccactgcactccagcctgggtgacagagcgggactccgtctcaaaaaaaaaaaaaaaaaaaaaaagtttaggtaatgtattatgtcctggccctgtgctgggtgcttcactaagatgatttcctttaaacgccacacctgttatacccattttacagatggaggtggaggctggcccaaggtcacacagccagcaaacaggagagctgggatctccaccccactgctctagctcagcgtgagacaggagtgagtctgtgcatctgctggccacatcgggcccgccccctctttctgtggtccccttcccccagatggagagcaaattccacctggacccgtccttgcaggcagagtccaaatctatgggacacacactcagtaagactcccctggcttgggcatgcttcatagtcatcgtttcattttgtcttgattttggtttgtgtatttatcggttagcccctcttagcatctgaattccagtgagaagacatrtagtttgtttgtttgtttgtttgtttgtttgttttaagacagagttttgctcttctcgcccaggctggagtgcaatggttgcaatcttggctcattctcctgcctcagcctcccaagtagctgggattacaggcatccgccaccatgcctggctaattttttgtattttaatagagacgggtttcaccatgttgcccaggctggtctggaactcctgggctcaagtgatctgcctccctcggcctcccacagtgctggaattacaggcatgagycactgcgcccascttttaatcagattttggagtaggggagtgagaggagctggttggtggtggtttttttttctttaaaattattattactttttttttctttaaaattattattactttttttttttttttttttttgagaccgagtctcactccatcgcccatgctggagttcagtggcacaatctcagctcactgcaacctccacctcccaggttcaagcaattcgtgtgcctcagcctcccgagtatctgggattacaggtgcatgccgggctaatttgtatatttttagtgaagactggtttcactatgttggccaggctggtctcgaactcctgacctcaagtgatccacccgcctcagcctcccaaagtgctgggattataggtgtgtgctaccactcccagctgttttttctttaaattacatatatttatttatattaaaaaaaaaaaaagagcatgagtccatttaagcaataacacatgttaatgtggcaaaaggagacccacaaatgactgacgtttcagccacactggygaggactgtatgactccctccactctatgtaggtgaccaatgggaagtcttgtttgcgcctcataagtgtgtccagacacagccagccgtgccgtaatgcagagcactcagctgctcaagacacatttgctgagcgtcaaccaagtgccagttgtcaacccagattccttgtcctgaaggagctcctacttctggaagggtgggatgagcagagtccattatgctgcactatgacacgggtggcaccagggtgtgatcccagagtgctttgggagagccacacaacccagcctgggggcagaggaaaggtggtggtcaccagagctgagtcctgaaggcctggggggaattagccagcagaggagggaggtgagcaggcagaaggtcagcacgtgcccacaaggtaattttctggtgttgatgtgtatttccagytattgtcattttcccttcgcccaaaggacttcttctacatttcttgtagggtagatctcttggtgatgaattatttccgcttcrgatgtctgaaatatctttatttcatcttcattttggaaagatatttttgctgggtacagaattctagatgggcagttttttcttttactgcttaaaagacggcactccacagtcttctcacttgcattgtttccaacaagaaatctaacgtcttaatcttcgtttctctgtacataacatgtctcttttgtctgactgttttataagattttctccttgtcactggctttgagcaatttgattatgatgtgccttaatacagttttctttgtgtttcttgtgtttggtgttcattgggatcttggatctgtggatttattatttttatcaagtttggaaaagtttcagtcactatttcttcaaatatatttatgtcttctctcatctcactttttttttttttwatctaatttagagacagggtcttgctctgtcgctcaggctggagtgcagtggcacaaacacagctcactgcagtctcaaactcccgggctcaagtgatcctcccacctcagtctcccaagtagctgggactacaggcgtgcgccaccacatctggctaattttttaaatttttatagagacagggtcttgcggtgttgcctaggctggccttggactcctgggctcaagtgatcctcccacctcagccttccacagtgctaggatgataggtgtgagccactgtgccccagctcatctcactttgaggaactctaattgcgtgtacatcaggccgcttgaagttgtgccatagctcactgatgctctgttcatttttgaaaataatttttctgcctctgtttcattttgggcagtttctattgccatgtctccargttcattcatcttttcctctgcggtatctcttctggcattaatcccacccagtgtattttgatccctgacattgtagttttcatctctagaagcttggtttggattttttcttttatcttccatttctctacttttggaacacatgaaataccattacaagggctgactgaatgctctcgtctgctcattctcacctctctgtcagttctggctcagtttggataaactcatctttctcctccttctgcatgatactttccttctttgcacgtctgatcattttttattgggtgccagacgtgatcaattttaccttctttttgggtgctggatatttttgtgtgcccataaagaatttcgaactttgttgtgggatgcagttaaattacttgaaaacagtttgatccttccagatcttgctgttaagatttgggggcagcaccagagcagggttgccctgggtgaatcattcctcatagtgaagccagcggcttctgagatcgcactcaatgccctgtgcatcgtgagtgagctttcccagcctggctggtggggacataacgcagtcctgcgtgagacacaggcaccgttttccctagttatttggtgtgattctttcccaggctcagggagtttcctccctcacgtgtgctggcagtggtctgctgagtacttgaggggaccctccacgatctccacagctctttctccatgcagccttctcctctctgattccctgtcctgtggactctgctcctgggtctccccagaatcctagctttgtctccccagttcagggatcctactgggctctacctgggtttcccttggtattagtcagcccagtctgtcatacaaaacaccacagactgtgtggattcaacagcagaaactttttttctcactgttctggaggcttgaagcctgagatcagggtgccagcaagtccggtttctggtgagggctctcttcccrgcttgtagatggccgccttcttgcagtgtcctcccatggcctctcctctgtgcttgcatggagagggcactccagtgcctcttcctctggtaaggacagcrgtcccatcagatcagggccccctctgacctcattcgcccttaaagaattacctccttacaggccctgtctccaaatacagtcacgctgcgggctagtgaatttgtgggggacacacttgagttcacagcacccctcctgtgtccacagtctggaagcatcgaaggcagtaggctgggggcagtcacaggagccacctcatttgtttcctgcgtctcagaagtcattgtccttcgttgcttgatgtccggtgtcctgaaagctgttggttcataatttggttttctggttttttcaggtgagagagtttatcccagaggctagtttttgaaatgatacccaggctgtgagcatttcctctgtgtgtgtgtgaattttggtttgtatatattattttgtttttaaggcaataccttcaccattgaaagcaaaacctatataaagcaaaacttacaaagatttgccagagatttgcttcactttcatggaatcaagggcaaataaccaggttacagagtctttagggtcaggtgaaatttagcctgtgttccagcagaggccagacagcgttcagcatccccgcacgtccttggggcgccaaatcactttgacgtctgctgattgatttcaaattgcacagatatatactgttcaaagctgtggcctacgggggcagtgtgagatatattcaaggtgggttgacttttaatcaatacgatgacaatattatcttgtttaatttgtatgatggtggttgtaaacatcaaatcaagccatttattatgtcaaaaaaagatgaaggagcccgggaataaaactctcctgacatcacttctgagcgtatttcactgccgtgacaggccgtcatgattggggacgatatcgtgggcgacgtcggcggtgcccagcggtgtggaatgagagcgctgcaggtgcgcacygggaagttcaggtcagtgccagctggagtcatttattcaccttccttccaggggatgaccacattctcattctgttttgttcttcaaaataaaggggatattctttccaaatcaaagagcagtatgtgggcattcactatcttgtatgtaatggacctctaagaacagggctgagtggtcttttatagcagacagtgataaagtagagtggcttttgatacagggtctgggttttggaatggcgtgcagtgcagagagaaataagcaaaggcactatccatcctggcggcggcccaccagggagttgggccgaatttgtgctgctgtccctttggcaatttgatcagaccctgcactacggcagttacagctgtgggcactcagccccttggacagcctccctctccttttgttcactttctccactctgtaagacacagagagcctggagacgacagagggttgctcaggcatgccctggagcagaacctccatctcaagaagaaggttgtgttttatttgctggcaaaagtctgcctggtctggagcagctgtcaggggttgggagctcccaggcatgtggagggccctgtggtacccaagctccagctcgcctggtcatcgagaggatcttggacatcagagtgttgccttgccttatgctagatggtttcgattgtggccattcagagaaagtacatctttgcagatgctggggagacttggttgaaacatggttacctggaggtacttggatttggggtgggggcagttacatttgtcctgagagatctgcttaggcaggaccagagaagacagatcagagggcccgaccgtcgctctgaagtctctcctgcgggttgggagctgtggctgagtgygaggtgagtgaggaaggctcagcgcacctgggtccagggtcaggaagttggtcccttccagctacctcccagaccctcccaggcttcccccgacgtgtatgacatatgggccttctttctttcttgaagttgggttttgtggctccccttggttaggcctggcctaagggagtgagggagaccccactcacaagccacaggaacgtttttttccaagagaccagccaggggtcccccagtccccaatcctgcctttcctgcaaaggtcgcagagcctggtcttgctgctgctcccaggcgaggggctctccgctgacagcggacctcggggccctatagttgatgccgggtgctgcctggcgtcagccgtcaggagcccagcccggcgccccatgcgtctcagggcacacctgtgacccgtgagcacaagtgacacctccctgcttgggagcacagcggtgtggctcggcaggaggtggaaagggagaaccgtacygtgttgtgtactgggcttcttccagttccttggaggagaaacatgtctgtcctgaatgccacctcagttggggtctttctggccagcccaggccaggtgcccctataaactgagaatgggcctctgaagaaggccccccacagcccacgaatgcaggtgggcacgagggaggctgtgcccaccctacgccagcaagggttggtgcttttcagattccggttacctgcatgctatttaaagaagagtacgaggtgggcatcccccatgacactgtctcccggagagagagaaactctgtttttttgtttttgtttttgtttttttgagacagagtctccctctgtcgcccaggctggagtacagaggtgcgatcgatctcagctcactgcaacctccgcctcccaggctcaagtgattctcctgcctcagcctcccgagtagctgggactacaggtgtgcaccaccacgcctggctagtttttgtatttttagtggagacggggtttcaccatgttggccaggctggtctcgaactcctgacctcaggcgaaccacccgcctcttcctccggaagtgctgggattatacgcgtgagccaccgcgcccggccccagagagagaaactccatcaacagtttgccgaatccttccacactgccttctctgcatagataaacagactggtaatattttggttttttctttttataaaaatgggatgatattgttttgcagcctcctttttccttgaacactgttttatggcctctttctacaagtgtcttcataatgatttttttggtaatttttaaaatttcagtagtttttggagaacaggtggtgtttggttacatgcataagttctttagtggtgatttctgagattttggtgcacccatcacccgagcagtatacactgtacccagtgtgtagtcttttatttctcacctacctcccacccttcccggcaagcccccaaagtccattgtattatttttatgcctttgcgtcctcataacttagctcccacttataagtgagaacatacagtgtttggttttccagtcctgagttacctccattccttgaggtctccaactccatctaggtttgctgttaatgccattatttcgttcctttttatggctaagtagtattccatggtgtatatgtaccacattttttttctttgtttstttctttttttttctttgagatagagtcttgctctgtcacccaggctggagtgcagtggcgcagtctcggctcactgcaagctccgcctcccgggttcacgccattctcctgcctcagcctcccaagtagctgggactacaggcgcccaccaccacgccyggctaattttttggtatttttagtagagacggcgtttcaccatgttagccaggatggtctcgatctcctgaccccgtgatctgcccacctcggcctcccaaagtgctaggattacaggtgtgagccaccgcgcccggcctctttcttttttttttaacttttaagttcaggggtacatgtgcaggttcattacataggtgaacatgtatcatgggggtttattgtacagattatttcatcactcagatattaaacctagtacccattagttatttttcctgatcctctccctcctcccctcttcaccctccaacaggccccagtgtgtgtgttatcctgtgtatccatgtgttcagatgctgtaggaaaggaatcagtgtagtgccgggcacacagcaagccctcagcaaatggccagggtggggagcacgtgcggccactactgtccatatccatccgtatccatgcatatccatccatatccaccaagctccagacatggagtcacctgcctccattgaagaggatgggacttagcccatttgttcctaacgagatttaaaatgtcagaccttttgatttgtttgtaaggatgcaaatctgcctttgttaacatgcaggacaaagggagaagagtgttagcttggctaaggtagggacccagtcgctgggggaggccacatgggcatcaaaggaggtggggctctgcgtgtgtaggtgtgccccagttaaagggatgggaggtctcccagccattggtgactctctggagctgcactgtcagacacagtagcggcgagccgcagggggtgacttgtagctcgcccacagtgagacgtgcaggaagtgtaaaatacacactggatttcagagactgggtggggagaaaggattgtgaaagagctcatkagtatttttttatatcggctgcatgttgaaatgctgatatttcgtgttaatttcacccatttatttaaatttttgttaacgtggctactagaaaaggttcgctggcytctgcaggagtgttggtggccccaggtggcagctgccctcctcctgcactgtccccttctccctccagatggtactcttggtacacagatacactgaaatgctggaggggcgtggggtcctggatgagtggctgatggggcctcgctctctggagggctgttttgggactggaattgcctgcgtggtgctccctatggatgtgtggccagcctggggccagcacacagcctctggagtcagccrggcacctgccgctgggccggcatcccttccttccaggaaatacccccagccaggctctatggagcagcacctcgcccttccagggccacccccagccctctggcacctcagcacggccccattctgcacagcggtgagccccccaggggcagcagctgtgtctcctctgcagctgaggcatgtcgtcgcaaccctgtgctgagcctctcctctcctgcaagtggcccaaagaggcctcaacaggggccaatgaccactggatgggtcagctgggcatcagaaggccttccaggctctgtcctctgttggtggccttggcggaaatgggagaatgaagggggaggaggggtggccttgtcctgggcccaggtggcagagagccctgcagtgagtaactgcgctcacacttggtttgaggccagggcagcatggggaggccgtccaggctggggcagctggcgggtgggggcagcggtcagtcctgccagtcactggcaccaggaagggggagaagccagagggatgactgaggcctcccactggtcctgctgtgggacgtgccctcagccaaggtcttctagtacggagcacgcacacgtgcacgcacttacacgtacacacacacacacacacaattgtttctgaggcagctgtcaggagtctgagaggccgagaggtggctgaggagtgggattcggccgctgactggcagtgagatctccttgtcaccttagatgtatccatttctcttgttttcattataaaatggcccaaagagagtgaagcctcggggttgggagagattgcaggtggcttagctctggagggaaagttttgcagggcctgctccccaggaaagcatcatccccgggcaggggtgtctggagcttggcccaacagggctgcccaagagccctggacagggaagcacaaagctttcttttcatacctgctccctgtggaaatcctgcccagccagggggcggccctcacctggctggcaggtaaaggccttctgggtgttccctgcctgccctgttcccaggactcctggcgcattggacatggctgctcccccagactcctcgaggtcccatccagccacagcgttcctgctgcccaggccctggacaacagtgtctcctccgtggggggtcctgtgccatgggtggcaaatcctcatgatgccatgagtcctgcagccccagagggtgctgctgccctgccgtgagaggctttttcagatgggacagctaggaccttggccaaggccacctggcaaggttttacagaagctggactggaacctggccgcccccagtcccctgggcgggtgcttttcctgcacttttccctggtagaatgtcctgcccttggggccacattttgcagcagtcacagggcctggcctcactccagggctccatgtttggatgcgaggcccagtgggtaagtgcactgctgcccacgcmcccccccmagcactgtctgctcctccctgcttgcctgcctgtcaaggcagccctcatcttccttggaggatggggctgggctgggagcctgcgccctcccattctgacaaatgagtagagggaagggacgttttgcccagttccaaggtgccctctctgtcctcagtggagaaggaagagccgctggcacatctgagccacagacccttcctgcctcttatatccccaccaacctgtgttcctgtggacatgccagaaaccaggccgtgtggcctctcaccaccccatcactctgttcgctgttccacgccacaccctgcagccaccacccagtcaaaggcgccactgcctgggaagcccctgcgctagtcctggtgctgctgtgtaaataaagccgcgatgcggagctcgcctctggtcttctcttattgtttacccaaggctggcagatgttttataagccccgaacgttcttgacaaacagtttgcccttcggagagggaaagtttcctggaccgtgattcccgacatcctgcaaggtcccttctagctgtggcctgggtgctgaaggggtttccccccagtggggtggccagccgatctaggattccagccgccttgcacaaagctggaagacgaggggctgcagggtgcatggctgtggagctggctgcgtcgggagggagagtgcccccacgcctggcctttgaccttggaagcggctgccgtcaaagcagcagcttgtcctgggtcttcccagacttcgcagtgacggatttcagagtgtttcctgttacgagaaggctgtggattcgctttggaacatgacagatttttcttctgtgctacgtggagygtgagggaaggaagtgaaactggtgttaatttttcagcagtcacatgtcaaagtgagtggctagcaagcaggggggtccaggctgtggtggccctggtcagccttccaggagtcaggaccctcctgctgccctcctgtgtaaacagaccagccagggcaatccgagccagccccggtggagagaaagggccagtgctgggcttgggagctcaccccaagttcctcgggtactcatcctggcagtgcagggaagggcaccgggaacaggcctgtggaaaaatccactgtgcaatgagtccgtgaatcccagacatcctctcagcagccctctggtcctgcccgggatagaggctgtggcttctggtgtaggtgggcacttctgggctcagaggggtcatttagctcacctgaggtcacacggagtgggacccaccccaatttaagcctgtacacttttttcttttgtctcttttggtaacagctttattgagaaatcactcccacgctgtataactcagtggttttcatacattcacagagctgtgcagtcgtcaccacaattttataacatttcatcaccccaaaaagaagcctcaaatcgtttagctattattagcaaagaccccccacattccacccagccccagacaatcactaatctactttatgtcatactttctttcttttgttttcatttttttttttttttttttgagacagagtctcactctgacagccaggctggagtgcagtagcatgatcttggctcactacaacctccgcctcccaggttcaagcrattctcctgcctcagcctcccaagtagctgggattatagccacgcaccaccatgcccaactaatttatgtatttttagtagagatggggtttcaccacgttggccaaactggtctcaaactcctgacctcaaatgatccccccgccttgacctcccaaagtgctgggattacaggcatgagccaccgtgtctggccttatgtcatactttcatttgaaaaatttagaaaaattaaattggcccaggagtttgagaccagcctgggcaacatagcgagacctcatttctattaaaaatcaaaattagccaggtgtggtgacacccacctgtggtcccagctactcgggaggctgaggcaggaggatctcttaaacccaggaggtccacgaggctgcagtgagctgtgatcataccactgcacttcagcctgggtgacagagcaagaccttgtctcaaaaagaaatttttttaaattgtggtaaaatatatataacataaaatatgccattaaacaattgtgatgtgaagtgaataaaatttgaatacacagcataatgaataacaaagcaaacactctaaggtcaagaattaggaggctatcagctccccagaagacctagtccctgattgacatgcccagtcctgcagrggcggccccgccttgccgtgggcacagtggccrcggtgactgggcctgctttcttctcccacatggctggcttccctccaacatggcgctggctcttccttctctgacctttatccaagtggaatcgcacactgtaccgttgagctgtggcttgttcatcgtgtcctctgtggctccaacacccctctctgcccgtccctcagagggaacatctgggtgggtcccagtttggcccttctgcactggctgccaggaatgttctggtttttgtctcctggacacatgggcgtgagtccttctggggcggatctgctgatagatggcagtgctgggtcatggaggagcatatgttcaacttgaccagatgaggccagacgggtttatgcccccaccacggggggaccctgttgctccccgccccgaccatcacgagctgttctgggagggaggcccatgttcttcccagtttacggtcctgggaggtttctggacattgtcagcatgtggcagtcccggacgctgggcctcctgagagagtggggaggagacccgaggcggaggcgagtgtgtgaaaggaggctggtggggtccacatggctcagcaggtgaacatggggtttccaggggcagacaccccatcgtggcccccatggctttggttggggcagcatcagcttcctcctctgctgggtttcctgccttctgttggctgctggggcaggggagacaggattgggaacagtcaccctctctgrtactgaccctcattagcattcttggttcctgagcaaggctgcttcatgtccagggcaagaggggaaagatgttaaaacctgaacccccctgctgggcttggtgccgcctgtgggaaaaccggtgggctgagggctggggggctctgagctgaggaagggggtcccaggtggaggccgggaggtggctgcagagtgaggccacaaggcctgggggttggcccagaaggtaggacccctgtaggcagcctcccaaccccaggaatttgcctcttgggaacgtgcaggtccctcgagggtcctggaaggcgctggagtggtgggacagggattgagggagcgtcagcagggccctctcttctccctagagccgctcaacacgtgttgcaaggcacgtgctctggacctggtgctcacacgtgctcttctcccaagacactccctgaagcgcgttccccaggagctggaagggggataacgcaggtatgcctcatggcggggccagtgctcrtgcttacacacactcrgcctcagctcgtctacaccctgcaacagcccagagaagccacccgccttcttacccctaccatttagatttgcaaatggaagctcagagaggtgaagtaacttgcccaaggccacacagcctaccagtgtcagaatcgggattcgaacccacctctgcctgactccaaggcctgtgcccctgaacattctcaagccaccccccaattagccaagtgttgctggagctctgagcaggggccgggcctcacaaaacaatagtagccagtgtgggggctcacaggactggtcagctcccgccctcccccgctttggccccctccacacacacacgacctgctgctgagctggacataagcaggacctggctctgggggcttctgacctagggcaggccctgaagttggtcattagaccccacccacccasctgagagcctggcggagatgtgacaggtgacagccccagaagtcccatcgttgctgcctttgtggttaaagtccgctgaacccaagcgctctcttcccctccagtgtgtggtggggaggtggggaggggacccaggcagatctgggaagccgtggccaggccgcagcaagcaggggaagaaggggcccgcagtgaacttgcagcaggagctgtggccaccgtcctagccaggccggccacctgcccaaaatgttctctaaccttaacatgaacctgggccacttgggctctgctggatgcccmcagggctgccagagcctgcccgccacagagcccctctgagacctggagtctcacctgagccctctcrctgcccacagggctggcctctgcctttccgctgctgctctgcggctcggggacacggccagggctggtggcgcttacagcccaggggcaggggagggcacatcccccacagcattcaccattgctgctgtgttctgatgcatcagggaatctgcatttttgaccctttgattgctacatcttttccagcctggaaaagtgaagaaggaaggaaagggggctcagaggcccctgactcctgtccttgcaggcacagctggacgcagttcttattttcaaccatcttgcagcagtggttttatttgtgcacaggttcctctgtgtcatgggtgggtcccaggatgtgaacccggtgtgctcctctagctccactgtcctcaggttggggacagccagggacaaggccccctactccagctccaaacgtagttccaggctggrgtgccytttgcccaggcccagcctgrtagccccgggtgctctccctgacttttcatgagcccgggggctgaaaccagagcagcagggagacagaaaagcccagccccaccctccagagggggagtccagctgcccggagaccccaagagcactgccagaatctgggtatgagacccagtcccctgccgcgtgctaaccatgtaaccttggacrtgatctctttgtgcttttttttttttgtttttttctttttgagatgcggtcttgttctgtttcctaggtgggagtgcagtggcaccatcatggcccactgcagcctggaactcctgggcacaagtgattctcccgcctcagcctcccaaatagctgggaaasaggtttatgccaccacgcccaactaatttttaaattttttrtaaagatggagtctccctrtgttgcccagcctcctgggctcaagtgatctccccgccttggcctcccaaagtgctgggattacccggcttgagcatgatctttttgccttgcttggctctgggtttcctcatgtgtcaagtggggctgagccccagctgtgtgggctgaacaggggagggttaagctcggcccctagagtgagggcccgccatggtggtggctcccgtatggcatatttccctaacggttcccatttggtctgtcctgctagaccaggctggtgggacgtacactgactctggggttctrtccaccccgtgggtgtggtccaccacatggtcatkgtggctttctagggtagacttgaccttccccactgcctttatttatttatttattattttatttttttttgaaacggagtcttgctctgttgcccaggctggagtgcaatggtgcgatcttggctcattgcaacctccrcctcccgggttcaagggattctcctgcctcagccttccaagtagctgggaatacagatgtctgccaccacacccggctaatttttgtatttccastagagacggggtttcgccatgttggccaggctggtcttgaactcctgacctcaggtgatctgcccacctcagcctcctaaagtgctgggattagaggcgtgagccacagtgcctggccttccccactgcctttaaaatctctatggtccccactgcccacgggaggaggcccaaccctgtcctctgttagtcccctggtccccgtagatatttaccaagcacctactatggccaggcgctgttgaggatgtgggggatcgagtgaatgtggcaggtgtcccctgccctctagggctgttcttccttctagggagggaggttcaagcccctctcctgatgcccagctggcctcccagcgtcagggatctctgctctgttggtcccctggagtggccctggggccaccacataacacttttgtaagaataagagttattttttatggcacaatcgcccctgccctgggtttgtgaatttgggggattcttttttttttttttttttytttgagacagagtcttgctctgtcgcccaggctggagtgcagtggtgtgatctcggctcactgtaagctccgcctcccgggttcatgccattctcctgcctcagcctcctgaatagctgggactacaggcacccaccaccaccatgcccagctaatttttttgtatttttagtagagacggggtttcactgtgttagccaggatggtctcaatctcctgacctcgtgatctgcccrcctcggcctcccaaagtgctgggattacaggtgttgggggattcttarggaaaaccacctgaaagtgcggggttattaaaaacagaaaccaacccatgcacccaccactcacgagcagcccacacagctcccacctgaccagggctcccccttctcatgggtgagtgaaagttgctgaaaataggcctcctggtgaggaacctcccagccagccctgtcagtggcactgaggctgcyctccgactgtggcatcccccatgtctgtcctcattactragcaaaaatttgtgcagaggagtgctctacactttccaagggtttaatccaggagctgagggccaggggctccatgactgtagactcaacatcctgggccacagccatccgtgagggggaggacgaggggccacgccctgcactctgtcccagcatcccctctccctggagccrtgcagagatggcctcatttcatcccacactcacatgcgggtcctagacaccrgctcatgcacayacacacacacacacacgcacacacacacacacacacmtgcgcacatgcacccacrcactctctttgcctgtgggagggcaggatcccagctgccccagcggggaaggggtgtggggaatcagccctgcagatgcggtgtgaggggcagacatggcatgctggtctttggcagtgtggtcccaagtgggggcggctggagaggtgccttgccacagggcccaggccacccgcatgcatcccatgaggcygtccaagcccgtctgccctgcatcagagaggacaccccaatgcggggagggaggaacctggtgaagccaggagcrgygggcaggggccagcaaggatccccaggcccccagggcagtgtgcatccggccttcttgcatgcccacctggcatcctgcctgccgcctcctgcctcccgccccacccctcctgcgtcccagcctggtggacctctcagggttcactctcatttcctcctccccacgccacctgctcgggccacaagagggcgccttgctgccagggatgggacaggccgggcctgctggagccagggccgatgcacgcacagctacatacactcacccgggcccacgtgtgctcacgaggggcccccatacccacacgatcccgcatccacatgtgcgcacgccaggccccacaggttctcaggcccaggccacacatccacaggtgcccactctcatgctggcctcatagtgcatgcacacacacacacacamatatacatacactcacgcccagacccccccacgccccaggccacacatgtgggcctgctcacaccccactcattccctcccagatgccgcrccacccccatgccctgtgtgccctctgcctctcggggccctggggccccagctccaagaaccacgggcttgctttagccaggcttccacaagcctgcccattcctcaggacactgaccctctcctctgccacccttcacgggtgcagacgatgagcatggagaacaccacagcgcrcagggccgagggccaccatcagagtctcctgcagccctggattccctgggcctgaagcaggcagagcggccaaggtagcctcatcagcctcaccagcccgtccttcttgtctccctggcaccttgtcagagagaggcctaagaacacgctctgggcattgggggcctcccagtgttccctgcgagtttggagaggccaggtccctgggatgaggacacgcccacccgccaagctcccctcctgccagtcccacctggagccttcatgcatgctgtctgcgcccttcacctgtcccaccacctcttcttyggcctgcctggatcctgccatatcctcaaggccttccctggtgatggaattccagagtcctcccaattgcaagggcctgagggatccgctgccctccaaccccacaccccgtctcaaggtcatgtgctaatcccgtgcaagctggggtgtgggctggctgccatgtcaagctcgtttctgttgtacccaaaacacagtctcacctccagaagaattacctggcactccctggagttcccgcagccttctcrttttcaaataatttttcagatttccagaatagaaagaaattccatacacccttctcccagagacagaccccattcaagctttgccaatcattccatgaactcctctagagaggggaagacccagtccggggccaggcagctctctctggtctctctggactccgtcctggagcacttccctgtcctcgcctcagttctcacagattgccagttttgaagattacgagacagtcattttgtgtggtgttttctcatgatacaacccaagttacgcgtttggggctagcattgcttagaagtggtgctgtgcttgttctcataggcatgtaatgttggtttgcccaaatattgctgatgttaaccttgacctcttgtttaatggcaaccacataatgtgtttttcccctttgtgattgatacgtatttgtggggagatgctttgaggtgatgcgatgtcccactttcatctgccagttttagtgtcccttagtatttcttgtttgaatgaatgatttctatgatggtcgccaaataactccatcattcttccttgtatttactcctggtgttttactttaaggaaagatgttctcttctttccactgattgatgtatgccagtgtgggctcgtggcttcctatgtaattcagtgggttatcgtctgttaaccgtcatcactgggatattcagatggtccccgaygcaggcactggcagccccttcaggctggccctgtgacctttcggcacatcctcaccgttctttgagcccttccttgcattttggcccaaaaagatgtttcaggttcatttgttcagtctttgcttcagccctggaatcggccatttctccaaggagccccagttccttccagtggagggcactgttkagaatctcagcccagggccccaggtgtgcttgtgttgtctctgggcattgctgctcaggccctggcggtggacagaggtaggaaagatgcgcatggtatgcaggtgtgacacacacatgcgtycgtgcttaccctacccacctggacctgcccaaaagcccgagctcacagcagtgcctccgattccagtccagcagcacagggttccttctcacctcatgcctttacacgttcatgccttccttccacagcagggagaagcctggcttcctcattctctctccatctgcttatcgctctatcccatgtagagccaagtccctgaccttgcctgtggtggacactctgcgtttgttaaactgaataacaacaatcctccctattgggagaaaccttttcagcttcccaggccatttctgcatttgtggttctcttccaagcctcttgggtaggcatagaaagtcttctctgttttccagggaagctgcagactcacccagcrtcacccagctggtaagggtgtagcaggacagtgccagcatgtctgtcccaactgtccctatggcccctatggaagattagctatgtggtggcaaagtgtcccgaggaaggggcattctgggatgttcasgtgctcgactgggctgggacttgtactttggaaatgagaagaagcccaggctcaaatctttgccccactgcttgctggcaggaagaccactgagcctcagttttctcatctgtaaaatggacttattttggacttacttcccaggtatcctcagcacctttattacaggagctccattaatacatggctgcaggaggtagttcagggaagcaatgggagtggaatgctgggtgcatcacggcctggggttgtcagcctggcctctgcaggcatctgagatattcctgagggcagattcagccaggccaacacttctggatagaaccacagggccataaactgagaccattgagggagactgcttggcttggaaaactcgcccagggaccrtgtgctctgatttgcaaaatgcaccccccagagcggcttcctgccttcactttgtgcagagttgggggcggcaggggcgtggggggttggatggaccatgtcacccaaaagtttgtgtcctcggatggggaggggagagcgtctgcccaagcacagcctggaggcttcccttacttccgatgaccttgtggcagtcagtgtcacccggacagagtgtggcacgccttggggaccagcccctcccagaaggataggcgcttgattggaaacgttgacttttcatttaaataagtaaaggtcaaggcctactgcatggcgaggaggagatggctcttccctgcctctgtcctcccttacccccgtgtgagtggacaaaccccccgtcctcacccaggtggcccgcttctgccacccgcactatatccaagacacagcccagctttgcaggcacttgccgtgtgctccgcagtgtgcagggtgatgagatgaacaagaccatgtggcctgaagggtcccacgctgcagagggccccagcccagggccagaccccaagtgtgtgcctggagtgactcaggggtgcgcgaggaggactcagtgggatayggaatgcaggggctgaggcatagggagtgacacaggggctcagggctttcccatgagtcgaggctcattgggttggcagggaccacatctgccctggtcgatgccctgcccatgcaggctctaacggcagagtttggggattggggcgggggatgcagggggcctggggtggggagcttgggggcagtgggccaggcaaagcagagccctttgctgtgttggaaacccctcagaggccctaggcgtgataagtgagtgtgacgcaggagagtctcgctgcatgggccacccacaattgcagagaagacgccctgcatgtcataggcttggcggcccatgccgggaatttggcatggccgtctttcctccggtgctggggagctcagcagctggaggcagatgctggattgtctttctctaccgcagcagggcaggtagcttgtcttttagtttgttttgttagtctcctgtatctgtgactctgcagagagccaacggcaggaagagggcagcaccggcacrtcggaggccgaggacggcttagacgggaggtccggaggctctcagcctgaccagccctggcctagggccggggaaaggcctgggctttggggtcaagggcaggggatgagatctcagacccacgacctaaccattgacctgcctgggccacttcacccctgcatgcttccttccctgtctgtaaaagcggatcacgtgaggggccttgcaggaagctctgaggcccagtgaggcccccgggagacaggcgagaccgctgtgagcgcccgtccttcccgcccggtgcctggcaggttcctatgcgctctcggggcttcgggctggggccctgctgcggcgaggggggtgctccccaggctggcgctgtcggtggtgtggctttggctgacacgaggtggagaggatcttgttgacctgaccgtataaagtagcagtgaggccttacaagtagttctaggcctggaaaggaaagggaaagaaagagcaatggaatctggtattttctcaggtgtcctggactccatctgaamgatttcgccatgggaaacattccttcctgggtcctcggcgcctattgttacagcacgcaggcacccgggctgtggcctaggggtgaaacctctctcgattgtgtggccataggtggttacttaacttctctgtgcctcagcgttgccactgtgtgtggcgatagcaacatgtcttcttcctaaggttgttgggaaaacactgatcgcaacagtgacagatgcaggacccactccaccagaaattgttccatgagcttgtttacccaccagacgcctgtatgagagagaactgacatcgtcctcactttgcagagaggttaagtaacttgcctaaggtcacacagcctttgaaccctgggagtcgaactccgtcatctatgctctgaaccactctgccacatgtggtggttactgtcagttccatttgtttccacacagctttaagttagtcctgtggtttgcttttattttatttttaagacatggtcttgctctgtcacccaggctggagtgcagtggtgcaatcatagctcactgcagcctcgacttctgatgagattctcgcatctcagcctcccaagtagccgggactataggcacatgccacaatgcctggctaattaaaaaaacatttttttttttttttgtagagacaaagctgttgctatgttgcccaagctggtcttaaactcctggcctcaagtgattctcccacatcgggatcccaaagtgctggaattagcttggcgtgagccgccatgcctggcctagtctggtgggtgtttaaaccttgctggcctttaggggtgcatgctgtgaagacctgtgggccagaggccaggtatcaggaggagacactcaggcctgttgaatcagctcagtgccacagggctgcaagagcagctgcttcaggctcctcaggccgtgggcccctgagcaccagttctgctctgctccctcaggggaactggggagatcaaggtggggcccctggacctcccctaattcagccagagaagctctcatctcttccggggtcccaggcaggattcccctgggctggggtgggaggttctgctgctttaaaaccactggaaaggcttgagaaccagtgatcttctgccctgttacagacgcggaagccggggtggagcaggcctgtaaggtgggggctggggccggcactgggtcccygggcttttccacccctgccgcrtgtgcgtgcagactggccctgcggtccatgggcttgggcctgccttttggcttgctcccgagtattttgcccagaggccttgtggctttcagggatgctgtctggggctggaagtcagtccttgttttgtcctggcagtagtcagcaggagggagaagaaggggttaacctgtctggaaccaggaaagaggaagcggtagtgttcccgcatgcagtcccaaatagactcctgctcctgctccgaggccaccccagccaggctggatggaagctccccggctgggccattgttccggcccctctccctccaccctgagaaagcccccagcccggtgggtcagggcaggacatggacaggccaaggctttgggctccagggaggccaagctgctggggcccagagaccctgctgtgtatcccagagccagagaagaacctccctgagggctctgtgagccagagggctgggggatgtcaagagacaggcagggcagggctgcaaggttagagtgaggggaggggtacctggtgccattttggaagggacccctgaaggcaggaagcaggacagaccccccgccattggcagaagacctctggaatcctgagatacttaaattccctgcggcagctccaagcctagggaaccagacagatcggggaggattggctagaacagtgcatcctggtgggtcgtgttggaagctctctgaggtccctctgctgctgagagatgaaggaatggagccctggctctgctgtgggatgccaggctgcccaggctccccgacctctccagcaacaaaaatcataaacacagcatatgtaatatataaataataaaagtaacagccatcttttcagaataatctagcacttagaatgtgctagggaacatacaagcacttttctccttatttacagtaagccttaaggtaaatttcatcatctccagattttaagtaaagaatttgagaatcagagacattcacagcaacctggtgcacccggagcctggctgaccccagcaccgctgctggcggccccacctcrctcgcccagtctccctgcttccccagccaccgtccagctacctygagagatcctgggagcatggtgattgtggggtgcatgggggcccgtgagctgttgggggtgtcagggttctgcccgtgagatcctccttgttgccagacatgaggacctggactggcagctgtgggtggcctcatgaatcagggatcagagatagcgggcagcaggcgggcccagcccggagcaagctgtgccattggcgatgcggggaggctggccccatcgaaggctggtgggactggtggagactcctgtccactgctcagcactaggcctgcagcagacaccatgagccccaaacttcccaaagcccttccccagtcccacaagatggtgtctgcggaccgtgcwsgtgagagatggcagccaggcagtccccacagggcacccattttcagctgcccccgcttctcagacaaggaaactgaggccagaaagccaggtggcccaggagctggcttccccatttcctgctcctgtgggccccactgcagtgcccatgggccgggctgatattacccgagacttcggagctctcacgggtgcgagtaatttaggctgcatggacacaagctgctggcttgagtcgccccgttatgaatgtgtgtgggtctgtgcccctttcatgtgctgccacagggcccacgagtgtgctgaaagggaaggacacggccaaggggccatggtggacaggagaccttcttgggggttcggtggtgtccttgaccccactctgactgagcactgccccaaggcactgccattccaggcccccttccctgagcctcccaccccaggcccacccacctgctgggtcctcccacctgcggggcccgccatgcggggtcaccatgcgagtctcaccatgcagggtcaccacacgagtctcaccatgcagggtcaccacgcgagtctcaccatgcagggtcaccatgcggggtcaccatgcagggtcaccatgtggggtcaccatgcggggctcaccatgtggggcttcaggagcttgctgagcaccctccccacccacggtcactctccctggggtctgtaagcctccctgggcctgagcagctcccagccttgctgctgcctttccacttcctggcagtgaggtctcctgggtgccttctctcagccctttgggatgttttttgtgaggaagggaggctttgatgctgtggagcatctgtagtgcccactccagtggcttcacaggagcagcaggctgtttgttctgagctgttccaccttgtgcctgccagaggggagatagtggacaggcctccctccccccaagtggtggggtggaccccctgcccgctgtggccccatacctgggggccacacaccactgccctgggccgtgcagctgctatgaagagtgtgctgctgagaccctggaagagacggaggatgaaattgtgttgccagatagtccatttgttgttctgagactcgcatgcctgggagaatcctgggaattaactagctccttctctcycatcccattttacagaaaagtgagacccaaggtggtttctgacttgcccagaggtcataactgcttggacagtcatggtcctcagagcccacgtttgctgaccagtgcaggctctcacagccactcagctcctgcagccgtggcgtggcagaggagggaagcacttcctgggatttatgctgcctccctgacatttcaaggcccttcatttctctaaatattggaggrgttgaattatttttagttgagcctcaagggatcagagaataagcttgcagcaacgttggcagatgggcttcttctagcagagagtggttattcggggcctcttattgagagaatcgggtgatttgaggaaatctggggtgtcctgaggcataccagaggacccccaagtttttcctgtggctcgtctgccatcaggaaaccaaaatgactcccctcgtcctgagctctccagggtgtggacctggaatgcttaaggggaggcaatggcatatctttaagatgagcacagctccggagccactcgagcacccaaggccacgtcctgctcagggcacttcgggcctcagtttccttatctttaaaatggacagagttggccgggtgaggtggccctgcctgtaatcccagcactttgggaggccaaggctggcagattgcttgagcccagkagtttgaagccagcctgggcaacatggygaaaccccatctytactacaagtacaaaaatttggccgggcatggtrgctcatgcttgtaatcccagcactttgggaggccaaggagagcggatcacttgaggccagaagctcgagaccgcctctactaaaaatacaaaaattagccaggcgtggtggctcacgcctgtaatctcagctactcgggtggctgaggcaggagaatcacttgaacctgggaagtagaggttgcagtgagctgagatcgtgccactgcactctagcctgggcgacagagcaaaaccctgtctcaaaaaaaaaaaaaaaaattagtcaggcatggtggcacacacctgtagtcccagctactcaggaggctgaggtgggaggattgtttgagcccagaaggttgaggctgcattgagctgagattgcaccactgcactccagcctgggcgacagagcgagaccctgtctcaaaaaaataaaatagacataataagagtacctaccacctacggctggggagaccagaatgagatatcctgccaaaagcactcaccgcacttcctggcacacagcaagggttcagcagttacccgcttctgctcattttcttggtgttctcatcagtatgattatttagggaaacttgggtccccagataaccgtggggaggggagggtttacctgcaggtgccctggcccagccgttcatgcagcgccgtgctgtttctgtgtctgtgcgcytcggtggagatgctgtgggtgggtgggcaggtgtgccttgtgctgtggcctcccgagacaaggagggctcccacctaagcagggtcctgcagcccaggcacrtagccctgccctggccctccaggtccacacggctgtgggttcccaccagggggcggcagggacttgcggccggggacccagcctggtttctcccgctttgcttcgtggccaggctagggccaggggggctgcgcaggatggggccttttcaccactgcctggagccgctcgcccaccaaccccactgacggctctcagtttccmtttccccgagcgcccttcaccctgaggcacagcacagcctcgtgctcctggccccactggcctgctcccttaagctgagttttgcctttgcagtttgagtgacatttttgctggggatccggggctgctcggggtggcctcgcacacccctgcactttggctgcctggaacgtggcttggggttcacggtgctccatggtttgactcacaggcagggttccagcagcagcagagagaaagagcatcttctccagccggccctacagaggccccgggaccccaaaggctgcactgaggtggccaccaaaaccagggggcagagtcctcctaagttctggccctagatctaggctccagatctcccgggagttggatccagaggaacctgggctcacttctttagcaggttctggacacacgatgcctttaggggctcaagaaaatgtttaatttattttaaaattagaaggaaaatatctctggaacatttagggccaaagaaaatgttttaatgttttttctcactttagaaataataattcaaaaatcyattaaattatttaacagcttttttaatggaggaaggggccccccaaatcacaaagtggccctgggccctgggatggccgggtgagagcctgccatacccacgcagtgtgcctgagtcctggagtgcgatgtattctgagccacccagaatggtgagtcaccaagaggcagcttggaggtgggccgctgcccctgcacactgtgcttgggggacacagccgacacgaccagcctgcagtaccaggatagacaatttgggctggagccaaacttgatcagagggaggctgactttatcgagggctsctttgtggcrggcgttcattgtggaaagagcccaggaaggagctctctgccttgcaagaacattgcctgtggctcaaaatggccacatgggatgcagttcctgaggtggcagaagagccagcctctgctagccccagacctaacggaggtgcggctcatggccaccctgaggaattccacctgggcgtttggtgtccctagcatatctcgaatggcaggctgaggctcgaaagtctcatgcctgtctgcaggacccccgcgtgagcctgggaccacccgtggggacagtgtgtgtctaggcaaatgccttgggcactcgagggggcactgaggccctggagggcttctgtgggtgggagttcccatgacgtcatccctcagtacaagctacgagggcttcttagaacacgctggacactggggagggctctaatggtatttgcacaaatttgcaatgttggagaccagagtggagtgggctgggcgggccaggccccggcccagatggggtgacctttccttcacccctacttccccactgcaagggtgctgcctccccagctcctacctggggagatgctgacatctggtcattcgcagagtgccctgtgcccacatgctgtccctgtccagacatgaaayggacagcaggagggggctttgaggggtctctcctgagacacctctcsagctgaggctcctggagttggaagcccctgcagactcggtggctgcctcaccaaaggctccatctgcatttgcccccatgaccttcccactgtgcctgggaccgcagttagagctgaccagcacctggggcagtctggggtctggggctggcgttcgggccagcatggaacacagatgccttcagtggctctggtgggcacggggcttgcacagatcggactgtgaccccaggctgtgggactcagccaccaagcgccttcacttatttactgaccttgaagttatmcagcacttatgtgtttacagatacctgcacaacagccagagaggtacgaatacatctccacctacaggtgagggcacagagaggttaggacccacctgaggggatgcagccagcaggtgggacttgggccctggcagtctgtttccagcctgtgygctcaggtccagggtctccstgggactggagagggcgctgggggaatggagccgcctcctgcatcagagcttctcctgctccagttcagcctgcagctctcctgcatccccaggtggggaccagagagaggggcaggctggtaccagcctgggggagggggcagttaccagaagaccttggtccccatcccagccctgtgcaccctggggcccagccaggctggaggcccatttttcccagaagcccacctctctgcctccttccaggggctcaccccgccctgctgcctcttcttgatcgcctccttgcccctactctcccctctgccctctcgcctcccctcacgttcatggggttttgtggacgcgcctgcctgcctttcatcagtggtgtccagccgtctccctgaccgaggctgagggtcctgcacatctaggccccgtcacggtcgttctccccggtccctgcctgcccatggctcttgccacagtggggatgcagcagctctgggttgagtgtctgtcgttgcccctgcactgmgtgtgccctgtgagtgggggctgctgtgccrcacctcactgccacccatgcccatctcagggtgtgggcccagcgggtcctcaggctgtacctgtcagggggctggatacctggacagggccttgtccgagggttgactgggagagaaaatgcccccgttccagctcgggcagtacaagccttcatcctcccagactccacctccctggctgctccttcctgtatggcccccacaggggttggcagggcgcactcmccagagggacaggagtttgtggccaacctgagggtagacactgcctgtcctccagacccctagacacccccggtcggcccaggtgcggggtctgcccgcatcccacagccatctttccagcgaggacagtgcaggcgcaggtggctgtaccgtggctgcggtgatgtgctgactgggaacggcagaggtgccctgggaaggcggaggtctgggagccccacaagggctgagccttggggcctcaaaacagggagtcttytctgggctcagggcctttctggagatgggacttctaggttgccagggccactagccgtgaggagttcagctgcccatggtggcggcggctgggctgtatcttgcacttctcagctgtgtggaggggtccgtggggcctgtctgggcccagcacagcagcgcacagaaaagccactttatatatttgggattctattaatccttctagtttgtacattttttatggcaccttcaatttttttcttttaaaaattaawrtatttttttttctgataatataagaaatgcatgccttctttggaaaatacagaaaatcacaaagamaataatccacaatcccaccttccaaaaggaaccacagttagcattttgttcagcctgttttttaaaaaacaaacaaacaaaaaatgcatactaaaagcaacgatttataaactgtggttgtagagttaagctcatacccagagttgccggcatctcaccagttcctctcctgggacagtgattgtgccttcccagagctgccgcaccctggcctcgcagccaagcctggtgacagcagtggggtgaccctgcgaggcccctcggatggctgatgctgagagcccagcagagctggagggggtaggggcagcctccccaggactgatctgacagacgggtatgtgcctcacccggcatcacccaccggggaggcctccgtccrcccccatgcartcatgctgggtccccccatctcgtgtcttctggggaatggagcggaagacctcccctctctggaaccaggggtgggagggactgtgctccccagaatgaatattccttggctgtgggtgagcctgccagcccagagtccccrggggtcagsagcagactggcaggggccatggcaacgactgggacacctggggagccaggtgtccaggcaggctccagtgtccactcccaacaagtatggggcattgagatcctgggtggatcacaggggagcaggcgtgctcaagctgacacagcccaagctgtctttattcaccaccagacccgaatccacctctgggccaacagtctcaccctgcaggaggcctggcacctgtgtttgtattttatcaccatgaggttgtgtgggctgctgagagcgtgtgcagagctctgggcacaagcctcggctctgtggccggctgagtggccgggcctcggtgttctcgtctctgaagtggggagaaggctgcccccgtcacgggacctcacagtgttagatgagattgcagmtgcgatgaggtgggggcccagcaggcctgctcagggcgtggctgtccctcctggtgcagacaccatcacgtggaaggcgatcacatcgagtgttctggccactgtggcgcgagtgcatatgtgcgcagggctgtgcatgggcggcctgggttgggcttcctttctcggcttgtctgggaggacggtggctcccagtgggtgtctccctgtctctgccccactctgaggatgtgggtgctttgagctgagtgaaggaggaacttctctaggagagagctctgcctgccacctccctggtgcccccgcccccagagcagagctgtccttayagrgccacagcctctgctggccccgaagcccctttgcagtgaaggggggctcctgtgtgcggctccctccagatggacaaaaaccaggtttggatgccggggcctcggctgagtccctcgcttctctaagcattcctttcctcgtctggaaagtgggggtgtagtattgtgcgaacctcccaggccatcccaggatgaactgagatcatgcccataacatagacttccgcctggtccctgctcagagctccccgaatggtcattgccacatctaaacaaatttttctttcagctgggggtgctggcggcccctgcagcggtgcccacggcagcccatgcacccaggcaggaagctgctttgtgcaggagggtctttgtgcaggggcagtgtgggcgagcctggcagcctcctgagcggcaggactatgcaggcgccttattgagctgtcagcggctggcagctgctcccaggtagcaggaagaagggccgagctccacgtgggcatgaaaggcccagcgggtgtgtcagggggcggggtggggtggaagtgttagtgcgaatgtgagtgtgtgtgcacgcttgcaggataaagatgagtttttaaaatgtgtctcctgtggtttttgatttttttaatctttcccaaaatcaatacaaacaaaccacaggcataatttgggtctgtaaaggccgacgctgtcattctgctgcaagagggagggaagttcagttggggggaaaatgcagcrcttttgctgtcattaagtccaatggtggctggcgacagtcacggcgctggtggagctcagagcagaggtgggaggggtggtattgaccaggcgtgtgtgtttccggtgtgtgatgtgagaacccagggctcgctgggatgctgtcctccctccctccctccctctgccaagctggtgggaaggcccttgccaaagcgcacaagaccccttcacacagcaggggcacaagctcttcgaggcagagtcgcctgcaggtggggtggaaggggtgcgccccagacccaagaatcgcccgcctctccaagaccatccctggctgctggtgagcagggtaggagggttgttggcacctgctgtggccggggccgtgccaggtctgtacacattgtgctctttgctgggtggcagccaccacgtattctcaagggcctgtgctaggcctctggcgggccctgggttgttcccttccttatgagctcccattattaactaaagaagacactgaatgatctcatgtggttgtatgtttttttgtttgtttgtttgtttttttgagacggagtctcactctgtcgcccaggctggagtgcagtggcgcgatctcggctcactgcaagctctgcctcctgggttcacaccattctcctgcctcaccctcccgagtagctgggactacaggtgcctgccaccacgcccggctaattttttgtatttttgtatttttagtagagatggggtttcaccatgttagccaggatggtcttgatctcctgacctcatgatccgcccgcctcagcctcccaaagtgctggaattacaggcgtgagccaccgcgcccgcctcatgcggttgtatcttggtgggtaaggcaggtctttctatgacccacctgccagcctcatcatccgtgctccccacctcaccatgcatgcttctgttgctgtttgtccacaggcgtacttactttgttttatatcagtttttagatacaaaaatagtacaggtagaattcggtattctacattttcagggaatatcacatcacacacacgctgctctttcactatggttttcatgttttctgcacctctcccgctcttaccccgcctcccacccagatttagctctgttaacccttcaggcttctttttctgcacacacacacgcacacgcgcgcacacacacacaggaggttgtcctgtttggtttttagaaatggaattgtcctgttcctctttgcaccttgctcatttcacttcatggtgcgtcccagataccactttctaagtcaccggcagaagcaggaccttgtgcttcctgatggctgtgagctgtcgtggcggcacacctgtcctcggtgtggagttccagttcgttcctgcagtcccctgttaacagatgtttagactgtttcccttttttccccttttcattacaaacaaaaaaaattgctttcttaaacttattttcatgtttttaaactttctaatttctcataaatatttcaactttagattctgtgagtgagtctattagtgtcaggctttgcagaggaaaggaaagttctagaagagtctgcagctcgttctcccaccccctgcccccagtgtccacccacagaggtgtgagcatgcaaatagggtgagcttctgtctcccgtctcttgggtgtcttttccacctggggcctccctggggccatgctgggggagtgaaaggcccctccctggaagcccgaggcccctggcctggatgctgtagcttgcctgaaagcggaggaattctggctgcctggtggaggtcggggctggccctgcaccgccaggagaagcagtctgagggagggctgctcaggctggacccagccctgaccagcskggccatcgggcgtcctgggccctggcaggatgtcgttccagtgatacagcacttccttgcttctaaactgctgagtggtcagtgtcggttatcagctgtccacatatrttgcataatctcagatgctggcttgtaacagtgagtggaggtgggtggccacactgtccctttagaataatccacatggccctgtccaggcagggcagcctctgggctcccgcccaccrcctgatgcccctgtgcctggtgagcctgggcyggggtgtgttcgctgtggatgggtgtgttccgagttctccggtcagcaagctccctttgtctctaggggagttcctgggaggtaaaggggagccttttcaagccacaagatcacccagaaaacctacgtaagcactaaagttcagaaaaatccagccagccttggagctggggagactgcttcccttggggcccgggccactccagagccatttccgtgatggtaaaatgagtgggggccccatgctgcctctgcctcctgtgaacgccatcctctggttcttcaccttcaggctcccgcatgagctgggtggttggtgttaactcctctcttctctctttctasccggaaccccctgcccagagctccagggagctccaccatagccagkagagggagggctctgtttacctccttccaagttcccaattttgctctactgatttttgtctgcggtgcataatcaatcagcctggaccccagagaggccttctgtcgaggtgggtgggtctcagaacggcaggctgctccccctcctacctcggggcccccactgtgcacctgcagctgaggcatgttttctggggttcctggctttggcctgcacggctgggtgggaggagggcatgggaggtgatgctgctcactgagcagggcctgctytgaccacctcgggatcaagagtcctgttagatgcccaggtagagacccttgctgggcgggcaggtggatcttcgagaatggagctccgagggacaggttggctgatctcagtgaaccctgaggcttccccaaggccatacagcttgtctggcagagcctcagcaggagcccgggtccccggacaccgaggctagctctttctgctgtggccttctcacagaccaaggtgggatcrcagccttggtagccttgaagtctccctaacctggcaagacagtggagaagggggacagccagcgggacattccactgtagaataaatacatgcatggcaaaacacttgayatctattaacttctaagtggcaagagtgattcttgtggttagacctgaatgggaacttgtaagtctaaagtgaaaatctaattagatttttcccacaaaacaattttccgcaacgcattgtggacataaaggtttgatgaatgtatagccaggcacagtggctcacatctgtattcccaacactttgggaggccaaggcaggaggattgcttgagcacaggatttgagaccagcctgggcaacatagtgagactctgtctctataaaaaaataaattagcagggcatgacggtgtacacctgtagccccagctactcgggaggctgaggcaggaggatcacttgagctcaggagttcgaggttgcaccatgattacacctgtgagtagccatgcactccagcctggacaacacagcaagaccctgtctcaaaaaaaaaaaaaagatttggccaatgaattttatcagctaaactgggatatttaagagaaaggaaggaactcctaatttctgagccctggttctgaaaaagctttcttttttctttcttcactttagtcttgttagcaaaaccttaacagttcatagaagaaatcattttttacttttttccccttaatctgagcacaacatctggggttgccatggtggtccattggtggtgatttgcaggacgggaccttacatctggggaaggggctgccaggctgggcctgcctctggccctgtgggcatggccggggtgggcatggccgggaaaggcatggcctccagaatcagaggcctgggttgaatcctggctgagtgcctagtggggcactttgggacaaatgaccacctttctgagccttgcttttctcatctgtaaatgggggtggcaatgcctacttagttgaatgttaaataaaatgaagtcgtgtctgtgaagcacctggcatggtaatcggtggccgtgaggatgacgctggcctcgcagggactgggtggcacaggtgycctgaccttggcatgcagggtggatgggccaggcttccagccagtgctggatctcagaggcccaggggttagagaactaagggcctccgagccaggctcctcgttgcaaatggacttctctcctttgcgtgctgtgaactgggcgtgaacacctcctgtgatggggagctcactccttgccgagggagcctggtaagctgccggcacagtcatcctcataccctstctcctgacctgtgtcttatggcctctgcccccaggcagctgcggggcagggggctggggtgacccccgtcttggttgttgagcccttccactagctggagggtgactgtccccccttctcccccgacacaaggcacagcctttcttgtggctgtcaggagagagggcctgtcctcctttgcgcccacgctgcccctgcgccttgtggcactgcattcaaagtgagtgcgcctgcttttgtttcttcctaggacttctgaaaacgtgtgggtgggggagggtgtggagggttcgtgcaccgggtggygtggctgcagtggcgtgggaggcggccccagaggggcagaggcgcagtgtgtttatgtgcacagggccgttcccttcctgtccctcatgtgaacaccagtgtacaaatgtgtgcacacaggcgtgtcccccgtgccttttccctaccttggctgatcgtggggaagatagactcacttcccctctccaggcggcgattccggaaaggaggctctggaatgccagctgggggcagggaagccagggcagccaggagggacctagcaggcccacagaggtctgggacagctgagccctcctgcccacggccctgccatccctgtgtgtccccaaggtaacgtccaagctctgcagcagggaccagccctgggtcccacagaggaggctggtccaggtggtggactagagctccgcttgtgccagcctaggtgcagaggcccggcccagcccttcctaaccttgccgtcctgggccagctgttcggtctctgcgtgcctgtttctacacaacccatctgtaaaatggggccatgggagccaccacctcccccaggcctgtcgccatcactggcacctccaccagcattagcaccagtgtctccatgaagttggggttcctggggagatggctccccccagcctcgcctcctccctgcctcagagactgcgcagaaggagggcagctggrctgatgagcarctcgcctggggccccagagaggcccgatcccatcccgctggggcacgccccaggtccaagcctgtctgggcacccccagggctctggactcacctccacccctccctctgcatccttggtggtgacaccatcggcaagtttggcacccccggccctcacactgaccccagcaccccttccccaggctctggtggactccttgctcacrctgcctgctctgcagggtgggggcgggggggcagagcctgccagcccctcccacacttccctcaccagatcacaggaccctcggggtggaggctggtgcgtggggaggtaagggtcaggtggtgggaggccatcctcagcaggggtcccagagtgggagacccagagctttaggaccccaccatgcggaggggccagggtccctgggatggggagaggcctcagccagggtgagcagaagagctgcagcccctgagacccgcgggcttggccggccccccgggaagaagacccacagctgggagggcagttcatgcagggcaccctcccctccacctgccggccttggggagcaccaggcaaggctccctggggagcagggctgccacctctgacctcgctccagcctgacctcaccacggaggcgcacgcaggatgtccgcaggcccccgggtggcagcttcctacagtgcttttccaccagggaccgtgctgaggcccagggccctgagaccctcaggcccatcacagcctccccactgagcacaggcacgtccatcccctccccttctccacctgtcacctgtctgtcttccaggcttcgtgggacttcccagtgccccattcctgcttgtcagaagaggggctgggagaatggcagggcctggcactccaggctgcccctgccctcctgcgctcttgccctccagcctttccccaccctggaagtgagttcatgatgttaatggcagcagcagccatggtgcaccaggcactctgctaagcactttatgtacattcttaaattaccggatccccattacggaaacggagtcttaggttgaaaaactacttgaccaargtcatcccagctgtaagtggcagagcaggccctgaatccaggcaacccaggctgatcaccaccctgccaccacccacccctctctcacatacaggctctaggcctcctgtctatactggaatcccccacagcagatccacatggagctgtctaaagaagcacctgcccctcccccagacaaggcaagaaagccatctctacctggagggagagcagtgaggggcatcattaatgggctgttgggtgtcctgatttctttgagagaagacgagctgagcaggcacagctcttaatcctccarccactgccccccaggctggggcctgccagcccccgcccctgtagtcatttctaaatcgggtctagatggactggacrcgtggctgccagagaccatttgaaccccctacctccaaattccccarggtccccgcctgcaaaggaccagccccagcatgaggccctgaaagtggcaacatttcaatagcctatcctggacaatcaggacgatccctttrctaatttatatgctatacgtttggggtttaattggagcgtaattgtaatccatatgctgttaaggtaattacacttataaacctaatataatccatagatcaatgggtttggagctaattaaggcaaccgtaattaacatttaccaaaaaccttgcaattactggaatatcctttaagctggccttccgagctgataatgagcgccgctcagcgctccgcggcctcctagcgtgtctttattctgcacaagggggccttctggggacctcgatgttgggagggcagtcagtgcctgcttttagcacccagggactctgatcagggacccagctgatgagtggcagcaccatgggaagccaggtccctgtgacttggccatccccagaacacggctgattttctggctcaatagactcagcctgacaaaggggaacttggagaaagagaacaagaaatccatatgctgagctgggacagaacccaagtggggttctcaygtggggagcatatggggctttcctcctgcccaccccctgcacctgcagccaggatgcacctgagctcggactgccctgaaaccccrggaaaatcccaacagcggcaccatagggccaggattacagccattctttttttttttttttttttttttttttgagacggagtctcgctctgtcgcccaggctggagtgccgtggcacaatctcagctcactgcaagctccgcctcccgggttcacgccattctcctgcctcagcctcccgagtagctgggactacaggtgcccgccaccacgcctggctaattttttgtattttttagtagagacagggtttcaccgtgttagccaggatggtctcgatctcctgaccttgtgatccgcccgcctcggcctcccaaagtgccgggattacaggcgtgagccaccacgcccggcctacagccattcttgaatgttgtatgactcccggtgatattgtcaccttgggagctgcacagagacctcccccgggccaggcccctcctctgtctgcagaaggaggtaaggggcccaccacatctgtcttaccacaggctaagctgttggcatctgttcttttcctgctccaggagggacagagcccccctgttgtccttgcggcaccatgctctgggaactgggcgctcctgtggacagctccatgtgagtcttcttcgagagactccactgcagatagaagaaggcctcgagcctgtagttgcggggcggtggtcagcctgggctgcctggattcagctcctgctctgacatttacagctgggacgacctgggccaggtagaggtttttcaacctaagactcagtttattatgtatttattcatttattcattttatttatttattgacagggtcttgctctgtcacctaggctggagtgcagtggtgcaatcatggctcactgcagccttgaccttctggactcaagtgatcctcccacctccgcctcctgggtaggatgcatgcctgaggtgggactactggcatgcaccaccacaccggctagtttttaaaattcttgcagagacagggtctccctgtgtggcccaggctggtcttgaactgggcycaagtgatcctcctgccttggccttccaaaatactgggattacaggcatgagccactacacccggcctggactcagtttctataatgggatatggcagtttaataatgtgcatgcagtgcttagcctagtgcccggtgcagagccactgcttcattaatgctgctgctgctgtccttgtcatctctatcattgacagccctagacgagctgaaggggtgggcccaggtgggaggggccaggtgggcggggccaggtgggctgtctgcacctcgcttactcctgggtgggctgttagcttggcgggtcccagggctcacttttgccccatcatcatttctgtacactttttccatctctgggccttagggcctttccaaagactttgcaactctggcagatatttctagacagaattaggttctttaacgaaggaatgaggcaaatgtggacaggagattgttcataattgcggctgtcatttattgagcacctgctgtgtgctcttagcctctgggctaaacactgcacagacataattcactgattgccaacagcagctttatgcggctggcattttagtctcactttagggtgaggaaactgaggctcagagaggctgaatcactggtttgagtacgwccagcgagagggcagctgggccaggatttgaagccagccattctcaacaccactgtgctctctgcctcccgagtggaggccctgacccctttgctctcttcctgggtgggccagtggggatgggtgaggggtgagtgtgtcaatgtttccctcagcccagtagtggagaacaggcagggtgggcgaactcctggctggaccacagccacaggcctgcaggaggcacccttgccagggcgagtgagcactgtagtctgggagaccctagagtgagatgggggctctacaaggcacagctcctccctggaggaagggaggaagggagggtccctgccttacagggcctggccctccccacttgtccaaagcccggctgggtcctggtgtgtcagcgctttgcagtacaccctgtgctacccacccaacctgtgtccccgtctgatctccctggaccctcccacagcctgggaagggtcccccagctgtgaggtcagcatgggggaccttgctctgcagagggcacctgtagggctggccttattggagtccctcctttctaggcccacagtcctgcgctgcctggtgtgcggggcctgaatgtcattgtttcatatattttatctgattttctagttgctttaaggtactttgtctatcttgactgttaggctctttatttttcaaaaaaaaattcaatataatagtttgcattttttcttattgataataaaaccaytgacattattgagctcttgttctgggctcagytctgccccgagctgtttgtacatgttaccttgctgaacctgcacccaagtcctcaggccatattcccccttacagatgaatgaagtcactggcccgaggtcacacagctgggacgtagtgcaaccaggctgggccctagctggttgaccccagtgcccactatttatttggtgcttacatgcactggctcattttgtctctacagccttgcaaaggccacagttatgagrtggcagaggtggtattcaaattcaggcccctaaacttgtgtctgtgttccctcttgaaaacttcagtaaactgaagaagtgaaaggcagagggtaaaccaccgaccagcccaccatccagaggtgacggtgacctctgatgccgctgggtgtccaccttccaaactgtgtgcacaaatgtgtcctctgtgttctagtccacaggtgaggtcaggagcacaggctgttttgggacatctcttcccagtgcccagttccagaacacccttccaaaccaccgtgcattctccgggkccatcgttttaatggctgcaccctgctcccgcgtgtggacgyatcctaaacagtcccttagtattatggttagatgctccatgtgtttccaattcttcattattgtaaacccaactgcattgctcatccttgtagcatagctttgcacttattttggatttttgctttaagataacttctcacacatggaattgctgggtcaaagggtatgcaaaattctaaggtgtttggtacttctgcagaattctccctccagacatcaagttgctctcccatctgcactgtggataattctgcaactctcgacaccctcaccaacaaataacaccgaggactagcagtgtcatttttaaaacgcgcctccatcartgggaaaagaatgggatcttctttgattgataatgagactaaaggctttttctgtcttcctcagtcrctgatatttgtttcttctataaattgcatattcatatcctttctcagtcttttttgtatgttttttaaacgaaggctcttctttaatgggaaatctgcatttcatcaaagatggagcgcagagtctgtggttcatttattctctggagaagatgcttcttttttgttctctaaccaatcagagaccagcctgaagatgctagcaaattaatttcaggcgcacgagacaggcggtcggtgctcatgaggatcctggctgaggaaatcacattttagtcccaactcctcgaagtgttgaggccgcctggagtccacgcggaccagggttcaaatccccactcggccacttcctagcagcatgactttgggatgtccctcagccatcagagacttcactttctgggctgtaccatgaggtgttggtgtgcagtttaaaggaagtttggacggctgtggtgtggatagttctgagtgctcagtaggcagacctggttttgagctgatagagaaggcccacgcgaacgggcagagctgggcctcgccagggcctggcactcagtagtgctcascaaatgcctgttgcacaagggatggtgcccaggtaacctgggtgagctacaaaccagagccgctggacgagttccaaagggaactcgggcgcactagccccctttgtttgtgtttggagtgggagtcaccatatagctttatttgattactttttacccaaatccccatatcctcaggaattcaaggacaaggatacataacaaaatgatttttgtctcagagtaaatcacagtccacttggaaaatctccatcctagaggagggtgagggtgcaggtcttggggtgaggctggggatgaagcctcccatgactttgtggttaccctgctggtgggctcactccctgcagggccattggtggagtcacatgatgccaggcaaggctggccaagcagggtacagagcacactgggggagggatggctgcacaggcgtggaccgtgggggatccagggtagggatcccacctgggggtcttgggctgagtggtggagcgtgttgcctgaacacatgagcccgtggacatctagtgagcttagggcatggcaggggtggggtgcgttgcctgcagcctggggcggcctcggctccttcatgtcagcgygtcctgacaccgtgacactgcgcatggtcacatggagcctgtcctcttgtatctgcttcatctctggctttcctgtccatctgcctggtgctttggagggtgtaccaggctgtgagggagaagcagccacgtggctccgttttcttgtgctgcagctgggccarcagatctaggggaaaggccacttcctagtggcctttctggtgggagggagtcatagtgatgagtctggaagctgagccctggcttgggagcagctggaaaggctgcctgtggcctccctgagtggacgtcctctagcagttgttcagcctccctgtccccagccagccaccacctagttggcactcccagtgggccccacgagccgcgtgttgctgtgcacagcccttacgagaatcccactttccagatgagggcgacaggaggaggaagcatcactcacttgcccaaggtcccaccggcaaggggctctgagtctggacgtggccctctgagctgctctgtccccgcttggcgttggagcgtctcagcctctcccaagagtgtgtgcccttgtgtcgctggttcagaagccagaaggcttccaggggcagacctaggcagaagccctgagtgggcatcctggtcagccctgtgggggttgggggccagtgggcaggggcactcaccatgctacccaacccccyatggcacccccaatgtggaacgcacgggctcaggactcacttttattttggtagagcttggagtccccatttccatgttttgtttttctttacagtcccagtgtcaagcttagtaggacacagatgtctcagcaaacaaaactaggagccatccgagcaggcccctgcggccatatgcattcccatgcgtagcgaaaccaggccctcttgccaagcactctttgggaggatatttggaaaaratgtcaaggcattcatttttctctcgaccttttctgttggaatcgtggggccttaacactggaagtaaaaggagttataagacacagctggcttcctgcacccgggacagccccagtggccaggcctggccctattctcccatctggccctcggtggtttctgcagaggttaccatgcacaagggccaggccgcggcccccacctatgtgcaaagaagttggcaatgatgtccaggtagcaggtgcagcgggcaaggtttctacccccaggctagttaaggacacaggagactcgaggagggagaggaccagcagaggacactctatgggggtggcttctggcaaaacagtgctatctgaagatgagtttgaagttaggaatgtttgctgagttggcctggatattggaagtgccctttcttttgagccctttggctctcttggcgttgaccatctgctggtggaacatgggtgggctcccagagcacctgcccctgtggtgtataccagctggatctcagctacacctacggacctgcactggtatagatttgggtcccaggttccccaccaggggcctggctggcttccccaggtccacacccttccagcgaagtcacatcacaagttgtgtggaaatggaggycaccaccctggccacagaggtgaggctggtgaggcccagagtgtacctgttggggatgctgcaacacttggaaatccggctgcccraggctggaagccgtcttgctgcgtatgtcaygtaggataatgagtggactcttttctcagtcctggaggacttcctcggccagtctggagtaagccatggctggggagatcagttcttggaagtgctgggttttcctgcatctttggtcctttggtggcacaggccttcccttgcaggcctttggcacctgtctggggtgtgtgccattggctcagtagcccatgggcagtaagttccgtggaatcaggcacattttcagccagcgctgccaagtgctccctgcaatggtgttgccacctgaggtgccacccaaagcagaaaaccctggggctgggcaagacagcagctttcaggagctgggaggaggcatcatttccactttccaggccctgcgatctggtttgtagcctgtaccrgggcactggagtcctgccttggcacagctcatggtctagaggaataacctcaggtccaggtgagacactcagcctgtgatggcttcatatggtcactacgttgttgtatatggagagagractctttcttggttttaaattttgtttttaattttataaatgtaatatattcacatggaaaatttggaaattataaacaatcaaaaagaagcagctaaaaaaagtcctttcataatccaccggcaacatcagttaacatgtggcatatttccttcccgtctcctccactcccattttttttggacttcttaaacataattgagattgtgttttatgtacaattttatagcatgtacttgttagctttgaaacagacccatctgcgtttgcaatttggcctgcagggaaaagaccagattgctgagtcttagctaaagctgtgggagaaggaaatctaaaaataccctcctcgttggcctgctcagggagcgccgtggcctcttgttctcctccctgtcagtacagcagaattagccatgactcagagtgggtctccgtggtgattctgcctctagagaacatgccgtgctcccgacgtcaggctcacaggtgagcrggggcactagccggggacgaggggctggagcctggccggcccaactacagaggggcctggggtttggctcctgccggaggagcccctctagggctctccggggtcttctgcagagcgaacactttgaggggagcatctgtcagagacacatgatgcttcttcacccaaagccccaccctggctgcaagaggagaaaatcaaaaccgtgaagagcattttagagacttccacttccagcaagatggagcagaagtgcctttccctattcctcctgccaagtgcaatgaaaaaccctggacgtcagttatgaaacaaacagaagaggctgaaaggaagagaggagaaggcagactgaccagggacctcaggacctggggatcagtggaggggtgaattccctgggtttcctttgtgccttgcacatctcagacgtggagctgaagaagccagcaagagcctctgcagaagcctgctctccctggctgaaggaccaagccaggggcacctggcgagacagaaaacrtttaggcaataactgtggtactccagccaaacaccacagaaaaccctgtggccccctcagctactcgtgccagcaagggctcagcagggakcctggaccaaaacactgaccaggctgaaatgagcccctaccactgggggtgtcagagaaggccaaggagggagccaggagcagggtgggaatgaggtcccccagctggagcatcagtggagaccacatggtaagcctgtgcttcccctagtcagtggtgacaagacatcccttcccctcccactggacgggcagcatcatactgaagagtcaggacttcatygccactcagaggttacaaggctatccgccccccccacaacagtgacaatggagcccgcatgggacacagtaatgagggattcctgcacctcccaaccaggggaaaacttcctccttgaagagcagtaatgagagcacctcccccacctcagtgtcagcagaggccaagtggggaacctggacgtccaccccacccaagcagaataaggcagcactaccctcttcccctgcctgagttgtgtccagagaaggccactgaaagggaaggtttaaataagactcagagtctcacaccacacacccaaaatgtccagcttgtggtacaaaaccacctgtcatgctaagaaccaaggaaaccccaacatgaataagaagagaagaccaacagacaccagcactgagatgacacagatgtcagggcaaagactaaaacagctactggaaaaatgcttcaaccagcaattgcaaatatgctcaaaacaaatgacaaagtagaaagtctcagcaaagaaatagaagatacagggccaggtacggtggctcatgcctgtgatcccagcactttgggaggctgaggtcggtggatcacttgagcccaggagtttgagaccagacctgggcaacacagggagaccttgtctctacaaaaattaaaaaattagctgagcatggtggcacacacctgtagtctcagctacttaggaggctgaggtgggaggatcacctgagcctgaaaggtcaaggttgtagtgagctgagatcacgccactgcactccagtctgggcaacagggtgagaccctgtctcaaacaaacaaacaaacaaacaaacaaataaatagaagatacaatgaagagccaaatgaaaattttagaactgaaaaatacagtagccaaaatagaaaactccatggatgggtttgacagcagaatcaaggggacagaggaaagagtctgtgaacttgaaggcaggaaaatagagatgacccaatcagaacagagaaaaaatagactgaaaagaatgaacagacatttcaccaaagatgatatccaaatagcaaataagcacataaaaagatgtcatgagtcactagggtaacgcaatttaaagccacaatgagacatcactacacacctatcagaatggctaaaataggccaggcgtggtggctcacagctgtaatcccagcattttggaaggctaaggtgggtggatcacttgaggccaggagctcgagaacagcctggccaacatggcaaaaccctgtctctattaaaaatataaaaattacctaggcatgatggtgctcgcctgtaattccagctacttgggaggttgaggtgggaagatcacttgaactggggaggcagaggttgtagtgagccgagatcatgccactgcacctcagcctgggcgacaaaacaagaaagataccatctaaaaaaaaaaagaaaaaaaaaaagaatgactaaaataaaaaatgccgatgagaacagtgagaatctgaatcactcagacattgctggtgagaaggtaaaatgatacaaatgctctggaaaatagcttggcagtgtcttaaaactctaaatgtaaaactgtcacatgactcagccatggtactcctgggcagttatcagagaaatgaaaaattataatttacacaaaaacctatacacaaatgttcgttgcagttttattgataatagccccaaactagaagcaatccaggtgtccttcagtgggtgacgagaggaactacatccatgtcatgcaatagtactcagcaataaaaagaaacaatctctctctctctcttattttctttttttttttttttttacataaaatccagatcctgcagaaaaaagaaacaaatttgatactcacaatgacttggatggactcccagtgaaaaaagcctatcccaaaaggttatgtactttctgattccatgtatagaacatcctcaaaatgacaaaattctatcatgcaaaacagatactgttggatggggtggggyggggcaggagggcagtgggcgtggctataaagagcagcctgaggggtcctggtggtgatggaaagcttctttatttcactgtatcaatgtcaattgttgactttgatattgttctatagttttgcaatatattactgttaagagaaactgagtcagtggcgttcttacaactgcatgtgaatctccaattagccccaaattaaaagtttactaaagcaacaattgaacaagaaaaagaaaagcctttgtacctagcaacccagaatgcctatgataagtggcaggagctgatgacaggcgttcttggttcagaacaatgacaactctgggacaagcatgccgctgggagaaagagaccaggagctgcacagccagacagatgcttttgcagtgggatggcrgtggggrgttggaatggttcatcatttactttttatatttaacacttttttttttaagagatggaatgctctgtcacccaggctggagtgcagtggtatgatcgtggctcactgcaacttcgaactcctgggctcaagcgatcctcccacctcagcctcctgagtggctggacctacaggtgcacattgaagcacccagctgatttaaaaaaaaattttttttttttttttgagacggagtctcgctctgtcacccaggctggagtgcagtggcgcgatcttggctcattgcaacctccacctcccaggttcaagtgattctcctgcttcagcctcccgagtagctgggactacaggcacgcagcaccacacccagctaattttttgtatttttagtagagacagggtttcaccatgttacccaagatggtctcaatctcctgatctcgtgatctgcccaccttggcctcccaaagtgctgggattgcaggcgtgagccaccgcgccyggccaatttttttttttatagagaygagtctcactgtggtgcccaggctggtcttgaactcctgggctcaagtgatcctcccacttcagcctctcaaagtgctgggattacaggtgtgccccacygtgcccagcctcggattgtcatttagcggtctgtctgaacatcagtctcctgacgtccttcctacagatatgaacagagcccctgctaggcatgagtattcggagcataagctcctggttccccagtgagagacggatgtgtaaggaggcagtctcagggtaggatgttgagtctgggctggggacagtgcactgtgccgtggaattatggagagtttttcctcctatctctaagtccaatgtgtggcatggttatattacatttttaggatggaaaagttataccatatatttaaatgaattaacagcatttgcaatgatctggatgagattggagactattattctaagtgaagtaactcaggaatggaaaaccaaacatcttatgttctcactgatatgtgggagctaagctatgaagacgcaaaggcatgagaatgatacagtggactttggggacttggaggaagagtgggagggaacgaggtgtccttgtccagcaggcgctctgtgtgaggctccatgcatctttatgcattctgctctgatgtttgcaaacacgacgcccggcaataagtgaggcccccctgaggtactcaaggggcttcactcgctgaagctcccctccccacagcaacctgagcttctgcaaaagctgagaagcacgcgtgagaagggcacctcccctgcttggaaataattttttggttgcagtagggggttttgtttgttgtttgttgcttgctgctcgctagcttgttcttgcagaaggaagagctggtctcctttgccatcccttactgagggtcgagaaatacagacaggtgtcttcaggctctccgtgcaggccatagtccccaagaattcacttgtgagcctctgtggcagtttatgttgaggattaggtttagtttggggagaggaggatccatggagctggggttccagatttgatgtctaattttagaaaggacactatttttaaatcaatagctgtgcagcctagcatatcactctgaccctgtgcccttaagggacgcactggggaggacattgttcaggacggagcctgacaagaaaggaatgctaccccacgccgtgcaccccaggcggccactgtcgtccaagaatttccaggtcttttctggtatcacttcttggcacaggcggaagaagccatgttcccatcgtcccaacatgcagctggggacctggagaccgctttggcctttctcaaggtcacaggaaggcagggggaaggctggcgagggccctgtggatccaccctgctccagcccggcgtcgggttacagcagtggggacaggagggggaaggggtgtcactgcaggagctaaggagaaatccagggttgacaccctcagaaactggagaagaccaagaaagcagagcggagagtgccccctgcagtccgcagagggcctttgccgaggtgggcctggagccgtcgccgtacccctgggtggcccgcaaggccaggcttggctgcctggcaatgtttgttgtgggcagttgccatgccactccggcggcagcaagagcagggacaggtgtggcagagcccggtggttccagcccagcctggcctcccagcatcaccttctccagttacttgaagtgggccaggtcctggagaccgggcgtgtggttatgggctctccagattcttggcgccttcctgattgcaggagtctggttggcatcatgggacccctgggagactcactttcaggaggggttgtcctttcccccctgggggacacactctgcttacttgtcccctgggagcgctgggcagggagactgcaggtgccagccactcctgcagcttctgcccagcctcctctggtgtcctctgcactgtcaccaagccatggcctcaagcaacttgtgggtgcctgtgatttaggccttggggtgttggagcctgcttggacccactggcaggagtcagttgtgatgtcttttgccagctctcttctgtagcttgaaattggccacggtggaagtatttacaccatggaagttggcaaatgcacggacccagcaccccyaccccatcccggagagccagttaccagcacacgtctgccttttggggtcttttgtgcaggactgatggatggagtcgcagcagacacttggcctggccactgtgaggctgtgtggtgggaggtcgggggcacctgagacagagggaggaggctgagagtctgagggggcagccagggctggagggccatttgggattctgttggatttccctgcactttgtccaggggcagaagcctccctcccaaggtcaggccccatttctagccgtgctggtcgcacatccctgtgagcaggggtgcagaagagaaatggtccctcaggagccccacacccgctcccatccagctctcctccagatgacatctccaggcactgggaccccacagaggcaggccctgctcagcctgcagagctcccggtggagagggagggcgggggtccaggtggcctgaggagaggggtgcaggccagctgagggggctcccagaactccacgagctcagagacgggctcttgcccttgcagccccatccttgggatgccccagcccttcatccagacctctgctgtgattgtgtcaggacctgtccctgcagtggactggaagctccaggtgggcaggccttgccgtggtcacctgtgtccacaggcctgggcagagcaaactgatgagtgtctactaaatcagagagaagacacaaccagggagcgagtgcacgcccgggccgaccagggctgcgggcatcatatcccgctcagccgctgcctgccctccacgcgcccctggctgcctctctcagcctcggccccctccactcatgagtgggaataaataagagagtagaaaacgtaagtgaggttcttgtctggccgccyggctcatagcaatgtttaatagatagtaactggtgttatgactgaagacgtcctttgtgggctaytggagttcttaayatccccgagtaaccacagggcaacgctctggcttgacaaggggygscactgctggtcagcagcccagccagccgcagcggccacttgtgttcccagctgtggcttgtgatctatggtcgactgagctgttactctcctcggttagacacgcatatgcacacacatgcacactcatgtacttacacatgtgcacgcgcatgcaacgcacaaacacatggacacacatgcgcatgcatgcacacactgtacccacgtgcacacacgagtgcacagacacgagggctcactgtgatctgctctaatgcatggtcttaatagctatataatattccacggttcttttttctttctttcctttttaagatggagtctcgctctgtcgccaggctggagtgcagtggcgcgatctcggctcactgcaacctccgcctcccgggttcaagcgattctcctgcctcagcctccttagtagggggggactacaggcgcgtgccaccacgcccggctaattttttgtatttttcagtagagacggggtttcaccgtgttggctaggatggtctccatctctcgacctcgtgatccgcccgcctcagcctcccaaagtgctgggataacaggtgtgagccaccatgcccggctggttcttatttctttaattttattgaagaataacatacctacggagccgtgtgcatatcataagggtacaatttgatatactttcatggagtgaaatacatccctgaaaccagctccggatcgagaagcaggacatttcccaccctcttcttgccctttgcctgcaacccccatccccggggtgaccattccccggcctctgcccccgggacagttttgttcgctcctttgctttatggaggtgaaaccgcgcgatgaggcccctttcgagtctggctgcttttgcttagccctgcgcttgtgagatccctccgcggtggcgtggagaggtgtggcyacttcccgcttcgtggcaagtcgtgttctgccatttctccgaataccgatggaggcttacmgtgctggaccatggaatggggtctggaatgttctcatacaggtcctgtggtgcaatgggcgtgtgctggcactgggattctgtgtctaatgctcttcatcctagacctgtgagaggagactgttgtccccagggcagtgaggaggaggccagctttggagtggtcaccctcacctcgccgttacacacgtcacttcatttaatttttaaacaacagtcctgctgccggtggccttttctgtgtgctatagaagtgagagcaggtgcctggggacacttggaggcccccctaggtttgtctgtaatgagcttgtgctggcgactggcatgttctgtcccccccayggctcccagcgtgctcccagcgccctcccacagctttaggcaattaagacacgggcttggagtggccattgcaggacctgctggtaatgggggtgaggggtaagctttgtttccaaggcaggtctgtgccctggggtcttgtccccctccacatgcacactgcctgggtggggctcattcctgcgggtaaggcccgggatcaggaatggctgtctttcttctgcccagagggagctgcttgtggcttgaggtggccctgagactgtgagacaggccactgggaggcccaggctctagcaaaagtggggatttttttctctccctagttttggatcaggtttttgaggttgtgcaaacgtaggaatgaggcctttcaccccgtcagttgtctgtcgggctgtgtcgcacagtggcccctcgggacagcctacagagcagctgtctcttccaggcattgctgcagggcctgctgtctctgctgtcctgggccaggcgctgagttctgtcgcrgaaagtctgagggcagagctgggagggcagcgtttccaaagcaaatggaaaaggcwaacgggaacgtggcgggcagggtgggcagggcagcctggaaacaccctttgtcccatgcagctcattcactyggccaggatttgccgagtggcttactgcactctgtggccctgaaccagggctgggggatctcagggacatgtgtgtccacagagatggtcacctgccacctccaccatcacagatgccatgaaggctgtgaagggaaacagacytgtaaggcagcggagccgagatggggttgatgagtgtcaccagtcacaagcaaggtgtctctgttctctcttctacatgttgatcgaggtataacacccaggaaaggacatcaagtgtacagtttgaatttttgcacacacgtacaccygtgtaacccccacacagatcaagatgtagaacattccagcacccagaagtttccccgtgccccttcccagtcagacccccygaycccaggtcacccctgccctgacttgcagtgtagagctcacccggccacttcctcttttgcccacagcaggtgaggagggccttctactgggaaaaactgtgactattaatttaggtttaaaatgtattggtaacaggcagatctggccagtccctccctggcttcaatctcyttggtagcttccaggattactcttagragggactggaggaaaagcccctctctgtccccayggcacccacagtgaccrtcacagccctcctctgggccctcactgccaccagtggactcactgtctccctctgccctgtgcacagcttcttaatttgggtccctctggtttagctcagtgcagccagaattcacccagtgcctatgtgagtcgggcactgggctggcccaggggcctttggaatgaaggggacagtcggtgagctgaggttgtccccaaatcagaggtgtgaccctatgagcagccaggtttttaattttgtaattgagatattcacatgccatacaattcctcttaaaatacacaattcagtggtctttaggtttttaatatattcacaatgctgtgcaactatcacctctaattccagaatattctgtcactccaaagagaaaccctgtacccattagcagtgacttcccactccccacacccccagcccctagcagcctccagcctctttcaatctctgtggattcgcccgctctgggcatttcatgtaaatggaatcagacgatacatggtcttttgtgtctgactccattcactttgcttaatgtcttgaccrttcatctgtgttacggtgtgtatcagagtttcacttctttttgtggctgagtaatattccactatgtggataggccacattttgttgatctrttatcagctgatggacatttggattgcttcctgatatggtttggctgcatcccaacccaaatctcgtctcgaattcccatgtgttgtgggaggtaattgaatcacgggggcaggtctttcccatgttgttctgttctggtgatagtgaattagtctcacaagatcagatggttttaaaaagcggagttgccctgcacacgctctcttctcttgtctgccgccatgtgagacatgcctttcaccttctgccrtgacggtgaggcctccccagtcacgtggaactgtaagtgcattaaacctctttcttttgtaaactgcccagtctctctggtatgtctttatcagcagtgtgaaaacggactratacacttccactttttggctattgggaatagtggtgctgtgaacactaatgtataggtttttgtgtggacacgtttccagttgtcttggatatatacctagttgtggaattcctggctcatgtggtaattcatgtttaactttttgagkaacragcggccatttttaaagactggataggaatatgtaaggaagaaagtaaatttattcacttccgttcaggaaatttacctaccaaacaacatgctgaatgggaacctttaggggcttggctgaatggccctgcacaaggtgtccaggatgcactgcctaaaagctgtggaccctgtgcctgggaggaggaccagcaaagggcagagccccccgtgtttcagatggaaaggttaagtaatgtgactctggtaatgcagtccagttcatttatgagaycatggacctcttatactacagaytttttgtgttttttttgctgagtcttttgctccctaaccgtgttccctggctggccaccctgccagcaccacgctggccctcaggaagcatcatcagycagagacacaggcctttgctgtggcctcacatgctagcagaggaagatagacaacatggcgatggatgaggaagttgggttgtctgtaagaggatgagaagggctgtcattaaacaggtgggttcaggtgggtctcattgaaccatgagatttgaaccaagacctaggggggtgagtgagggkttggggaagggagattaatgcgagttctggggaaggaacattccaggtgaggaaacagccactgcagagccccttgggtgttggagraagacactcaggtggctggaggggtrggggaagcattggcagggagaggccagggctggcaggcctgccgaaggctttgcttctcttctgccaggctggccatcacgggccttgcacagaagagagcaatgacctgccttcaggtttcaaaaggtccctctggccgctgtttgagagaaggtcacagtgggatgagggcagagcagggcgactgctcaggaggcttttgcagtaaccgacggagtggtggcggtcactggcaccgagaagtgtacatgctgcaaagaaaatactctgttcaggagaccaggtgcggtggctcacgcctgtaatcccagcactttgggaggccgaggtgggtggaccacttgaggtcaggaattcgagaccagcctggccaatatgctgaaaccctgtcaatactaaagatacaaacattagctgggcgtggtggtgggtgcctgtaatcccagctactcgggaggctgaggcaggagaatcgcttgaacccaggaggtggaggttgcagtaaaccgagatcacgccattgcactccagcctgggcgacagagcgagactccatctcaaaaaaagaaagaaagtaagaaaggaaaggaaagaaaagaaaaaaaagaaggaagggagggaggaaggaagggagggagggagaaaggaggaagggagggagggaggaagaggggaggtggggagggctctgttcacataataaagaaatccagasgtttgaccatgggcgtcatttcatcactgcacttggcagaggtcatcgctgctgctcccatccagctcagtcctgtggtccctgtcgtgtgtagaaacacatactctgtacgttgctgggatcatagcagaatatcagctccaccaatcctggttcctcaatggcgacacccacgcactcagggcrtgtatcagtgtgcatggagttgcctcgcgttcaactgcgtggtgtgggtaacgcagttgtgccattgtgtgtctcacaattcccagactggtaaataatgttgcttctagttttttgctacttaagcagtgtcacagtgaacattcttttataaacgtgtttgtgttttaaaaataagcttattttggaataatttcatatgtacagaaaagttatggagttaggatgttttcatccactcttcatccagtttcctctatgaacacctcacacatctgtggtacatttgttacaaccaagaaactgacattggtacccacactattcatgagacaccagactttatttggatttttttctttttgagatggggtcttactctgtcattcaggctggagtgcagtggcacagatcatagctcactatagtctccacctcaagtgatcctcccgcctcagcctcccaagtaggtgggagtacaggtgcacgcccccacacccagctaattttttattttttgtagagacagggtctcactgtgttgcccaggctggtcttgaactcctgacctcaaaggatcctcctgccttggcctcccaaagtgctgggattacaggcatgaaccactatatccagtctttatttggattttactacaaacatatgcttctgtatacttgtgtgactatttgtttaaggtacagtccctgaagtgggattgccgtgcctgatccttgctgccacatcatcatcccataggggacagggccccactgtcccccatcactgaacagtgtgcccaggtgagatcatggacttgggccccctaggccagcccagtctctttgcagccraggaaagtgaggcttagctgtcgggggctgtggggggatgcagcttgccacacttgacacccaaacgctgattttgtttacatgagactcaggtccgagtttatgtctgagacctgggaatcaaaaagccacccccacagcctccagggacctggctcccctggagccaccgtgctgccccacasgtgtcacccatggaggctgcaggagcacctggcgtggtccaggggacacgaagccctggtgctggctcctcccaacgcccctgtgagttctgcctcccatagaccacatgtgtcatctgtgtgcacatgtgtgaaacccgaaagacaagcagatgagacccgcctgccaaaatatttgctgccgcgcagaacagtaagtcgtttttgacatatggatctcagcgcgcagccacagcaaacaggcagcgtggcgctgaggggcacaggtttgctggggggcgtgagccgggagcatcgccagcagcaggctcrcccccctgcgagggcrcgcacggattcgctcgccaccaagagcagggccccaagaggggccctcggcatagtcccctcgagtccccagaacttcacaggcagagagcctggctcgaggatgggcgggagctcrgtctggytttgatctgcgggaggtgttgtgtgcagaagctgtgggcaccgggggctgcaragcttcagacctggagcctgctcccagggccgayctgaacccggcacctgtgctgacccaagggtcaaycaaagtcctgagtttggtggcgccgagggaggggagtggtcgcatcccaccgggtgcctggaatggtgctggaggaggcagcatctgatttgggccccgtagggccagaggggggatttgtagggacagagcaggagggagtggagctgaggctgggggagggcatggtcggaggtccagaggtgggagaggggccgccatcctgaagcacacccctcctcgtcttcctgaggcctccatcccttcctgatcttccaggtcatgggctccaggcttgggcccactgctgtccttctccactctctccccagggaacccacctgggttgtggccttaaamccagccagatgatgcttctccagcctctgcctcctgccgggccctcccctgagctcagaagctgccatcagtagccatgcaacctcccccttgccatcatgaagtatctcaaacttggcagcctcgaaacagagcccttggggagtttaagcagaaacagaatatttttgcatagtcttaaagtaattccccccacccccaaatattgagcaattacaaagggcaaaataggaagtttacggtggagaatcctggtggacacagccttggccaggtgatcaaggttcatgtcaccagtcatgaagcggcgtgcacccctggtgtgctgagaagggcagcttacctcctgcaggtgcccttgccccaacgcaccactcagcctaaccatggggagcatccgacaaaaccaagctgtccgcatctccaaggacaggcacactggggsttagggcttcagtgggggcggaggtacagttcactccctaatacgccatttacttggagaagccctctccagctgcctgaggcagaagcacccggttctctctctgcaggacccctgctttgttcttcctaggatgcgtcagcccctgattttccatgacagtcccctgtgcccatgtcctgcagcctctcctgggggcaggagctacagggtttcttgactcctacctcagcactttggtccaagctctgagcagagacctctgtaggcgtctgcaggactggctggcccttgtgtctgtctttcccctcgtcctggccccctttgtccactcctgcaccagcttccctggacccactgccactgcgtcacstggtcggatctgtgtcccctgcactctcaccacctccaacttgcatcccggtcccccamaccctgacccccaaaggcattgtgcatgtggatgagtgagtgaaggaaaggctggcgtgttgggtgtgcgaggtcgcaggggcatgaggtgcctggacggcagagagccagggctkggtgaggacctgggtgccaggtcgggggtctgggcagcctggtggccccctgaaaacgttcacatcccttggggcctgctgtgatacatactaatcagtgcttcatgagaaaggtatgagccgaaagaaatgggggttcccactggattggtcgtttctgcattgtccggagctctcagacctggtttcttaaccactgtgttcactgaacaccccgggcttgatcagctgctgagggtgacttcacatgagattataattgtactgcctaatagagtgctcacacatgttaaaactacctggcaggcaggagtgagaatacagctttcccagaaacgtgttcaaagaaaaacccattaccaacccggcagaacataaagtactagtgtggggtatgaggcagcatgtgggggcgctggggtggcagcagggccagaccccacttcaggggttgcccccaggamcccccttgcggtacccgtatatcccacccccagactcctttccatragctgctcccagaccccctcatatccatcctgcctccagaacccctatatcttgctcccactccytaccatatgctgttcccagacccccctccatggcctgcccccagatccccctttgctgccacccctatatcttaccccagactcccccatatctcgcccccagaccctcctccatggtctgcccccaggcctgctggtaatatgggatacagaggtctcctcactgcacacacaaaactccttccctgagcgagggataggcagagctgagggcgggggtactggggggctgaggggggttctttagggcaggagttacctgccctgtagacggggagaccacattagtgtttgtgcaaagccctgccctcgtgmacctgtccttccgtagcccacgataccycatccagcccgggcccgtgggtgggctgctgagcacccgaccacagccaggcctccatgtgccactgtcaaggggacttggcccgccatgatcctgagtgcacaggtacattgctccgccctctcaacagccacgacccagaaataaagtaggcactgtaatttgcattttgaggataaggaaaccraataatagagtctactgagcgcatactcagtctttccagaccctagaaagtaggtaccattgtcatcctcatttcagagctaggagagcagaggccagacaggttccatagcctgctcaggtgggtccgtgctggaccaggagaagggccaggtaggctgatgggtcctgagcttgtgctcccgaccgccaggctgtgtgtctgatggccgaggccagggtggctcagccaagcccagccarcccaagactagaccatccccagcgtccaccccagcctcctgggcacaggggtcacctcccacccctggcccacccatacagccttttcccatctaaccttttctttaaaggaaggcatcccttggaatgagtccaccctgagattttatggatccaaagaaaaaacttaattagctgcataaactgtcagttgagactctccagaggacacacctccggctttcaggttccccagggaatctgaggctctgaggcaggtggacagccaggtccctctttacccagcaccaggtaaccttagaggcctggccctgccttcctcattttgaaatgtcaccctgtggtcatctctccttccctgatgtgaagcagtgaccagttctgccccatcctacacatgtgtgcacacatacatgcacacatgtgtaaatacacatgcatgcacatgcatatgtgtgcacacatatgcacataccttcaccttcctatccctccccaggggaaggccttccttggggctgcccctcctccactctggcarcattgggacttgaatcttgtggccccgtcacaactgtactcagctactccagctccttgtgtgacctctcagcccccaggctctgagctacctgaggtgaggtggggccacactggtccccacctcggtgcagcacacacagccccatcctgggagtgccacccaggtttcctctaactgtgctttccaagggctggaaggacctcttcctctatgccaggtgtgctagagtggccccagccgagaacctgactgggaccaagccccaggacagtggtcaggcacacacctgagtcgctcttcctcccatagacacatttggagttcccactgccttcctaggccccaccacatgctgtcacctccaggaagccttcacagrttgctccctgctgatagccttgacctgcttcccrgggcatttgcaagggagtagaacgaagaccaagtccgtgcaggggctgctggctctgtgctsagcacacgccccgtgrccacctcaggggcggctctgcgagtccccacttgacaggtgagccacagggccacaggcatggcttggggtcctctgcggagcccgatgtgtcactggccctcacgtgtccttctccgatctgctcactcattcatccattcatttattcagcaggggttcttgagtgtctctgaggtggagcgtctgctgtgaaggactggcgggacgcaaacggttaccactggtgtgacgggctctgatcaggaggcacagggtgttggggagctcagagggtgacatctcaccctgccttggccagtgtgggagggagagggttcagggaggatgtaactgtgtgtgtggcaggtgctgtggtggcacagagctgaggggacataggcacagttgctggatgcagggcttacaccgcgccacgcgtcagaagctagcaggggctgagcagcatctctgccctccccgcttgcacccccaccatccagtgcagcccagcacctagggggcatggggccagtgcctggcacattttgtcctgactgtggaaaaaagctcttcacagccctgagtgctgctttagctttggccccacccatcttaggctgctcagaggcctcaggcctccctggagggccagaagggattcccaggggcaggatagcayggacgggkggtccgctgtgtaagcctgggaaattctggctgcttgaagctggcacactcccctgaggctgttccaggcacagtcactgggtctccccgtcgaagtggctctaaggcaggtcttcccggttaccagcaagcagatacatgttgtaaygggctgagagtgggtgtgtatctcatattccccagaggagcttacggacagcccctctttaaggaacatctcccgggccgagcgttctgagcgccctctgagcaggcagcccgccaccggggcgctggccagtctgagtcagtcctgcctgggaggcagtcaactctggggaaggcagaagaatcacagcactgagtgccgtccagtttcccctcaactatattcgcggacacggcgccaacaggggaaaacttacatagcacctattcattctgaggcctggccggcctctggaaatcagcatttcagtgttggccaggaaggaggccagaactgtgctgtagcatttcaatgtatggctgtcccacaatttatattccagtcccctgatgatggacatgtaggcggtttccagtttttttcatgatcayagatcacacttctgtgaacagctctggatgtgtctccttgtgcaaatatggtgctaggtgttcttcagagcatttttctccaaacttgccgggtaatatggtcaccttggggagyttgttaaatatacatatttccaggtctgytctggtgggtctgatatttggagccaggaatcttttctttcttttaacagatacttaagtgattcctgtggtccaggaagttttgcaagctctgatgcagaagagctcrcyggagcaaacatgtatgttctgttttactaattagatatacgctgttgatgactccaaagtggacgtgccatttctgtcccctccagcagtaggaaagaatcccattatcccacatcctggccagttcttggtattgtgagatttttttaaacttcttctcttaagactatgatggtattttgttgtaatataatccacattttctatattattactgtgcttgagcacttcttcaaatgtttgatgaccttgaccattgaaacttcctttttgtgaattacctattcatatcctttgtagcttcactgtggaatgcttgttactgatttgtagccattctttatacatttcactcccactcgtttgtcagttatatgtggtgcacacatctgctcccagtctgtggtttgtctttccactttgtttatggcctcttattgggacacagttttaaattaaaatataatcagatgtattaatcatgatgttgtagtttgtgcattttctatcttgtctaagaaattcatccctctccttgttatacttagaaagaaggatattctacattctccttcaggagttctaaagatttgctttgcacattcaggttccaaatctacttgaatttgacttgtgtatatggtgtgaggtagggatttgattttattttctatgtggataacagttgttccattatcacttttgagtagtccaccttttctctcactgacttataatgccacctctgtcatgtcagcttttcatatttatcagttcctgttaaatgtatctttaaagctttattgagacataattcacatgatacaatttacccatctaaagtgaataattaatgtttttattatattcatacaccatcgctatcagtcaattttagaacattttctttttttttttcttttttttttttttgagatggagtcttgctgttgtcacccaggctagagtgcaatggcacaatcttggctcactgcaacctctgcctcctgggtttaagcacttctcctgcctcagcctcctgagtagmtgggattacaggcacccgccaccacacccagctaatttttgtatttttagtagagacggggtttcgccatgttggccaggctggttttgaactcctgatcttgggtcttgggatccacccgccttggcctcccaaagtgctgggattacagacgtragccaccatgcccggctattttcattacccccaaataaaccttgtaccctttagttacctcctcatctctgtaaccctaagcaaatactcatctgctttctgcctttgtgggtttccctattctaaatattttttatgaatggaatcatatagtatgtggccttttctgtcbtcttttactctgcgtgttttcaaggttcatccatgttgtagcatgtatcaggacttcatttctttttatggctgaataatgctycactgtatggatagamcacagttatttattcattcctgtgttagtgtatatttgggttgtttctgcctttggctattgtgagtaatgctgctataaggattcatgggcamgtttttgtrtggacataggtcttcatttctcttgaatatatgcctaaggagtggaattgctgggtcacgtggtatctatttttaatcacttgaggaattgccagactattcaaargcagctgcaccattttatgccattttacattcccaccagtagtgtatgagggctgatttatctatgtccttaccaacgcttcttatctgactgtttaattctagccattctagtggctggtgaagtactatctcattcagattttggtttgcaattccctacaatgatgactagtgatgtcaggcatcttttcttgtacttattggccacctgtatgtcttccttggagaaatgtctattcaaattttttgcacaattttaatacatacatatatgtatatacacacacacacacacacacattttttctttttaaacagattctgctttgtcggccaggctggagtgcagtggcacaatcttggcttactgcaagctccgcctcctgggttcatgccattctcctgcctcagcctcccaagtagctgggactacaggtgcccaccaccacacccagctaattttttgtattttttagtagagatggggtttcaccatgttagccaggatggtctcgatctcctgacctcgtgatccacccaccttggcctcccaaagtgctgggattacaggtgtgagccaccgcacctggcctatttatatatatattttttaaagtcaggatctctgtcacctaggctggagtgcagtggcacaatcacagctcactgcaaccttgaactcctgggctcaaaccatccttctgcctcagtctctcaagtagctaggactacaggtatgcaccaccattcttggtgaatttttatttttatttttatagagatgggatcttgctatgttgctcaagctggtctcaaactcttagcctcaagcaatcctcctggctaggcccctcaaagtgttgggattataggtgtgagccaccacatctagcctcctttgcacattttaaaagtggattagttgcctttttatcattgagttgtaagagttgtttatatattctggatataaggcctttatcaaatatatgatttacaggtacagttgacccttgaataacatgggagttaagggtgcttgctgcctatgcagtagaaaatctgtatatacctttgacttccccaaaatttaactacagataccctgctgttgactggaagacttactgaaaacataaacaattggttaacacatattttgtgtatgtattacaccctatattcttacaataaaggaagccagagaaaagaaaatttaagaaaagcataaggggctgggtgtggtggctcacacctgtaatcccagcactttaggaggccgaggcaggtggattgcttgagctcaggagttcaagaccagcctgggcaacatggtgaaaccttgtctctattcaaaaaaaaaaaagaagaagaaaatatatttactgttcatgaagcagaagtgaatcatcatgaaggtctttatcttcattgtcttcacattgagtaggatgtgagtaggctgaggaggtggaagaagaggagggttggtcttgctgtctcaaggtggcagaggtagaagaaaaactgcatataagtgggcccatgcagttcaaacccagttgttaagggtcaastgtattttctcatattttgtgggttgtcttttcattttcttgatgttgttttttaaagcataaaagtttttaaagttttgatgaagtccatttgatcttttattttctcttgttgcttatagttttggtggcatatctaagaatcctttgataaatctgaagccatgtagatttacccctgtgttttctcctaagaattatatattcttagctgtaacagataggtttttgatacattgttaattcacttttgcatatggtgtgaggtaagggtacaacttctgttcttttgcatggtgctatccagttgtcccagcagcatttgttgaaggctattctttcccctttgaatggtcatggcacacttgtcaaaaatcagttgaccattgtagtaggctgttcttgcactgctataaagaaatacctgagcctgggtaatttataagaaaagaaacttaaatggcttacagttctgtaggttgcacagaaagtaaagcagcatctgcttctgggaagcctcaggaagcttccaatcacagtggaaggcaaagcaggagtaggcatctcacatggcgagaatgggagcaagagtggtaggggtgccgtatacttytaaatgaccagatctcatgagaacttactcactatcgcaaatatggcaccaagccctgagagatctgccccatgacccaaacacctcccaccatgccccacctctagcatggaggattacaattcaacgtgagatttgggtggggacaaatattcaaactaaagcaaccatacacacaaagttttatttccagatttacagttctattgcattgatcactgacatgattactgttcctttgtagtaagttttgaaattaggaagtatgaatcttcctactttgtacttctttttctagatcattttggctattctgggtcctttataattccatatgaattttagattcagcttgtcaatttcaacaaataagtcagctgggattctgaagggggttgtgtcacatccgtagcccaatttggggagtgtcttagtccatttgtgctgctataacaaaatacctgaaagtgggtaatctataaataagagaaatttagcttgggcaacatagggagaccccatctctgaaaaaaaaaaaaattaggcatggtggcgtgcacctgtagtctcagctactcaggaggctgaggtgggagaatcacttgagcccaggaggtcaaggcagcagtgaaccrtgatccactattgcattccagcctgggcaayrgagcgagactctgtctcaaaaaaaaaaaaaaaaagaaaaagaacagcaatttatttcctcacggttctggagctgggaattccaatatcaaggcactggtaggttggtgtctggtgagtgctactctgtgctttcaagatggtgcctcttggtttgtcctcacrtggcgaaggagggaaaggagaaacagggacgaacagtgttcatagcagctcttttatttataaattgctaatcctgttcatgagagcagagccctcatgactgaatcacctcctaaaggccccacctcgaaatactatcacgttgctggtttagtttcaatacatgaattctggggggacattcagaccgtagcagggagcgttgccatcttaacaatattaagtattttgctccatgaacatgggatgcttttctgtttatttagatcttctttaatttcttttaacaagtatcattaatccaaaaatctgaaatctggtatgctccaaaacctgaaactttctgagcactaacatgacagcaacagtggaaaattccacccctgtcctcacgcgatgggtcgcagtcaaaacccaatcaaaaccttgtttcatgcacaaaattatttaaaattttgtataattaccctcaggctatgtgtctaagcatatatgaaacacaaattttatgtttagatttgggtcccatccccaagatatctcatgtatatgcaaatattccagaatcaaaaaatatatakagagagaaatttgaaacacttttggtcccatgcattttggataagggattctttacttgtattttgtagtgttcacaatataaactataatataatacaaacaatataagctaaaatataaaatttgcacttccgttgtcaaatttactactgagtattttattctttttgagctaccataaatgggactgcattcctgttagattttttctttctttcttttttaagaaatggagacttaggccaggagcggtggctcgtgcctataatcccagcagtttgggaggccgaggcgggcagattgcctgagttcaggagtttgagaccagcctgggcaacacagtgaaaccccgactctactaaaatacaaaaaattagccaggcatggtggctggcgcctgtagtcccagctactcgggaggctgaggcaggagaattgcttgaacccrggagatggrggttgcagtgagctgagatcgcgccatcacactccagtctgggcgacagaacgagactctatctctaaaaaaaaaaaagaaaaagaaaaaaaagaaaacataaggagccttgctgtgttgctcaggctgacctcaaactcctgggctcaagtaatccttctgcctcagcctcccgagcagcaagcagggaccgagcagcagggaccataggagtatgtcactgtgcctggctagatgtgtgtgttttctttttttggagatagagtcttgctctgtccaggctggagtgcagtggcacaatcttggctcactgcaacctctgccgcctgggtttaagtgattctcctgcctcagcctccggagtagctgggactatagctgtgtgccaccacacccagctaatttttatatttttagtagaggcggggttttccatgttggccaggctggtctcaaactcctgacctcaagtggtctgcctgccttgacctcccaaagtgctgggattacaggcgtgagccactacacccggcctagatatgtttctaaaacaacattgtgtaggaaatttttcttaggctggttcaaggctaacatgctgaaggtcccaggtagtgaagcaggtgaaccctgaaggaccgtgcccctcccacacccaccctagcagctgttccacattgtagatggatccctgcgtccctacattgtcacctttctgtctaaatgagaggtggggagaaggaggggtgaagaccaatgaggttagtcacctcaaggggtggggccggtgcagagaaagatgggaactgttccctagtcctcttccttctggagttgggagggggaaatagccctgccccaacatgtgatccagcatggactatggtcagttacaaatatgagtgagccaggcccctgccctgaaggayctcccagatttgtggggaagacacaaactcagcacagaatggaaaggggcctggggacacagtgctgtgccgagcttggaatttgtttcatgaagggacagccagcagtgtctgtgcaggtccagggaggctccacaggggaagtgagatttgagctgaggcttgaaagaaaggtggaccgagaggagacgactttccagggcaggaagtggcctgcacagaggccccgaggcgagaaggaccacaactctcctgtggacctcctctttgtacgatcagttttaattacgcaaaaaaattatgcagttaaagctttgctcatttaaacagaccttccctggattaagagtaattaggttttattgtcattgtcttgaaaattgccttgccatggacctgtgaacacagaattatttatatatgtgtgcatagaaatcatctcatggatttttttttaactgagatgaacttgggggattttaaaggtaacaaacaaccccttctggctggtgtgggggaagccctaatttgtagtgcttgctacttttttttttttttttttttgagacagtgttttgytctcgtcacccaggctagagtgcaacggcacaatcttcactcattgtaaaacctccgtctcccgggttccagcgattctcctgcctcagcctcccgagtagctgggattacaggcacctgccaccacacccggctaattatttttgtattttcagtagagatggggtttggccatgttggccaggctggtctcgaactcctggcctcaagtgatccacccgcctcagcctcccaaagtgctgggattgcaagcataagccaccgcgccyggcctccactttctrtggtgtaaatattcctaccatggctgatttcctctggggaagccatgtyccctccacttctaccttcatggtctttgcttgtttattttcaaatgtggcccaaatccaccctgaggcaggcgcagtggctcacgtctgtaatcccagcactttgggaggccgagacgggcggatcacctgaggtcgagagtttgagccagcctgactaacacggggaaaccccgtctctactaaaaacacaaaaattagccaggcatggtggcacactcctgtaatcccagccactcgggaggctgaggcaggagaatcgctggaacctaggaggtggagattgcagtgagccaagatcatgccactgcactccagcctgggagacacagccagactccatctaaaaaaaaaaaaaaaaaaaaaaaaaaaccaaaaaaacccaccctgagtttaaaagaaaaaggctaagaaatgcttgctgggctgtctcaggggtggcagtggagctcccgtgcctcccacagatgaggacgtggaggccctggccgagtgctgaatgcaggttgggggacagggctgccggcctctgtaaggatggggaccccagacccacccggtggagctggggctgaaggccgtgataaacacagcctcaccctggcattgcccacctccactggccaccagctttgacggacagccccactgccactgcccctctccaggcaggccacattcacaggtgttctgtacagagagcagaagtttgagaaaacgtgacccactgaacagacacttgctgaggcccgggggcttcatgtgtcaggcccagaggtggccacaggcacaacacgcgtccctcagccttgccacctctgctgccctccaaggtgccctgggtccagctggccagaagcactgctttctggagcagccacttatgcttttacttttttctcttctttttttttttaagactgagtcttgctctgttgcccaggctggagtgcagtggcacaatcttggctcactgcattctccagttcaagtgattctcctgcctcagcctcctgagtagctgagattacaggcatctgccaccatgcccggctaatttttgtatttttagtagagatggaatttcgccatgttgaccagactagtcttgaactcctgaccccaagtgatccgcccgcccaaagtgctgggattacaggcgtgagccacagtgcccggcccagctttttcattttgaaatcaatacaagtttttacagatgtctgcaaaaaatatccatattgatggatcctggctcctcagaatctgaggtttttacaaatgtctgcaaaaaatatccatattgatggatcctggctcctcagaatctgaggtgacagcagcttgcagaggacactgctcccccaacactgccttccaagggagacatgccctaccccaaggcctcccttgtcccctccctcctctgacagycaggtccagggggtcctggagagggcactggcccaccctccacacatgttgcacagtgccctgggaatgaggaaggaagggcaaaggttagggaaaaccagacgtcagtttcttgaccagccacagccggtgcagcgcggttatttatagccctggtggagcgcccataaatcaaggctttccccagcagcgcggctgtgagggctccgagatgatctcatggtgccyctcccttgaaccatcccagagaaaggaggcctgtcaccttcaaggaccaatgcttctgccgggactcaagcagaacctgttcctgctgctgcaaggtttacaggcagccttggggacagtccgtgcagaaatgtcaggagccttttcctgcataaggcatctcagagcttatagcacctccttggcggtggccgtgctcgcagcctgatacatgggacctctgtctcacttgcagtgtgcaccgcaggtcctaattccttatctgttccaaccacaaaagcttccactgctggatggagccctgttatcattcaggcttctgagccacctggaaggcaaaggcctctctgtgaaaatgaaaacttggctttaaaaagctggcatgggctcagccatggagttgcttagatgtagttcacaatctcgcagacccacggcaggattccacccaggagaaggtcctggaggtggccatggggctcagcagaatgagccgggaggagcaggactgttgacacgagagcaggggtcaggctcagtgcacaggtcccagtgtgcagagctcacccggccccagctttcatcacccatctgagatcggcctccttcactcctgttctctgggacttccttgtgtgttagagactcgagcaagaccctttcttgtctatccccggacggacccgcctttcccgcatctctgggggtgaggtcggctctcgttcaggcctgcagggtccctggtgccgcagcccctctggttggaaggccccctrcgtgcagccccgtcctccagccccgctcggctctgaatgagttcattatgtctcagckcgccctggccgccaggctggcagttcttcgggctggcggggctcgggagctgtcagcctgccaaatccagttgtttgacttcatgtttcaaggccaaatcctttcaggaaagttctctccatcccaccactccaccgccccccgcccttagaaaaataaatgcgtgattgactggctttgcaggtttttyatccatcgttctttccaaagaatagtgtgaacagctcattcgattcgttcatgtgrcgtcctccctctcccaatccctgtctctctctctccttccacagccacatgaaattgaagtgggagaacatggtgtgtgagcattattgggggtggggtgcggagcaggcactggctttggttgaggtctgcaaaggaaagcacccccactgccaggctgctcaggagtggctcccaccctcgactgcggggaagtgctggaaccctcygcacgagggcaacctttcttgggctctgaaggcgcctctcatcctctgagccaagaagacttctgacccagaattctgagttgagttccgacgcaggcrtgggygatggtgagcaactccaggctaccccgagaaagccgctgtgtgaccccattaggggacttggctctcctgccaagcccccacccagcacctgtcccttgtgtcatgactggacttgttacttctagcccaggagctccaggtgaaggggactgtgttggtcctrtctgcccaggactctccccacccgcacagtgtacctgtcccacagtggcaccaacaaggctcagctgagcccttgccagaggagacacggtgggcaccagccccagcgctgccacctgcctgcctcctctgccaccgagggaagccatgtcgccttcctgagcctgcttctctgtccacaaaacaaagactagataattagagtgcacacttggagggacaggatggcttcgtatccatctggctgtgccctgtaactcaagggatgggactgtgtcattggtaaacactgcaacaggcctcctttccaggaaacaggatccctgtctcagacagaagcagtctcgcccatcctggggcctgagagcatcattcctttgtgagactcaaatgtgaggaattcctgtttcctcaagtctgtgtggggagtgcagagcagccctctgagggggtagcgtgtgcaggaaataagccggggggaagggggcaccgcgggtgggtgttaactgctgcttcggggtccagtcctgttaatgaaagcaggggtgaggcaagsggggaagactctctgtacctgatcagtggcatgtgtgtggctccagccggcatggcctgagctgccggtgagggagaggcctcagggagaaaagacaaaagctggggtgcccctgaaggtggggcagagctggggcagtcaggggctcttccacaggtgcaggcctggtgctggaggacacagtccataccacctccaacccccaccacctcccctgccatggacagtgtggggcaggctcctgaggatgaggcagcctgacccctacccctgggctgtccccccgactcctggtttctctggaagcctggggttccaggccatgcaggtagagaacaacaggtttaggacaaagtcattgtggacactgaggcccagaaaagggacttgcccaaggccacacagcaggtggccagcactgtgtccgtgtctctgttattccttcctctgcttgctttgggtttattttgtgctccttttctacttccttaagatgggagcttcagtgatcaatttcagatctttcctctcttctaacaagcatttggtactatgaatttccctctgaatcctgcttcagctgcatcccaacttctgataccaggtaggagtaattgttctaagctccgcagctgactacagagagcggccacatttgagaaacattctcatcttctctctgatcttgggtctctgacaatggagctagcaacacttcctggttttaagggctctgaggagcaaattagactgtctggtggtgaagaactttgtttaggaacaatttaagatgccaacaggttcatctgctctcctgcctccttctccccaccttgtaacacaccctagacaagtcagcrctcaagtttatatggacaaataagcaagtaaaattagttaggaaatcaaatattggggttggggaacaataagagaaggyaagccctatgggatggtaaactgcagtataaagccccatttgctggcacagtgtggtctggcctgtgactaggtgagggacagtgcggggtggcctgcctgcatatgccaggttctgtgtatcacatctctcaccaggaaggcaaaacctggcagatggcacccrggcctgatggctcctcaaccctctcagcaccccaaagagggaagtcccatcaccctcactcacccagccccgggctggccctgtcagctctcgaactgcagcatacccgagctcttaaagcacactggacctagggctcaggtttgagctttcatgatgagaccctgaggtcactggcggggaaaatgagtcactggggcattccccgaacttgggaaaagccctgaccccagaatcctgagcctaaattgctgccaagttcccgatttcccttccagtcctcagtttccccttctctccggcaccctcctgaggaccactgagccccaaccaccaccatgcccatggctggtgcccaggaggtgggagctgtggagctgcctccaggccttcccggaggccccatggctgtcttacttggtttgtggcttcccagtaaacggtgggacaggaccagggtctgaggaaaagcaaagcagtgttgacagagtgtcctggagggcagcttgtctccctggcctggagatgaaaactgaagaaaacaagattccgtctaggaatcgtccagggcgcggcagcccgccaggagcccgggcagcttggatggggtccctgtgggcacaatcggcccagtgtggggcgcaccgccccaggcaggctggcgtcccgggggccagaatgaatggaccctcactgggccgctttgacagtttatgaggtgatgacgttgcagctatgattgatgaggtggcctcagtcggcgtttcggggaaccgggtacaagttgctagggaaatacagggggagggtgctgccctccccactggcccgctctgggtccctgtgctatgcctcagtctccccatctgtgtggaggaactgatgaagacagcacatgccccctgccctggtccctggattgcaagtccagacagaagagagcgtcctgggaagccagctgagagcacctctttctctttgggtcctgcagcccgtgggtggcagggcggtaaccccatctgcccagaaccaggctgcgctctcgggagggaaacagactcttatcctcttaggtacagcctccctggccgcctcggatgagcatctgcccctcccgggcctcagtttccacacctgagatgggagaggttgcatcctaaaggccctccatctctcaggttgggggatcactcttgtttccctgcagttgtttccagcattagagtcacactggggtccttgttctagcccccgcgtgttggctgcatgacccgaactttactcccatgtcctcctcttgggggtgtgacatgaggtcttccccaagtggccccgagtgaggcaccaccatggacctgatgggcagatcccccagggcactctatccagagggtggtggacccaaacgcgacgtccccagtggcggtggctgaggagaggggttggggcgaggaccagctctgggcagtctccaggtcatgcgcgtttgacgcaggaggttttgccggcgccaggggctccctcggctgaccgagggtgtcccttactccataaggtactgatatggtctgcggagcaggtggcatttgccatgcctgccctgcttgggtatttggccccagggccagggctgtccctcccacagctattgaacaccaggtccttgctgcgtctggctgggctgcagaatacccttgacctttcagcatcctcagtacctctgtggagtgctgccatgaccaaactagagactgttattattacgcacattttaagacagcatcggccggacgtggggggctcccaccagcactttgggaggctgaggcaggcggatcacttgaggtcaggagttcaacaccagcctggccaacatggggaaaccctgtctctactaaaaatacaaaaaaactagctgggcatgatggtgcatgcctataatcccagctactcaggaggcggaggcaagagaatcacttgaacctaggaggcagaggttgtagtgagccaagatcatgccattgcactccagcctgggcggcagagtgagactccatctcaaaaaaaaaaaaaaaaaaaaaagacagcatcactgtagccaagggaacttaaaagaaaaaagtgcatgtttagacagttgttcatttcctccagtttcctgccagcccccttctgtagctgtgggcacgtgcacatataagtcttctctttctcaccctgctcattgttcatagctgcataatattttacagagcagataaactctgccggccttaactactcccagggtcgaacgtctccttttctatcgtaaatatctctgcaattcctatagcttttttccttcaattcagtaaactttttttttttttttaatttgagatggagtctcactctgtcacccaggctggaatgcagtggtgtgatctcagctcactgcaacctctgcctcctgggtccaagcaattctcctgcctcagcctcctgagtagcttggaaaacaggcatgcaccaccacacccggctaatttttgtattttttagtagagaggggtttcaccatgttggccaggctggtcttgaatgcctgatctcgagtgatccacctgcctcagcttcccaaagtgctgggattacaggcatgagccaccgcacccagcccctttgctcttcctttgtcttctgccatgattgtgaggcctccccagccatgtggagttgtgagtccrttaaacttctttcctttaaacattacccagtctcaggtatgtcttcattagcagcatgaaaacagactaatacaccatgtcatttaatgaggctgggcctgcctctttctgatggaatgaactctccccaggtgacagcctctggtcccctctgcctttggagtgacttctcctgcatgggggttctgggcagggttggggggtgaacactggagagggatcagtcccagctctgttcttccccacccgctgcaacctggttggggacgcgaggagggcacccagcaggctgccagggggaggaggagggactgcagtctgggcccagagcccggttgtcccccatggagccacacagcaggcacctcagagtttgcatccattggagatggccaggagtcygctcgtgtgggaagaatggcttctgagcgccaaggtagcctgtgctggagccttggctgccatagaaggccattcacgtccctcacaccctggcctgtgctgctgggaaggctgtcactcctaaacagttatctgcttctgtgttaacctacagggattccctctttgctttggctgccagggaactcaaagctaagttttttcgctcacattcccaggcttctggtgtagatatctccyttcttccttactgtggtttctgagccatctggtgtagatatctcccttcttccttactgtggtttctgagccaccctgcaaacttcctctgcatctgtcccagtacaaatatcactgtgtgcccttytaggctatctgggacacttaaaaataaataaataaagacatctgtctgaggcttaacttgcatatagcaaagtgcatgmatctgaagtgtgtggctgatgaatctgtacacaccgctctccctgcacagccacccagatgaagacgaggagcacctccaatacscaagcctccctccacccagtcaacactcttctccagagggagctagcccgtgccttcacccccgtcttctgcctgacggtaaacttgaggtgaatsggctcctacccatgaacacccaccgttcatttcatccgtgttgttctgtgcagccagactccatcctacggcatccgtgggtgatgtttcatcacgaggctggaccacgatgtgtttatcatgtcactgttgctgtcacatgggctgtttctggcttggggtccttatgaacagagctgatcagaacatatctgtccatggctcttggtggacatagcctcatttcatgtgtgtgactcaggagtgaggttgctgggtcccgcggcattcatgtgtttagtgtaggagactcttgccaaacatttctccagagtgtctgatgtaccatgttgcgctcccgccagcctcgctgagttcccatagcaccatgtcttctgcagcacacgatgtggccggacctctccacgctggccattcaggtggacgtggagcggtgtcatttccttcctgaggggcctgcatgaatcccttttaggtggaacacacacagagtgggccggcgctcataagcagtcccgtgtgaatccttggagagctgtggaggtagcacagctgcatctctaggttggggccactcttttcttggaacaagagccctaaacgtgggaccctaaacaacacccagggaggagcagcctggcctatgagcagggggacaccatgaagctgggtggacgggtggggaggcccgactttaagggacctgcttcctaagcaaacaggccaggacagaggctgcaggtataagccctgccctgccaccatgatggtgaatatgaggtgtcaacctgattggattgaaggatgcctagatggctggtaaagttttgtttctggctggttaagtgtgtctgtgagggtgttgccagaggagactgacttttgagtcggtggacygggtgacggagacccaccctccgtgtgggtgggcaccatctcatcggctgtccttgtggctggaacaaagcagatggaggaaggtgggaagactttgtttgctgggtcttctggctttcatcygtctcccgtgctggatgcttcctgctctgggacatcagactccaggttctttgacctttggactctggtttagctggagctctcgggaggtgtcggcttccctacttttgaggattttggactcggacttggccattaccagcttctctcttccccagcttgcgtacggtctgtcgtgggacccgcctagtgatcgtgtgagccagttctccctaataaactccctttcatgtatagacatggatcctatgagtcttttccctctggggagccctgcctaacacagtggcatagagctccaggcaggcccctcacctggcyttcagcttcagtttctttgcctactgggctgaatattggtgtcaccacccaggatagcaagtccccatcagtgtcactgccacctgtcgaagagatcccccagcccagcactcgggtctgtgagtggcagtggagatgacactaggctctaagtagtggggctgcgtgactccagcgcccctaggaccagcaagggcacccagagcactgtgggaggactggtgccgcctccctgmccccctgctttctcctgggccactgggctagacatggggcctccctgcccccatrtggtttggcctgaaaaagagaggaggtggggtggcacttctggggcagcccagagtgagtgccctgccctgagcccagcgtgtgcccygcctgtgcccctgggtggggggtgcatacagacctcggggggatctggccgttggagtgcgcactgggagggacggagtcagctctttttaatctaaacacacaccaggtgcttaacgtgtttttatcaaaatatcaagcacagctgcaagaggctgctctgctccaaggccctacgcccaggcccgtccctctgccaaagcgagccttttaggtgagccctgccggccacctgctagcccaggccccggctcctggtgggccctggaycaggctgcaagcatwtccaagtgcatggcagtgagacgtccaggcctcccagccccaactctgagcctccgttgggtcagcggtaagatggggcagtggcacctacctccccggctgctgtgaaaaccaagtgagcggaagcatggcascccctcaccaggtccccagtgggaggactctcaatgattggcactgccaggagtaatgttatgagaggagcrtcccatcagcctggaggggacacaggctgggtcagcacccacaggggcttccgcttctctgtctcagggggtccagggtggccccttgccactggtccccaggcacagccrctacacaggtgcctctgcagggtctgggagtcagctgtccagggcctgcttggccaccgcagggcaggagtgtggcactgtgagcctggtggcctggctgggcgtggccttgaggttctattgataaccccatggggaaagcccccctgaggtgcttgggcatcggacctgcccaccatctcctgagrtggggcctgctctccagacagtcaggtcagcatgagttcccatgaggccagggccagcacgaggamytgctgggagcggtccatccacccatccgtccgtccatccatccatccatccatccatccctatccacctgtccaccctgatgcagttcctgccatccacgtgtccatctgtctacccgtacacctgttcatccccatccatccatccccctgtccatccctgcccattcatccaccctgatgcagcgcctgctacccacccttctctgtccatccccatccatccatctctgtccatccatctgtccacctgtccatccccctatccatccctgtccattcgtccacccatccaccctgatgcagcacctgccatccacccttttctgtccatccccgtccatccatctccatctatccatctctgtccttccatctccatctatccatctctgcccatccatccatccatccatccatccacctgtccatccccatccatccatccctgtccatccatccactcatccaccctgatgcagtgcctgccgtccacccttctctgtccattcccatccatccatccatgtccatccatccattcattgcccatctgtccactcacccatccactcatcccacccacccatccatccacccatccgtccccagccatccatcctcctgtccatccctgtgcatgcatcatccttccaactgtctgtttgtccattcccatccatctatccacccatccacccaggcgagcacctgccatgcccacgacctgcaccatctcggtgaatctccatcgtagccccaggaggggctcttttcagctgcactttcaggatgagagaagggaggctctgagtggccatttgcccaaggtcacacagagctcagggccagcgcttcccatggccaaagcccaggccccctctgccagtcccgcctccaggcttgcaggtggagcagccaggggttccgtactccctgccaggcagctgccagccctccccgctcccctctcagttcctcagcctggctatgggaggcccaagtcccacgtgtmactggaattcgggaggcctggctctcaaagctttctgtrcaaaacaaggagaaaaagagaagccacttttgctgtctggacatgctgtgggtgtcctggggaatgtgctggcccactgcttggggcctgacttggagtgcccaggagctgcgtctgcactgtggcttgaaccgagtgtcgtgctctgtggacagagccatccactctgggggtgctcrtcccatggcactgtcagcccccattctggaaggtcccaactgggtcccccaggcctgtgtcccagagaccttccaggtcttcattcactgatcatgcatttattttgggggtaggataggtcctgaagaccacagggcagggatctctgagttggggcttttgcggagtgagggagtgagagggtgttcyaggcagaggaggtggcagagaaaggcaccaagtgaggcaggggcagttggggacatgagtgctcgggagcggggagagggggcagctggtgggtaagcagaggccagctccaaggcccccctgtgggccacattagggagacagggtctggccttgttggtagcgcggcccctcscagtgatgggtcccctgtcagacctccaggatcctgggttgctggtttggcgcagccccggcttctgtgagcttttgtttctgttactggcacctgcagctcttcctaggcccctgccctggggcactggtgcctgcttcrccaaaggcacagagggctgcaggygactggggcagggtggggggctygcctcttagggctcagcttcactggccagaaacagggctggctcgakctgggtgttggcctgggtggggtggccagcatgcccacacctctcagtctggatgtggggagaggttgttccatccagggcagttggtctccagaaggaaattctctgtatctgggtgctgcaacctaggtgcccggggtctcacgcagtggggcctccccggaggaggtgaagtgcatgtggcccctcgtgctggatggagctggactctagggaggaccaggagggtgagctcaggccagggcgccaaggccctgagccccaggggcctgcctgtctgcccatcaytcctccactcatggggagggactgccccccagcccagatttctaggagggccgaggctcacaggaagccaatgccaggcgataacccacagtccccagtggtcagtaggaaggaggctgcctgcttgtgtgctcattaggagccaaggccatgaggccactaacggaatgtccctgatctcagggatctcagtgtggaggtggcagcacacaggtaaccaaacaattgtggcagattgatgggtgctktgatggggtccacacagttaccgtggagtgcagagtgggcacctaactgaggaggcaagggttggagggaggaaggtttcagggaagacttcctggaggaggtgacttgttcttagggaatgaggcccagggagctaaagctttagggcagggcagcagattcagagacacccccaggggtagggggaagtgcactagagtgrcgtgtgcctggcgtgggaacagggagacattagagaatagtgggagtgtggcaggctgggcccgccttgcccctttcaaggaagcagctgccgcgtcacacgctgcagcgcagtgctgcccatggtttgtcggcccatattgtgggatctttcagattttctcaagaagccaggtttccagctcctagktttgaaaagttctatgtgcgcttgaccggggggccttacgtacgtgaattgggtgagggcctgagacaggcgggtgagcacttgccccacactccagccaggrttgggggttcaaggkaccgcatttgccacgtgagrgagtctctggagaccaccaacccgctggtgggcggccaagcgtcaccaccagtccctctcagtgcgtcccacctctgttctcagcccctgyggtgcccgcagtcagtggggcagtgagaaccgcgcaggaaatagctggcgccatggtgtcggttctggttgacagagtgccacctggctaaacccagccgtaaataagccccgtttcctccctgtggacagagactggtgggtgccaaggttcacggcaaaaacccttccccgccaggccccactgctctctgcctggctggcacacgcccttgcctcaggcctggctccccgggtcctgttgaccaccaggctgcagatcccaaggaaygcaggcatctgggtggccccacgtggagcaccagccatggggaggccgtgggctaccaggcccygcrtgcactcscagcatgcaccactccttctccaggtcccgtygacctccatgtgtgctgtgccccrtcctccgctgcactgcctcttcgtagtgccccagctccatccgggggtgggtgggagtggagacccctgcctacaggcctccgggtctagccagagtcaaccagcccaccagagacacccagatgcaggctatgccccacgtgcccagggaggatctgctgacgtgagcccagattkcgattcttgtgsgagggagacgaaccaggtttaaaccccagctctgccacttctggctgtgactttgagcatggctgttcrtctctgggggtctctctcctcatctcagagaagcagatcatggtgcgcaccccatggcgcgctgtgcagagcacatagagacgccacccacagctggcttactgcagaggtgtgggcccattgtggtatcgctgatgtcctggaggccacaagtctgctagctagaggagcctcacctgcatcccggggcctgcccactggctggtggagagctctgggttgtgggcagcaggcaggcctatttccagtgagtctgtggctcctgggggtgtgtgagaccttgggcagatcccttcctgtgcctcggtttacccactagggctcagagccctgggggactggctcagtgagtgcctcctgcgaggagagacttttgtccttactagccagaggacaggtcagccggggcaggctctgggccctgggcaccacccactggaaggaaagggggttcagttagcccagccctgccccccaatggaagaaaattggggttcagttagmccagccctgccccaccccagctcttcacacatccagatccagatgggggccagaycaccaggagactgtarggatccaaggccgaggggcaggagacgcagtgcgcccctctcctatttctgggttgcaaccgcccacacatgtgcacacagggaagatgtctcttttggttggggggcacaggaccccacctcactcttagctctgagacacccttgtcaggcctcctggacaggtgggagggacagggcagggtggggtgtggccagctgcagtccctgggaggggtactggggctgggccaggccagggcaggacagagttggggaatccaggcccctcaccattgccctggctctttgtatgtagtgctgcctgcgggcggcagcctagctggacacctgcagtgcgctcatgcccagcctctgtgggtgtctggctcaccccacgtgggaggaaggcggcacgggtggtttgggctgggcaggcccagcccgggtgcacagctttctcatccacacacacattccatgtgtaggggctcagggggaggggtcacctcctccctccccacccctccttgttacagaggagcagatggccaaacggatgggggacaagcacctgacagggccactgctcctgctctcagctgggccagtgggaaagggagcttggcacctccaagggaggtcccagccaggggaagtgtgtccccatccctgctctggtccccaggccagagaggtgagggacccagagaggcccaggatgaggactccttcagkcctgggtttttgtttggattttttttttctgccaagtgacttyaaagccgcccgagaaggtcctgtatgtgtgagcaggttgggcaaggggagggcgggtctccaagctgggagcctcctcgcggccctcgcctcggsrctgatgtggccctggaccctccggtccctccaggccacccttcgtgccaggacccagctggcttcaatggcaggaggtgccctgggctggagggtccccasgctgggctccggggctccaggttgactcagcagtccccaggcctgtgggcagagctggcctgggaggacacgggcctgagggctgagcaatccctgagtgagaacaggtagctgaggctggagcctgtgtcccccaggcasctgctaaggcccgggcctggggctggagtgctgggctcaggtgccatgtgagctctttgcaggcagggaccaggtcagagtcctttgtgtgcctcttgacccccaggtcctgggagaagaggggcttgggaggccttggctggatgcacaggctccaygggaaggagctcctgctcgggtttctttgtaagcagcacgacatggcaccttcccagaggtacatgggtctgggcatgtcatyccccgacctgcttccagaacccaggggacggaggtcggagcagcctgcctgagatctgtggccatctccactccgccacccagctaccccgtaaggaggccaccgaccctcgggcacctgccagggacccagctcaggccaggtcacgggctggatgtgggatgttctgggccttctgcccacctcactgggccccagcaagctgctgtcctgagggtggccgtgctgggccagcacgtggacagcagggaaccccatgggcacaggcctagtgtgtgtgatgtaccggtgcagaccatctgataagcagccttcagagaagctgcgggtgtgcaggtggaggcagacctcccagctgcatcctccaggcacttgccagggtcaggctctggtgaacacccttctagaaataaccccccaggcccccgggggtcttgggctcctggggttctgatggaaggatgccccttgcccggcctcactacctccacctcatgaatcaccctctgtccttgtcctgcaagtctgtcggcacagccgagctggcgtcaccctctgatgccagtgcccrgatccctgaattcactgggcagccgccccctgcacctggctcccagccaytgcctttccaaagcaaatggggacagggatacctgcccctccctgggtaggcagctgttgckgcctccagttgtgagagtctctgccccaccctgccccttcccctgcccctgcagggtagagaggaggcgggtgggccaccgactgggagtcccgggcagctcaggtccctcaagagcccctcggggagaggccgcacccgtctcccttggtcagtgttccccaggaggcggtgctggcctgcgtgtgccctggaggaggcggcagggagactggcctcatggggctcttttgctggggcctggccaccattttccttcgattggtacaaagactgtccctgtgaagctggccaggccccaggcacagaaccgccttgttttctgcctctcactcacccgttccctgcattcggctgacagagcatgagggggaggaatcactgatgacaggcactggcctgcccagctgggggcctttgtttattcatttggtgggcacttcctgggtgcctgctctgggtcaggcctgtgggggggaccactgagggcaggaaacctggcctgtccctccaggaagcgaagtcaacactggcacctgcagatgaagtggcagagcrgcccccagctttgatggcatggggtggttggggggcacattctgcatgctcagaagagagagcaactcgccctgtggaaggagcatacagtgggagatggggacaggtgagtggggtcttgaaacgtgaacaggagtttgcaggtggagcaggtttcaagagcattccagggcacagcatgggcaatgrcagggagagctgggatgtctgaagagcagcggcccagacactgagtggctggcgaggsgagggaggtccgcgggtggggcccagtcaggatggactcatctgccatgctgaggagcygggctatgatgtgggcaatagggagccacagcagtttacacaggggaggcgggagcagctgagcatttagggaaaccactctggctgcaaaagaggagagggggccaggctggacggaggagccagtggagggggagggggaaggggaagggaacaggcttcagcagaagacctcctgccttcaaggggcccgggttaccctgtgggttccggtggttaaggccagcctcccggtcctgcagccacatgcctcccagctgtgtgcctccgcttccacctccgaaacccgggcagcaggacccaccctgcaggctcctgcgcaaggatgggggaggtacctggagggcccaccccacatcagaagcaggtcctcagccagagacacccaaatgcagcccgagggaggctgcccccaggagaggagaggagaacccgcagccgccccgcaggcgcctggggaaatcactcactgctcccacctcccagccaggccccgagggccaggcactctggcttagtgaagaagccacccagcaaaggcctggtgtctccacaccattctcgggggggacagcagcaaggacgatggamgggagcagtgctcggccttaacgtccctgtttccggaagcgtccctgccccgctcagtcctgccccactccctctcccatcagtgccctcaractccaggcccttttctttctttcccagcagtgctgacaactgtgagtgtggaactggactgtgaaccctggagggcagatggtggaggtgggagggggcaggccagcgccagggtgagctgcagggtccccaggtgcaggggaaacgccaacttcgtgtgcagtcttgcctcttttgtttcgtttcagagtggcccccagagccaagccctatgctaccttacagatgaggaaactgaggctcgggcaggtgaagagaccggccctgggccatgcacttttttggggacagagcagggtgctcagctgtctgggggcctgggctgggcctggggcagggggaggagcagcgctgtgacccccacggggagccgtcagccaggcccgtagccagggaagggcggaggggcttaacgcaggcccacatggccaggacacagaaccrtgggggcagccccagcccttccctgcctgttacaggcccctgcccctgttcctgtgtcccatgcctgtcccctccctccatgtgtctgtctctrctygcctgccctctctctgccctcttttctctgcttcatcctctttttcygtttctgcctgtctcatggttcttcctgtccctgccctccctccctccgtgtgtggccgtgtctctctgtctgtctcttcctcctcctccrgctctgtcccagtagggccactccaggcaggatggtctgcggcccctcctgcttcaccctctccactctgtccccactgccgaggacacacctttgctgggtttcttggttcagcttttgtaccgtgacatctcygaggtccacaggtcacagggcactggccagtgtggggcagggactcctcctgcccaggccattggacaaagcagagctgcttcaggggctttggggccaccaggccaggaacaggtcccctcctgcctaccccagctccctgggagacacmgcccacagcagcgtcacgtaattaagacataaaagtccacgatttccgctgcgtgtgggcaaacaccggccgggtgctaatgcaatcctttcttttagtggattcttgaatttaaatgatatgtaattaaacataattagccacggacgccattcggytaggtacacgtgcggagtggggctggccggattctcattacaaagcgtcatcttctatggggagacctcttgttccctctcggggctggttgcttttgcctggacaataagcctggccccagggcacctggggaaggtgtccaaggagggggtcctgggggccagtcccccgggggctcggatgatgaatcatgggcggtgtttgctggaagaatttttgttccgcttcgggcaacaaggaacccaaacctctcactgttgtggggagaaaagttggaaatcagatgggaackggctgcggtaccagagaggacgtcagamccgggccgcggcctcagcccccgactccttgtaagcgtgggctgggtgcacacgtggcggctgcgagcagtgctttggagctcatctccccagaccctagtgggagctgagggcagcctggcagggctgatgcaggcccatgcacacaggccaggcagaggtgagaccagggaatagaagcgttgcaggggcagagggcaggagggggcagagyctcggcgtaggagtgagcctactggtccttcccgcaggcaccctccctagtgccaggtctgctgggactccaggctgttggtatgccccctagggtcctgcttggagcctttctgaccctcctgatccagtgcctgtgccgggcttcctccccactcaccctgtcctccctgtgccccatgtagcccacacatcagtgtgtccgtccgcctgcctgtctgccccccaccagcctgtgtgcccaggggaaggctcaaggccggtcatgctctacctccctggccagcccasccccagcccacggtgcattccctggacaggattgctgagttttccattttagccacaacagcgcccacacccgcgccaaccaacctgtccttgccacgaatattggctcctgccctcctcatgggagcccatggtgcatgctattatgacctcggtctagaggcagggacaccaaggcacaggggcttagggaagttgcctgaggtcacgtggctggtagggggcggagccagctttatcctcatggcacagatgaggaaactgaggcagagaggtgttttgccagggggctratttactgagctagccagccgttctggttttgtctctgtctcgctcagmgggycccccaccccacccacctgcctacccagcttgccgtgtcctcggccagggccagcagtctcagaggtagagctgctgagagaagcctgtcatctgtcctccaagagggatctgagtaagccggagagcatcagcagcctcaaggggaccttggacccctgcccacctttcattctgtaccrgggcagggtgtgtctgcacagcctggagccaggtgtggctggcagccccaggaagacagggccaaccctgcccagcccagagcagccgcatctctgcagcagcggtgcacttgagtggaagcactggcttcccaagagtaagagcttgagaaggggcctgtccagagccctgggggacggtggacaggccagcccaggggtccaggcctttcctgtaggggccgaatcgttaccacttcaggctctgccagcttccatttggtctctcttgcatattactctcttctttttacacccctttaaaaatataaagacaggccgcaggtaggatttggccctctggcctacacaatagcaactgtgagcattatatgtggcttctctttctttttgagactctcatctgtcacccaggttggaatgcagtggtgtgatcacggctcaccacagcctcaacctcccaggctcaggtgatcctcccacctcagcctcccaagtagctgggactacaggcgcctgccactacacctggctgatttttgtacttttttgtagagatagggtttcaccatgttgcccaggctggtcttgacctcctgggctcaagcaatcctcctgccttagcctcccaaagtgctaggatgacaggcgtgagctaccacgcccggcccatatgtggctttttaattaaatttttgaggtataacattagtaaagtgctctaaaagtgaagaataggatgttagccccacccaggtcaagatctagaacattcctggcacccctattcacctttccgttaggaagctgccgtcccaccctctgtcactagtctgcctttgccagctctggagctctctgtaagtcagtcctgctgtgtgtattcctcgagtctggcctcagttgctcttcaggtctggggctcacccccattgccgcggcaggaactcaccccagattgagccgttgtggagtattccagtgtgcaattctgccgtggtctgttttcccatcctccccctggcgggcatttgtccagtgtttgacttttgctattgcaactaaagctgtgtggagcagtgtgcctttggtgaacgtgcctttrgtgaacgtgaggatgcatttctgctgtgtacatacttaggagtgggactgcagggttgcaagtggatatcaacacgcagttttccaatgtggcccgtaccatagaaggcctcgtggtgatgccgagtccatattccagcactgacgcaggattgcgtggtgccaagtccctatttcagcactgacgcaggatcacgcatgtcttcaatgcccctctcctagatcgtagacaccctgtgtggcatcacagaatgacacacacaagacaagaggcctctaaagccctgacactgacacgggttgttcttgctggggttgctaatggagcgggtgcgggtgtgggtgcgggtgagggtgctgatggagcgggtgagggtgcgggtgagggtgctggtggagcgggtgagggtgcgggtgagggtgctggtggagcgggtgagggtgagggtgagggtgagggtgctgatggagcgggtgagggtgagggtgttgacggagcgggtgagggtgcgggtgagggtgctgatggagcgggtgagggtgcgggtgagggtgctggtggagcgggtgcgggtgcgggtgcaggtgagggtgctgatggagcgggcgagggtgagggtgagggtgctgatggagcgggtgagggtgcgggtgagggtgctggtggagcgggtgcgggtgcgggtgcaggtgagggtgctgatggagcgggcgagggtgagggtgagggtgctgatggagcgggtgagggtgcgggtgagggtgctgatggagcgggtgagggtgcgggtgagggtgctgatggagcgggtgagggtgagggtgagggtgagggtgttgacggagcgggtgagggtgagggtgagggtgctgatggagcgggtgagggtgagggtgagggtgctgatggagcgggcgagggtgagggtgagggtgctgatggagcgggtgagggtgcgggtgagggtgctggtggagcgggtgagggtgttaatgaagcgggtgcgggtgagggtgctgatggagcgggtgcgggtgagggggccgcatactcatccccttgcctggtcccccaggctcctactttggtgtgtgctcattcaggagcagcagagtggccgtgcttgggacggccagccaagcgatccccactggtactggcatctgtaggtgcccctgcttggagcgggtgctggcaactgccctttgctggaaggggcagcaatgtccagcagtggtggaagctctcgaaagaacacagggctgggagtagaactcagtcagatcccagctctgctctccctgctgtgtgacctatagcaagtctctgaacctttctgagctgtttcctcacctgttcaagatgggggtgaccacttcttccttggaggatggaagggagagggatgtgaggctcgtgagtgctgtgctcggagactgtgcaggaggggaagcggccgtagccccatacaagcaggtgggcaaggaagtgggggcgctggaggggcttaggggacaaggggttctgtccttgggacctggacaagagccaaaaggtataccctcacagtcacaggggagcccacactgccctcccctcccagggactgcccctgtggcccccgtccaggtccacagcctcagcagtccctgagggccaggargtagcctccaggccactgggctgagaacccttaaaagaaaaagcccccctgcccatgacagtcattttagggtcaagaaagccctttgcagaaaccaaaccctttgaaagggccaacacggcttttagatgacgtgagaaccaacttcaagcacttcctctcagaccagggtggcagcttccaaagtgggggcgctgctgccgggagactgtggtttccctgcttctcagggagcttgggccaggccgtggggagatccaagcaacatgtccctcggtagtggtaggtttgcagacgggccgctccccacttcctgccaagctccagcggcacctctgtgggtgcaaggctgtggggaggggccttctggctcacagccctccaggctgcccacagcccctaggatgaggtgccacttcctcaaatgactgtcaagactgggatgggggccgggcacggtggctcactcctgtaatcccagcactttgggaggctaaggcgggcaaatcacttgaggtcaggagtcggagaccggcctggccaacatggcgaaaccctatctctacactaaaaaatacaaaaaaagccgggcgtggtggcgggtgcctgtagtcccagctactcaagagccgaggcaggagaatcgcttgaaactgggaggcagaggttgcagtgagccaagatcgcaccattgcactccagcctgggcaacagagtgacacttggtctcaaaaaaataaaaaataaaaaaggctctggatgtctccacgaacccacctgaccccttcctgctcctggggctctcctctcccacccacgtgtctacccgtagctcctgcctgccttcaggactcagcccacagccccttccacaaagtcccctggcagggcccggaggcctctgcactgtctcatggcttcattcctgtgtcctcagcatccagtgagacctcaggagatgcctggggaatggctgaaggctttggagaggttgctgcccccagaatcccagccagagggcagtttatccaggagcccggtgcctcctctgttgggtgggcgtggcctcagagggcaccaaccagaagacacatgctgtcactgacatgcgggcccccagcgttagggcaggcaggagctccgagtctctaccccagctgtccccacagtgcacatggactaggctcctcccacggggcactaggccaggccaggggtgtggggtgagcccctggggagcccagagcagggtacactcatgtccccaccatccaaggtgagatgtctgtgctggaggcccagagggagctgggccggctgtcactccaccacaaggctgagcaggctccccagtgggagacaggtttggggaggtgtccaggttgagggcacagtcaggaggggccatgtgtgcctgagtagggcagggggaggagggggatggccagtggccacgggccaggctgcctggcaggacctggaggtttcctcaagctaaggccaggcccatgttagatgctgggagggtgggtgtggctgcagaggggtcagcgtgggggcactgactaacctccggccatcctctccaggcccagtgacgagcaccatccggaagtgaaggctgatgggtacgtggacaacctcgcagaggcagtggacctgctgctgcagcacgccgacaagtgatggcctcctgggagagccccgcctcctccacccctgcctctcctccacccctgcctcccctccacccctgcctctcctccacccgcccaggagagccccacctcctccacccctgcctctcctccacccctgcctcccctccacctgccccagtgcccagaccaaccaaggccctgacagccctgccttctgccctctgccctgcatgggcaggcatttgttccctacctgggtggcctgctcccctgcctgggccctgacttcagctccctgtagtgaagtccaggagggtgggacaggcctgtcaggcctctgggaatctcccaaatcccagaactcaccactcaccatgggcctttaaatgcagtaaactccacctaaccagattcaggggcactatgcccactgcctmctcttcagactctttgcatttcagtgaagagcctggaagaaacccaggggcctcctatgcacagatcttgcagcccagaaccaagtcagcctccctgcgactgcccaggcacactgcccaccaccccacccccgaaacaatgccagcccgctgctttttctatcctcccagtcacctttgcagacaaagaccaggggcagctcccgagggcactgtgaaggctcccatgccacacagtgagaactgtagcctctgygtccaaggcacacagggtactttctggacccactgctggacagacttgaaggtgtcatgcccggtgtgtgcaggaggaaactaacagttcagtaaactctgccttgaccagcagcctttgactcaggctttgactgctaggaagaaccgtatgggggaggccaccagcagggtctgggccactgtctctagtcctgccttatgcttgagccactgaatatcagaggtgcgagggacaagggccctgaaacacctcacctgctccagccccttcacttagcagatggggaaactgaggcccagaggggccagtgagctgctgttggccctatctggaacaaggcagtccagggcaaactttggcactgccttccctaacggaacagcctgtggcctgggggtggtgagctttgctttcccgaccaagggcgcggcggccttcccacaggggccctgggaacaaatcactcataactgaagtttcaggtttcagaatcagtcagctgaacagataacttgattgctccatttctccccaaatcagttcagaagctactgataacccttgagagactgcttctttattttattttattattattatttttgaaatggagttttgctttcgttgcccaggctggagggcactggcgtgatctcagctcactgcaacctccgcctcctgggttcaagctattctcccgcctcagcctcccgagtagctgggattataggtgcccgccaccacgcctggctaattttttgtatttttagtagagacagggtttcaccatgttggtcaggctggtctcgaactcccaacctcaggtgatccgcccacctcggccttccaaagtgctggtattacaggcatgagccactgcgcccggcctggagagcgcttcttatgagagaagccatgggtctccggagcaggatttccaccacatgaaggtggacgataagaaagtgtgggacccacgccggggaggggcaagtacagcccccgcaaggccgcccattaaatcaggattgggggaaacggtgacagtcttttcagcaagatgagaggccaccagccgggccagtgtcactggatttgagggagggccatttggccccttagttggaaaatatgcagatggctggctccttgatggagtcccctgatggcagctccttaggagacaatacaggacgttcaggcggcggctgcagttcagtggcagcctggaggggctgtgcgtgatgccgggctgtgcgtgatgccgggctgtgggtgatgccatgctgtgcgtgatgccgggtttgtgggtgatgccgagtttgtgggtgatgccgggctgcgggtgatgccgggctgtgcgtgatgccgggtttgtgggtgatgccgggctgtgcgtgatgccgggtttgtgggtgatgccgggctgcgggtgatgccgggctgtgcgtgatgccgggctgcgggtgatgccgggctgcgggtgatgccggggctgtgtgtgatgccgggtttgtgtgtgatgccgggctgtgcgtgatgccgggctgggggtgatgccgggctgtgcgtgatgccgggctgtgcgtgatgccgggctgtgcgtgatgccaggctgtgcgtgatgccggtttgtttgtaggtctttagttttttctttcttttgtgtttaatggggaagcttcccgccaagacagcaacccctctgggggaaggagttcaagctgagacctctttttttttttttttgagacggagtctcgctctgtcgcccaggctggagtgcagtggccaatctcggctcactgcaaactccgcctcccgggttcacaccatttccctgcctcagcctcccgagtggctgggactacaggtacctgccaccacgcccagctaattttttgtattttttagtagagacagggtttcaccgtgctagccaagatggtctcgatctcctgaccttgtgatccgcctgcctcggcctcccaaagtgctgagattacaggcgtgagccactgcgcccagccgagacctcctctttcaagttgctacccaggagtggggtgcccagagggacagcccctggaggtgcagccccctgctttgttggggcgggagcatgccaccctctgagccgcggtgggctcagtgaagtgggtgttgtcatccttcccactgcacgggtctagagtctggggtgcggtgagctcgcggcttgctgagggccaacagttagtgaggggtggagctgcgacttgcaggaaggtccagccccgcctcccaggccctttctagccccttctgttgccgtgctgcttcccacccttgcctggaatcctcctgtgggggacgcatgtggtggcccctgtggctgactttccggctgagccagggcaccagtgtcctcactctagagatgagctcttctgaggggtgaggtccagccacacctgtggtggggtggtgtagcccgagcctgttaccccgtctataaaacagagggattcacttcttttacaggcacttcctggccctgcggggtgccctgtctctggctggagctgatgagccgtggtgtgatgcttgcctgggggtcggtgttgcctagaagtgaggaatgacctccttcacccctggctccttccggcagcctggccacttccagcatgtggagggggcccgggccctggcagagacggtgtggaaccgccggccgcatgcggggctggagttcggggctgccaatgggctaaggccctgtgttcaacacatgtcgcggaactgtcgtgaaaaaaagactcaggaccacaggtccggggtgctcccaggggtctttcccaccgaggctgggagtgagcagcagcctaggcccagccacacctcccaggctcgggagctgccaggccaggcaaccgtgaagggtagcagggtggggggtggaggggaggacagggagagcaggcctctcgggcctcacccacccttgcaccttccagctctagggcccacacagtaccaagccctgggctcaatgtaccacttatgaaaactcaattcaaattggcttagtgcaacaaggtatttggtggtctcacatgacttgaacatccaggcctggctgtcacgggaaccgcatctcttcccattgcagctacttggcaggtggcgggatgtcccccagccaccgacgtccccctgcctgctccgcaaccccagggcctgcagaaaaggcccacgagactcagactggcagagacttaggcggaccaggaacaggggcgcagtctccgtcccacccaaaccctaaccagagagaacacggcacgttgtgccagacggaggacggatgccagcgagggtccatgtcctcactgccgacaaggctgggaactgggccaagtgaagcagaggcctccacgtcagatgtgagcgccaccggcccaggtgactgcagttcttccctccttccgttcggcttgagccctccagaggatcggaaaggctgaggcctgacctggtgccgctgtcctgggtgggtctgtcctgctggtcggttcctgcccctctcggggaggttggctggcagctggcaggtggaaagcctcctgtgttcacctcagggcagaggtggggacacagggcgggacgggcgagtgtggtgcccctctggggtgggtgctcttgggtccgcctcccgtgccagagtgcgtgtcaacagttccagctgcccctcagaactgtcctggtttaggaggtgaacacacggggcagcctacattctacgtggtttttttaacattataaaagcagcatgtgttattacaggaaatttaacagaagtatataaaaagaaaccagaagtcacccgggagtctgagcactgtgctctctggggcctttcctttcggccttcttccttccagccctttccctgcacactggacagagtggctgagtctctctcgtaagcccacagggttatgatcgctgtgcaggtaaggagactacacgtgtgccccatgtcagaagcacctgtgcctggcctgggcactgcactgggggtgaggcctggggccaggccccacgtgggggcagaacggagctatccatccagccagggacctcatctagggattgggggcagcaaggggctggtaagggccagaggtaattccagggccactctgtgccctaccctcagrtggggcacaagggtgggggcactgcgctgggtagaagccccccgccagcccctggcccaccagtcatctgtcagatacggaggcaggggtgaggggagggtgtgctggggaagtcaatgcatccagcctcgaatcagtgagtccctaggccttgggtaaggcagggctgcagggatggcagtgaggacaaggggctcacctccccccagcagccccacttcacatgtttgtttcttgagttcagtgctcatagacttaaaaaaaaaaaatcttgctaaaagcaaaaaccaaaagaaaagcgggggctacagagcctcattcccagaggggctgctctggccctaacaagcattctaggccagacttccatgggcagattgtgtgggcaagtgttgagttatggaaatcaagcaaacctctccacgcctgtcctccaggccgcaaacacgcccttctcctgagtccgggtaagcagagggccatgcacgggagacagtgggccacgccgggctgggcttcgtgcttctggggcccccgcaactcactcacgcagcagaagtctgcactgtgctgcctgcagcgggggcagaaacccggagccagtgagcctgtctgtgccacctcagctaccctggtgggtgggtggtgggggccatcccaggcccctcagggctgcaggccaggctgggcccatctccgcacgctgctgtgtggcctcacctcccagcgctgtcgaaggctgagctgctgtgctcggaagggcagactcctccatggcttctaactcaagtgacacaaggagtgtctccccactgctgtcctggggctcctggccctagaagggctccccatgatgcagctgtggccatgggcagccttcccccgtcccccggcgtctccacagctctgtgatgtctgctagccccattttatcgattcagaccccgaggcttggaggggacagaagggtccagtctaggtctctctgcgcccagagctaatgctcctgtgagcaggggggacctgccagttcaccacacccaacagaaaccacacagctggcaccaggcacttgggtattgaaccaggaagctttatttacacagtacaagtaacaagcaaattcctgagagactagagcggctggagtgcaagccacagcctgtgcggggaggccaggctgcaggggcgggcagaccctgggccccgggtctacgctttctggtcgccacacttcctgaagcacggcaacacccacaacatccagctcagggaagcccctgcagccccagaaacagcctatgtgctatctgtcgccccagcccccaggacagcttccccacacactgaaaacacaaatcatttgccaaaaagactatgctagaaggtcagactatcctatctaggctacaagatctccacttcggtctgccattaaaaaaaaaaaaaatctttctcttcttttctctttaaagaggcatgacagaggggtttgaccaacagcgtggacatggcaaggtgtggcatcattgccagtgtggggccagagggtgcccgagccccggtgcgcggccagcctgctgcatccctgccggctgacgtctggagtgaccgtcattccagtgaccacccccatagccacagacggcacgtcagtggaaacgggggtgcagcaggcatgacaccaaggcagagcccgcagcagggggcccggggttccacagctagggaagcttgctcagacaggcagcacacccagggcacggccactcacgcccccgcaccaggagacccatttggaagttagttagggtttgttttgttttctttttaatgtggacttcccctttatttaaattttctttcagtgtacaaattcacaaaactggctacaaaaatttggttg

SEQ ID NO: 94067 - DNA, 60463 bp, Homo sapiens
tcaacacagaatccatccaacagactttatgatcttttgcctggagcaataaacctttattataaaactgctaccacttactggctattgttacatgccaggcactatgctgtgtattttacatttactacttcatttaatccttgcaaaaggttgtcagagtaattacgaatgaggaaattgggttcagataatacataacttgtccatgccagcttttctcattccaaaacctgtgcttacagccattctgcgacactgccttctacaggaaggtagtgggagaagccggggttcctgtgccatagataggaataccagtattctggggggatgtcagcacctccctccttttcaagcctttaaggatattatcctctgccttgcaagctttctttccctgggctcacagcctggggacagacacaccacgtgcttggctcaagagcctttaccaggagcagagaggaaatgccaggaagtgggagggctcctggtttctccagacaagaaactggagagggcggaggagtcagggacatcctgtctcactttagatgtatggctatccaccagaaagaagctgccagatgccaagcccagtgccacaaaggtcgccaatttacacagatggagaaacattctgtgggtcaagagtgtgtcatcaccagagaaagatggattagtacatattttttcttttttttttttttttgaggagtcttgctctgttgcccaggctggagtgcattggcatgatctctgctcactgcaacctctgcttcccggtttcaagtgattctcctgcctcagcctcctgagtagctgggattacaggcatctgccactatgcctggctaatttttgtgtttttagtagagatgtggtttcaccatgttgaccaagctggattcaaactcctgacctcaggtgatctgcctgcgtcagcttcccaaagtgctgggattacaggcgtgagccaccgctcccggccaggacacattctttatttgctcagtgtttgggacactatgacagcaaaagtgtcttggcaaacctaaaattttatggaaagtggctttggaattaatggcatcactgttagtcattccgtatctttgaatactgagtacctggagcaggtggttgcttctcctcctcacaacctctgaaagtttttgctcttcatgccaaggcataatgggggcaggaggaggagcagagactacgaaatagtaggaacagagactgtgaaataaatattcagaaatctggcatttaggccagactagcctgctaccccggagattatagtgatatctgggagaacacttcgttgtttaaagtattgcttaaagcctcaaatttgttcaggtgtcaaagactcattcctttaggacaaaggtatgagaaagtctgtttcagccacacaggataaatagcagatgactgaagcacagaggagacaggcagggcttccaggagggaggaattttcttctcttggcacaaacgttttcagaaacaagaccagagcgttcttgtcagtcagccaaggccacacctcatcctcagctttgtaggagtcgtgggtgcctgtgtgcatcattactgacaggatttgcatcctggggattttgttttgttgcagccctaagagccatgatcttccagtttgatcttaactctgctttcctctggctcctcaaacttttgcttagtagaagctgcatcttcagaaccggcaccatagctgtttgtaagagctgagaacacaaggggaagtttgcagttcacaccctgataggtcacagccatgtttacttgctcttatttctagaatagtgagtacgcggtgtgctctacctttaggaatgtccccgttaggaacctgtaagcccgaactgaagagaaacttgctgtcatcacccagcagggcccccaggaatactgtcttccatttgttaggaatccaccagaggcctagtatcttagggcaggaggctggtaaggtcagagctctctgccctctgcctttttcccatttcacagataaggaaactgacgctcaggtagtcttacggacttgctgaagccttttccaggaatgcaccggtaggtgctccctttgcctctcccccagtgtgatcacaggctcatcgcattgcattccacttaggtcaagcacctttttctgcctctcaccttttccctgggggagaagtagagcccaaacatgccaaacctttacttttcacctaaacttgatcaggccactgatttagaaattgaagggaggcaggcagaaagagggagctggaggaaggagagctagaaagttgctagaggttttactaaaacccaccatcctggatacagctcatcttatctgacctaggacgccgaacagctggccttgcatctagtttatagactaggctggtcactattgaggaagccacaaatcaggcagaaagaaccctccctcggtaatagtctcttcaggaagcagagatgggacaaagtagcaaggaattaaagagttaccccaggcagagggggctgcactttgaacctctgctggccacgcacagacaacttctgttccaaagcaccatccgatgaaatagcatggcctctcctaatcataagggtaacttctaggcctaagaatcccctagaaggaaggagggctggggagcaaaatagaggacagtgtgccccctccagcagccacagtccttacaacacccaccgccccccaacctggttttaacctcaggctttccattccagccaatcaaaggcatcacacaaattgggctagtaacaatggcaatgcttttccagctcataatggccattacctgaaccgctgcatctctgtctctgagggcaatggagaaatggaaggggctgagctcagcagagaataattagggcctacggaggtaagccaggtgtctgtaagtgtggggtgctcctgaactgagcgattaaggcagtatgaatttagccttctgtgttgatccttcagaagtacaattctgtagggtttatttttaattaaaatattcacttttctttcttattgcaaagagattaagacaaaaaatgaaaattaatataaacaaagcaaggacaaaccacccctaattcctatgacacagagcgagccacttttagtggtttgttgtatgtaatctttccttttgaaaaaaaaaacaaaatggaatactaatatatattattgtatgatgtgcttcatcagttagcaatacactgcggctatctttctaagagaatatatatatatttatatatagatatatagatagatatctatttatatatagatatatatgtatagagatatatatagatacatatttatatagataaatagatacatatttatctatgtttgcggttcacaccctgacaggtcacagacacgtttacttgctcttatttctggaatagtgagtacacggtgtgctctaccttcaggaatgttcccattaggaacctgtaagcccgaactgaagagaaatttgctgtcatcactcagcagggcccccaggaatatatatatatatagaaatatatatataataatatatagaaatatatatataatatatatagaaatatacataatatatctatatgtatttctacatatataaaatattatttttagtgattgcatgccactcagtcatatgaattcactacatgttatttatcctggtctctctgttggacaatgaagcttgtgtctaaattttgactgttagaaataacactgtgtttaaatctgatcatatgattttatttatttgtaataaatcccccaaattagagttttgagtccaatatgcacacattcttaaagtttggtgcatattgaagaactgctgttaatgaacattcctaccagccagtgtatgtctgtttcttaaactcccaacaacactgaacatcatcagtattttcttctggttttgaccatgctcacttgtaagcatttaagaatacaaaatacttatacttgttatgattaatattaatttgcttgtctagaggcctaatactgtgctgaatattaggatccaaaaaagacacacacagtcacctggctcaaagattctcaggacaaagacaatctgtaaacacaaagaatcagaaatgacccagtgtgggaatacaaatcaaagaaagtatacatatggaaggtgggggagggaacaaaaagtgcatagataacatattgtttccagtgttctagttttgagaccatgacatgtgcaatgacacatctattaacagaattcctttactgattcctaataattgtgaggcaccattctaagtaatcatgcaatctcacagtatctttatagcatccttccaggaggggtgttactctgctcattttgactttcaggaaactgaggcacagatttaactgacttgtccaacatcatgtaagcatctgagccaaaaatgattcatgggattttgcttatggttccagtgagtttttggactcagatgattttgcaaattgactccaagccgtcctagcagaggagacagagaaactgcaggtcagtgaagaagcagttatgatgaatttggtttggagaaaagcaactcccctaatccatgggtttagaaatggccctctgagatagccaaagctaagtctccttaattccatcctgggggcttgctcctcaaggaagataagtagagaatagctattggctattctttccctcttctcacttcagtctgccaggggttctcatactttagtgtacttagggatatatgaggacctgttaaacatggattcccagagcaacctcaaaacattctggttcagagggtctggagtgaagccctggaatcttcatttctaaccatcaggagagactgaggtaggtggtccttagatcaagacttgagactcatagcgagtcgactgtgctcacataatactgagatgaacgtgagatgccagccccttccctgccagagtaatcagaaagcaagcccacagtaggtgggaattcaaccctttatattcatgtggattttcctggctgatagctgggccatcttacttggcagtagcaatggcttctcaagggtcctgtcatccctgtgatatttcagacaattgagagctgcccccagctccttgccctgacctgtgtagagggagggttagtatttcatgcatcaataaccaatctcaagcgccctaaaggcctgggtgagggatacagactgtgtcaacctttcagtaaaccttatagccataagcttacttatttcataaaaatttcctagaagatggaatcaggaagtgataattattatcactattactgggatcatcatcatcatcaacaccattgtcaaatctaatactgatggactggctctctttgcccaggtattttgccaagggctagtcttgtatgatctcttttaatctttaccatatcacttcacggaagaccttattacagttttatccctgttttacagagcaggagattaaggcatagaaaggggaagtaatatgttctaggtcactcaactaatgtgtgatggagtcagaattccagcccgggccatctgactccatttgagtcatttctgtggttcttattttaccggtggagagggacagaggggtcatgtgacttgcccaggaatgtgaagtttgtcagggatgtcactggatcaatcaccaggaccctgctgactagctgccttggcctccttctgcaaggctgctgcttctagatggtattaagacagactcagaaaagggagagtttcrgttaattaatggcactgaatagaaagcaagctgtgatcctcggggaactctacactgtcatgtaagttcctggcgtgagtaatcaggaggctgagcctctcacagttctgcagtgacacaggtgttacatgccatccatggctctcaaaccatgtcttgaggccccaattgagtctgggctctgttcagggattgaatgtcatgctgagcacccaacactagttctgatgctctttgccagtgtgctggtgacttgccttgaggctgctaaactcaccgtaggcttccagaccccctggaacatctcccatccattcagcatgcaaaggctgggtgcaggcctccagattgccatggacaaggtcaactcagagctagtggaccttggaaatttcaccacttacaccaactcagcctgcagcaccaaggagtctcttgctattttcaacaaccaggtccagaacgaacagatttctgccctgtttggaccagcatgcccagaagcagctgaggtagagtatatatagcctctggaaactttaagtttccattggaaggggtggccttcaagatgatggtacagatttgagtaatctcctgacaaggatcacattattataacaataaccgtgtagatcttgaatatcatttttgagatgcaattagtctatgtaattagaagagttaacattctctttaaagaaagcctttctttctttctttttttttttaatgctctgttgtccaggctggagtgcagtggcatgatcttggctcactgcagcctctgcctcccaagtttaagcgattcttccatctcagcctcccgagtagctgggattacaggagtgccccaccatgctcagctaatttttgtatttttaatagagacagggtttcatcatgttgtccgggctgctctcaaactcctgacctcaggtgatccactggtctcggcctcctaaagtgctgggattacaggcgtgagccaccacatatggccagaaagcctttcaaatcaataattgtttattcacctaccctcttcctcctcttgttgactgtctgaagttgatgctattgtgtatagactcttatagttcactctcatgttcctaagctacaaagcttaggaaaattaagaagaaaaaaatgcagccaggcgcagtggctcacgcctgtaatcccagcactttgggaggccaaggagggtggatcacgaggtcaggaaatggagaccattctggctaacacagtgaaaccccgtctctactaaaaaaaaatacaaaaaaattagccgggcatggtggcgcatgcctgtagtcccagctcctcgggaggctaaggcaggagaatggcgtgaacccggaggcagagcttgcagtgagccgagattgtgccactgcactccagcctgggtgacacagcaagactccgtctcaaaaaataaataaataaataaataaataaataaataaaagaagaagaagaagaaacaaatgcttggttttaaatagaaaactatcaattgtttgagtaggcttttctttggcgtatataataaattaatcagtgataatgcaagtcaatgagaaagaatcaagtatggcagcctaccttacctacagcaagaaaatgagggaaatgaatgacttgtatttgtttggttgttgggatgaactttgttggtgtccttcagtatcatgtcgcctgaaaagtgttgatgcaaaaggtgaacaggaaggagcagcacaggtcttactctcaacaatgttgcagaactatcattagctggagctgcagaattaagtttacatttaaattggacccattctctcctggaattccccatctgacacatttctatctgttcaagggttacttgtctaagagttaatatcaaatgtcatggagcctttctttatcccttcacctctgccctccttatccctaattccccaatcgaaagtaattgtttacttctctaaatgcctataaatctattatctatgcatcttaaagaatatatttaatcttaaagctattttttatataccttggttcttgtaataaaccatgagctccttcaagagcaaggtctccaaagatttttatatgtgataggcccctaattaaaatgaatgaaaaatgaataaaggagaaattaagaaagagagaatgagtagttatgactgtgggccatggaaccatattacctaatttccaaccctgctccactatttgctagctatgtaacttacatctctgtgtcttcctgttttatcttaaagagggggtaataatacctagaaatgttgtgaaagttgaaatgacacatgtaagctcctagagtgctcggcacagagtaagtgctcaattgatgctcgctttcgttatctttgttctatgaggctgacgttgtcatcaacattacaaaagcgagggcccagtatgacccacagactcacagaatctgacgtttatgcagatgtctcacactggggtttgcgtgtacataaactcaattatacaaagacatcctttgggttattttcaaggttatcggcttgctggcctctgagtggaacaccccatgtttgactttgttggacaaaccacaaaactgtctgacacctgtgtgaaacttgtgtcacccaagcaggacattggtgatgtgctccaggaaagtctccagtacctgggctggaaacacattgggatgtttggaggctactctggggcttcctcctgggatggagtggatgaactgtggagggttgtagagaatgaactcaaatcccattttatcatcactgccagcatgagatacaccaacaatagtctagtccttcttcaagagcatctttggaggatatcatcaattgccaggggtaagtagaaaagtcttctgttgcttttatttggagagaaaaatgggacaagcagatttgaaaaaaaaaaaaacaacccaaaaaactcttcacttttctatgagtgtaaaagcagatggaaacaaggtacaaaattaataatatataaaagcaacttcctttattgcttgacatcactaacaaaaaattgtgggtttttttttttggtctaaagtaaaaccccacatgctacagtgttatgatacacagcgcaagttctagaagcatcttacaggtgggctgggtcctggacttcactatttgtttacagcatgggctctgcagattgacagacctaggtttgaatccagtctctgacattttagctgtgtcctccttgggtaagtaccttaatctctctgtatctcaaatatcttttctataaaatggagacaaccatcctacctatgtcacagaaaggggaggattaaataaggttatgcctgtaaagtgcttagcaccatgtctggacaagtagttggtcaacatatgacagcaattatttttgtggtgatgcctataaggctcaactttctagcatgaattagtaactgactcctttctgttcctcaaataaactgaactctctccagccctgagactttagggttttctactcccttggcctagggtgtcacctgcacccactccaaccagtgatgctaatgtgggactctaaggcacaagtggctctcacttgtttttcttccacagctacctccctgtgtccctgttgaatctctaataaagggcttgaaagaccaacactgatccaatgaggcaattgttatgtggtctcagtcacattccaccctacccagcaccttcttaagggtagcgtcctctcatccttgcatccttgccgactgggtccagagcccacctcctcaggaaggccttctctaaccacttgatgtgaagctgtttcccctccccacccattagcatcacagcatccgtttccaacctcactaattagaatcttcaatgatctctttaatctgtccacttgtatgctgtctgctggctcgttcactgctatgtctgtgcccagcaaagtgcctgacacataattggagctcagataaatagactataaattacttcatttaaaaaactagctgggtgcgttggcgcacgcctgtaatcccagcactttgggaggctgaggtgggcagatcattcaaggccaggagttggagaccagcctagtcaacatggtgaaatgctgtccctactaaaaatacaaaaattagccaggtgtgatggtgcatgcctgtaatcccagctgtcctggaggctgagacataagaattgcttgaacccaggaggcggaggttgcagtgagccgagattgtaccattgtactccatgcagcctggtcaatacagcagactctgtctcaaaaataaataaataaaaaataaaacccactacttcatttgtgtattctgaaaatgaacggtgatgggattaaacggcagaaaagtaccatggcctactcctccctcyggccagcccaactcagaaagtccaaatgcccttgaaagtccacatgtccaaaggtcctctgtgaactcctcttagctgaagtgtggctgacaagtcacaagccaggtctgctgttctgatttttgagccaaaaagaaaaaaaaaacctagagcacagaggtgatcccaaacttttttcacttgtacattgtggggaggctgcagcaaagacttcagtgctataactgctagtttgtacacttcaggtttggttaaagaatgtaaaaactcagggactagtttaggcattcctgtttcttaaggcatgcccaaggaaagaaaaagttcacgtctcatttacagtgactttaggccagacttagagtgagagcatgcgtgagaaagcacayatacacaagcatgtgcaactggcggactctggttttcattcttatagttatcatcttaacgtgcagctcagaggatgcaaaaattattcttctggctgcagyaaacctgggactcarcactggagaatttgttttcatcattttgcagcagttggaggtgggtaccgttgaccactcaatggctctggtagtaasaggtagcaagtatggagcactcgttrtgacccacatgtattrgctcactgagcactcactacaaccctgtgaggtaggcactctcgcgtcctcttcttaarattaggacactaagasagagctggaagaacttgcccagagttcttctccacagctagtgaaaggctgaaccaggccatgaactagrtcagctggcttgaaggcctagcccgctgtattccgtatcasacaacaacagttgaggaactactgtcatttctacygggcagctgagaccttcccaagggaccctcagacacaagcggctctcacttctttttcttccacagctaccgccgtgtccctgctgaagctttaacaaagggctggaaagaccaacatacagatgcaacgaagcaattcttaggcagtctgattcttttggtaatgagaatggctaaaaacacaactgcttactatgaggactgagttacacattttacacacgattgcacttaatattctcaatggctttgcaaggcagttcctaaatgcattatttatgtgcctgtacattttgtatttggtatttcgaacagccttggaaggtagatattattgttattccaatgtacaggtaaaaaaacccaaggcttaattaaggtaccttayctaagatttcagcactcccaagtggcatacctagtcttccagactgggcctttcagtctgagctcaccccacacaactctgccttctggagagcttatggagtactgggcctcactgtgagtgcttaatacattaacgcttattgcagcccaccaccacaccatggggtattttggatctggaaattggtgggttcttggtctcactgacttcaagaacgaagctgcgaaccctcgaggtgagtgttacacctcttaaagatggtgtgtccggagtttgttccttcacatgttcagatgtgtctggagtttcttccttttggtgggtttgtggtctcgctgacttaaggagtgaagttgcagaccttcacggtamrtgttacagctcttaaacgcagcgtggctggaattgttcattccttcacgtgggtttgtggtctcgctggcctcaggagtgaaattacagaccttcacagtgagtgctacagctgttacaggtggcgcatccggaatcgttcatcactcccagtgggttcacggtctcggcagcttcaggagtaaagctgcagactttcgcaccatgttatagctcacaaaggtaacayagagctagrgcaagcagcagcaaaactttagcccaaaaagcaagacaacaaactttccaaaaagaacccaaaagggttatcgctgttagcccacgcagcyttttattcccttatctgaccccacccacatcctgctgattggtccacttaacagagagctgattggtccattttgacagggtgctgattggtgcgtttacacaccttgagctagacagagtgctgattggtgygtttacaatcctttagctagacataaaagttttccaagtgccgacccaactcaggaaccctgctgccttcgcctagtggatgccgcctgcggagctgcctgccagtcccaagccacgcacccacscttctcagcccttgggcggtcgatgggcggggccctttggggacgctggggctgcgcggaagcccactggtggcgggggggggcggaggggaggcatggcagctgcaggtcctaagccctgccgcgtggggaggcagctgaggcgcggtgagaattcgagtgtggcgcggacgggccggcagtgctgtggcacccggtgaaccctccgcagccgctggcccaggtgctgagcccctcactgcccggggctggcggcgctggccggagctccgagtgcggagcccacccccacccggawctcacgctgtccagcgagcggcacccagccccggttcccgcccgcgaytctccctccacacctccctgcaagcagagggagctggttccggcctcgggcaacccagaaaggggctcccacagtgcagcggcgggctgaagggctcctgaagcaccgccagagtggacgccgaggccraggaggcgccaagagcgagcgagggctgctagcacgttgtcacctcacttttatcatcctcgttttacagaagaggaaactgaggttcagagaggtgccaaaacttgcccaaggccatccaactagtatgagggagagctagcattcaaacccaggtggcctgggctccttttctacctctcatcaagtgcactgatgcatggaaataatgcacgtagtatctgcctcacagggggctattgtgtctgtgcttgtaagcatcttacrcaacaggcatctacaaaagctacttgccttttcctatggacacggtgcattatttttctagcagttttatctttctaaaataagctttttaaaaaaatcacaagaagctgaaataggacagaaraaaataaagggagatatatagtaatgtcccagatttttctttctttatcatgaagtctttcagatccacaaaagcatctcagatttctttgggtagggagctggaatcctaaaggcatgccagactttccagaacactctcttaccctagatatccattgtgaccgcctccctttctcttcacttttcctctcatctctgccttcaggcacattgttttggcagggaaacttttcamctcccctgttgctttctcccacacattgatgatccattccaactggtgtgtaatggcagaaagaaggtagaactaagaatacaccaatgtctatgcaattgaattcatgctgcttcatgaaagaatagcataaatctattttatgaaactattcccagtataggtttaggtggaaaaaaatcaagctgvattatggtatgatatcatcatatatatatatatatgtgtgagtgtgatgtcatatatatgtatatatacatacatatatgtataatgagtgggtatatactgttcataatagtaacgtagattataatgataatgccacaagcaaaaaaaatttaaaaaaagcaagaatctatagtcttaagctttttaagtttttgcaatcattgttagtaggtaagctttctgcatcttagcagctgtatgcaccaggaacattttttctttttatttgtggctttccttccactgcttatatgccagctagagaatgtggaccttgtattgcaggccttctggaatcactgtgtttccaggaattagaatgtagtggttcaaattaaacattgtgttacacgcagtgcccttgccaaggcatttcctaccgaataacaacatttattttattactttttaggaccgtttttggaaggaagtactgacaaatcagaaaatgatgcacctccaaaaggtgtatgggtcactgcttctcattgccctcagctcctacagaaaaggcygtsgagacgaaggcttttggaaacaagtctaccaaacaccgaggaggtcgcccttccgcagcaccatctcctgggaggagcaggtgtgatgccgggtcttccagctcaggctccctcctccycttctttgatcatatttgtgtttgcctttgcatttctccctcttatttctcctcatctctccctaccccccttacacacatgcaggtgcacacacacatgcacttccccatcttccacgcccaaaataaacagcagtttgatgctctcttgtgaatttatacctcagaggttactgggtgaaaggcctttggagcagaggcctatgcccccatcctactgctgctgtttgctaactgtaggaccttgtagtgaattgcttaacctccctacacctcggtctcttcttctgtgaaatgggactgataatggcatctacctcccaggctgtggtggtgtgtatttagtaacattgtccatggaagaagcaaagtatatatcttcttcttttgagggaaggtctcgctgtgtcacccaggctagagtgcagtggtgcagtcatgctcactacatcctcgacttcctgggcccaagcaaccctcccacttcagcctcctaagtagctggaaatatagacacatgccatcatgtcttgataattaaaaaaaaattttttttgtagagacgcgatttccctatgttgccraggcagctcttgaactcctgggctcaagcaatccttctgacttggcctcccaaagtgctagaattacaggcgtgagccactgtgcctggcccagaacagatattaatgggtacccagaccatgacaatttccttccccaggaggatgccaggacctagacccaggatggagtggtcagagatgtggagctaggacaggtcagggccagcaggtgggctggaaaagggaggagatgatcaggagagagagggtccgcctgtggtaatcccagtatgtgtgtgatgaggaggcagtatctggctttcacagagaagtttttgaagagagacctttgtccagagctggagctacttccagtgtggggccaagctgaagcctaaggtgaccacaggccactgatgacaaggagtttgattagaaatgagggggccgattgtggatcccaacatataagacaagataaccaattaaagaatatttgagtaacagtctactaagtgtcagctttgtatctggtactgttgggagaacagtgcctggcacttagtaggcacttgtattttccttgactgcccaatagaagacatcacgtcctgaagacctactaagggtcagggactgcaatggatagtttacctattatgcctcatttaactattgtcacattcaacccaacagcagttttatccccctcctttyttttttttttgagatggagtctcgctctgtcacctaggctggagtgcagtggcgcaatctcggctcacagtaacctctgcctcctgggttcaagtgattttcctgcctcagcctcctgagtagctgggattacaggcacctgccaccacgctgggctaatttttgtatttttagtaaagatggggtttcactatgttggccaggctggtctccaactcctgacctcgtgatccgcccgycttggcctcccaaagtgctgggattacaggcgtgagccaacgcgcccagcctatccccattttataaacgagtgagctgagattcagagaggctgtggaacttacctcgggactcatagccagtagggagctgagctggtctagttccagcatgtaccctctttccctgaaaccatgctccctcccacctgtggcctgaagagcgtccctgaaggatcagaagatctaagtgggaaacgcagcattcagaaggaaaatgaagactgcgacgtctgggtttcatagtgcaggcgcaggtgtatgctggaccctctgctctgtgggatgggggaagaaagtgctgtgtgccactgccgggcggacggaacagagattcctcctaatttagtgctggacggtgacccaagaggccaagaacctcttgagaccctgctttgcttgtcttattgaaggtragcccttactctgcctaccttcacgacgccgtcctgctctatgctgagaccgtgaagcaggtggtaaaggctggaggcgacttccaggatgggtggcagctggtcagcgctctgaagggttccagtcagaccacagtgcagggtaggtggcttactgctggagggtgttctaaactcagacctgcggctccagtcggtgggggctttgagatcttgggcatgtaattaaaggcctctttcagggcctgcctcacactgaactccagaattcatctttcttatggggattcctgtcttccttctgtaagtgtagttgaggttaagacctcccagctcccacagttcgctcatccttctggccagagcctgcccagaccaggagaggaggctgctgggcaccttatcccctttcccctgggaattctcccccgcagttccattcaaactgagtccatcaagaataaaattcagaaatgtgagacctgtctcccggggtcacttcccatctgcagcctctgtgatgggggccctggcaccacagacttctgaagatgggttgtagtctcattcttgctttcctggtggggatgagtataggttggggagtgaacygctttcaaatcacattcagctgaccaactgctttgatctttcttgttctcgttttctcagttgtaagatagggataacacctgttaccacatgcagaaataataaccagcatttagggagggcttaccttacactaggccaagtgctaagagcttccgagtattacctaattgaatcctcacacagcccatgaggcaggtactatttctatctgtattattcaggtgagtaaactgaggttacagaggttatgtaccttgtctaaggtcacaaagttattagatggtggagccaggattcaaaatcaagtctgccttctccagggctcatgttctttgctatcctgtaacataggagtaatgagaatatgacatgcacctggcacatagtatgtgctcattaaatagtaggttctttttttttttcttttgagatagggtcttgctctgtcacccaggttggtctcatactcttgggctcaagagatcctcccgccttggtgtctcaaagtgctgggatcataggtgtgagccactgtgcctagccaaatggtcactatttttatccttgctttggcttatctttttggcttttggcttataaattattacctaaaatttgtctgaaaatttaaagacagcagccaaggcctgctctttgaagttttcatagaagcaggtcgcgtttaccctattaatgccttttgcaagtggaaatattcaccaacttctctcctttcctttcagaccctaaggcatttgcttaaaaaggggagaggtcacaaggggggatccttctttctgctctcagtttaatcccctctgccagatcaattaattcctctttcctgtggttttagaaattcttcatgctggaatgaggggaggttgtgaagagcagtgaggccctttaagagcctgagtcatcccactttggttctgggacccgtgggcccctttcagggactcatgaccaaagggccctcctcaccccttccaaactggcttctgttcccttatgggctacaggactagccttggcagaactggagtatttgtctctgcttcctgtgttcatttctgccacatggtgrcaaccactccatcggccagtgccgaagggcttttgcaccattccagaaggaaagcctcttctaggaggtcgagttagggagcagaatcccccaaccccactggctttggctcagtgaacgcaatgcacactgaaagaagtggccctggttgtcgcaggagctctggcctttcccctgcaaacctcaggctcaatacccacattcaggatgcccacggatgtgtatgcagaaaggcagtgtggcatgctggaaagaacatggcacttggggcctgataggcctgggtttgtgtaccagctgtgcctcttcgtggccctggcaggaagacccgaggagttcatgcctccaagctttgcttgttgggagcagatgatggtgccccttctgaagggttaattaggattagacatgggaagtcaacaccacctgcagtgcccagcacttattaggtgctttatcagtggtaattttgtgttctgtcccctgtgggacaaaatcagcaataagtcctttgtcagaacctacgtactagtttggggtgtgaaggagctgtgcttccaagatgcgttccttcagtagtggagttaatcacgttctaagaaatagcaaacagcacatcaggccctgtaaagcctctgcaccaagcctctgcaaagggcctgcaaggcctctgcacccagaccaggagggaaggggcyrccatgagaacagagattgcaaacttgtgccccagggcctggcagcatggaggcgtggggtgggtggggtcaggggaggaagatgggaggaactggaggaagcagctgtccctcggccccagacgactgctgacatgttgtcacatctgattgttcgagggaagcataaatctcaggttttaagtgaaattaactggaaacaaacttttttttttatttttaagtgctggatgagcttccccagtgtgggcctgagaaaatacatctgcctgcccagtgtggccctttaamcctaacaggatgctatctctgaactgtcttcttccctttgctggtccccattgaccctgtctcagattcactgaaatgacagaaaccctgtgtctggtttttaatggctgttggggaagggggttctgttgatttgagttggggcaggctggcattttgagccacatgttgctgtccctctcctgaccttgtgcaatctcctgtctttctaggaatcacaggccctgtgtttgtggatgcccagggagaaaggcacatggattactctgtctatgccctgcagaagtctgaaaatgggccccttttactttcttttcttcattatgacagttatcaaagtaatcagatactggccggacatttctgcaagtgtagattgtgctacagaaagagacataggaagaggagggccctgggaaggccagtttgggatccagtccctagaatcccccaagtagcctggtgctcttagaactcatgaagatagactttgggcctttaaggtgattttattcccttgactgaggttatggcttgaccgtttcagatttcagtgtaggacagagtacccacgaactgcacctccaccagggccctgttctcctctcgtgttccaaccagtggtcccattggccatggtctaggggagaggccctgggcccagagcgggtggtggagcacagcgtccccgaagggatgggtttacaggccccgaaatggctcacctagacagcctgactcccagacacatttggacaccagcaaccagaacccaggaatcctggggaaaaaacaaaacaaaactttgtttttgttctttcagctacaaatcaatgagaaaactaaaaggaaacctaagatgtaattcaatttccactcacccccactgccactacttccaatccagattcaacttgaggctttttaaatttttagacagtcttgctctgttgcccaggctggagtacagtggcacaatctgggctcactgcaaccactgcctcccaagttcaagtgattctcttgcctcagcctcctgagtagctggtattacaggtgcatgccactgcacccagctaatttttgtatttttagtagagacggggtttcaccatgttggccaggcttrtcttgaactcctcacctcaggtgatccacccacctcagcctcccaaagtgctgggattacaggtgtaagccaccacacccagscaacttgaggcttttttctccccttctcttatggaattttaatggaccaaaatgggccagaaaacaaagtaaccatggcaaactaggtctttagtattgtcagaacaggcacactccacrtaggaggagatgttttgttctgtgaaatgtcaagctgctatataacaagatttgtctacgtcaaacacagatgaaagtcccagcaacattgacttggcatgtcatcttttaaatcaaaagagacatggtttaagtcaaaagattgaggaagctatttcaacagcaaaaagatactgccttccttgaatgagattacctgaaggctggatttgaagagcctaggagagttgggcaaactggacagaagtttgaattgagagaccaaggcttgagttttgcaaataacatgcatttttccgttgtctctgctgtacatgaggtagagtcaaatagaacaaactgagctgacgctgacctttatttttttttttaaagacccacagggaatttctccaatatgacctggccscatggctcccttcctgaagacagacctggctgtggattttataatgagctctgtgaaactcagtctgcttttacgggtaagtatggctgtttggagaacgtagcagggaaagactttctatagtagggtctctgtatggcaggcagcactattgacattttgggccaggtaatttttgtgtatggggaggctggcatttcaagccatgcatccctgtatattataagatgtttagcggcacccctggcctctacccacagatgcctatagcagccctctagtcggaatgagaaatgtctccagacatggccaaatatcccctaggaggcaacatcacctttttcccctgtggagaatcactgctctaagggaaactggctcctgagatttgagtctcaggaacttcacctctagggaggttgaaagagtctggggaggggagtgtgccccagtggttaggagcccagccctggaattagatggatcatgcctggagaaccaccctaaggagaacacacagtaaatgttttgtaaacactgctggtggagttagaagtcatcattattatttctctgcagtggaactttctatacaaagcgggaggtgaatgcagttccagtgggaactagggtggtagtcagggaagaattcctggaagagacaagtcagcgtagactttgtgtgtcctaccccagaccttccagaggacagcctttgaggaacctgctcggctgggcccagctgggcagggatgtacttgctactgctcttgggcaaggcctgggtaatatgcctctaccctccaggcgtgactgctgtgcttctgacattgatgatcctcattcctgtcttgggagctgscatcataggtctgattttaaggmtgcagaggcaaaacaaagacatctggtggcaaatcaattttgatgatatcaccattcttccccagaacaaggtgaggccatatgtgacccagatgtcccatttcctggtcactgctggagatgtgtggaagggacctcatctaggagcttataagagcaagaggctaatttattcagtgagcacttcatgaagagtctgcaggcctgagttctggttctaggcctcccacttgcttgctgaatctgagaatgtcattttacctccccaagactcagtttctaaatacttacaaatgattgacagtctctaaagttccctttgctctgttactctgtgggtgagaactgtagatggtgttcagatattaaagctgtctcctggggaggatttagttattttattttttgttttgtaatttttttgagatggaatttcgctcttgttgcccaggctggagtgcaatggcacgatctcggctcactccaatctctgcctcccgagttcaagtgattctcctgcctcagcctccccagtagctggtattacaggtgcctgccaccatgcccagctaagtttttctattttttttttagtagagatggggtttcaccatattggtcaggctggtctcgaactcctgacctcaggtgatccactcgcctcagcctcccaaagtgctgggattacaggcatgagccatcgctcctggccggatttagttattttcaaaaccacattaactcctttaatcaattgatgactaatacaataatgttcatttgcttgacagggacttgaccattaactacaggccaagcatcatacaaggtatggggatatcccacaaatgagatgcctccagagggaggcaagtgtcagagaggtgtttccacggtgagatggaagccttgcagatggagggactgaaggtctcagcatctggaaggctttggagaggaggtgacatttgagaagagtgagtttgcaagtgatgaaaaagagtgaagtacacaggatataatgagatgtgggatggtcagggctgggaagcttagctggtaccaagtcagggaggcttcaacatgctaagagcaggtgactgtgattcattagtaactcatctccaaacgtccccggggattcagacacttactcttccatcttccaccaaagcagctctgcttcgatctacctcatttctacattagggttccagataagattctccttgaaaacaagattcctatgctttgaaggtgttttctaggtgttgggaggcactgagagtgttaaacagagacaacttggttagatgttctttaagaaaatggctctaaccccaggccacacatctaattaagtgccacagccagaacttgagtctgggcagtctgacctcagagccttccctcttaacctacacctccatggtggtacagatgccatagaaggcatggatgattggatgatgctgtcctagagtgatgcatgtaacaggtcagaaagatcagggttcaaatcctggctctcttattattaactgtctgaccttggcactcagcttcctcatctrtaaaatgcattcccttttgtacttggccttgctgctgagagtgaccaaattacttcctgttttacagccatcccagagagscacacctgtgtcaaaaggcatcaacagtaactcatctagtgtgatgatttctgtggacctcagctcttttgtcaagagccagcagtgggaagagctcttctatgccgcagtagggctttatcaggtatttctgaggccaggtggctgcccgtagatcttagtgtatctctgttctgttctctgcatcgtttctgccaggcagggcattctgaatagaagaacattctsctagcaaaagccaaggtggtcttgtgactccatactagtgcttcccaaaccttaatgtgcagatggatcacctgggactcttattaaaatgcrgattctgggtcagtaggtctggtgtggcacctgagattctgcattttaaataatctcctggccgggcatggtggctcacgcctgtaatcccagaacttcgggaggccaaggcgggcggatcacgaggtcaggagatcgagaccatcctggctaacacggtgaaaccycgtctctactaaaaatacaaaaaattagctgggcttggtggtgggtgcctgtagtcccagctacttaggaggctgaggcaggagaatggtgtgaacccgggaggcagagcttgcagtgagccgagatcacgccactacactccagtctgggcgacagagcgaggctccatataaaaaaaaaaatcttctaggtgattcccaagctggcttctagattatacttagctttgtccaaaataaccttctgtgatgatggaaatgtcgcggatctgcactgtccaatatggtggccactagcctcctgtgactactgaacattagtgtgcctgggcaactgaattttaaattttatttaattttaattaatttaaatttaaatagccttatgtgactggtggctcccttaaaggacagtggagtcctagagtgtggattatttcatccttgctactttggcatggatgaatcagttgtggggcctggtgcttctgcagtgtagacagtgactgctgctgcagcttagaacgtaatttccacttgtcctttctcaccttccctcccacacccagaccatgatcgctgtctgcatttagcaatccttccaaaattcaagtccccttggggtaagagtatatacaaaattgtatttattctttaaaatgggggtcccagagagtaaagacagaaagctccgagcaagggaagaattgtttattgctctaaattggggttagaaaagactagagccaaattatcccctatgcattgaaacttgattttttaaatgtttgcttacttgagttctcaaactacaaaaacctcctgggatattactaaataccttagggaccaccatccatacaaaactctacgtggtcgtcacccagccacataaagaaggaagtagcaacacatagcatatcgctgtttgattgatcttccaaaaatatgtctcctctcctctctgtgaaacaccatcactggattccccacctctgttgcctgcatgatagtgccaaaactctttaataagagatttaagcctcttgactccctagtccttatctatttttctaatctttttttcccctggcttatattctgtgctcatccaattggtcttgcctattttgccacgtatgtttcaccttctgacaatgccacaccccttccacccaacccatgtggaatcttcttatccttcaaagttcagcttaagcatcaccccttctaagaatccttttcttcatcccacaggcattccttcctctgtggccctcccatcacagtcctgagtcctttgccattgccctcatatgaaacgtgaaagatcttgggttgatatttaccttctcttgtggcttaccttctcttgggtccagattctatgccttcttctatccagctcttaccacattatgatatgtttttgtggtgactgattaagtggctctctaaaagcagactccataggcaatacaaataaaatatgccatttactgaaaatttgatatatgccaggtcttgagttaccagtggtattttaactgatttaatgctcagaaaacgttatgagattggtgtttttwaaaaaaaaaaaaaaaaacttattttaggtttggtgttatttttaatcccattttacagatgagaaaataaaggcttggagaagttaagaacaactcaaggttgttaaggcagtaagtggtagcactgggcttagaatcaggcaactgactccaaacctacgcttatcactgtaactcactatttcctctgaatgataatgggacattattatataataaaaagtgtatagtcttggagtcagactttcaagttctcgctgtactacctacaaatatgcaacttgggcaagttacgtaacctcaacaatcccatctggaaatgggccaatcatacctacctcacaggactgtgatgccagttaaaggagatcttagtgttaagcagctagctcagtgcctggccatgcacagggccaccgaaggggttgatttgggcagtgaggagcttgatgaytggctcctaggtgcatttctttccagcttkttttctcccctccctagccctaagtggagctttttctggttcattctgagttaagaacattccactttttctttgattctagggaaaccatgtggccatccgttacgttggtgaccaagcagaagcctgggttaggaagccgattgtgctacaggaaatacagctggtgaggccccctgcccagggtcagtggagagacaaagcagtgatgctctctgcccctcctctgccagctccctggttccaaaggagcagagatgggaggctgcttcccttaacgtgacccatctctccctcccctcgacagcccaggctttgaatctcagacctctagcctctcccaggcacctgaagcctgggatcattcctacctctgtttttttccccatcattctttctggccttgattctggctcttcatcctctgtgtctgtgatggctgcttgcctacctaccagccttgaacctsgtacttggagggagtcagtttcatgggcctgacttcctgctccttctctgtgatctgttgtgggccccacattggcattgacagccataagcatggaagcagggctgagtccatttactgtgacgtggttgagttaatcaccgtgcgtgaggttagactttgatcgttcctctgatttatttgctgcagacagacttcctgggtttacctcccagckctgccacttgtaggtgttactttaccttacctttcartggcagttcccttatttgtaaaatgggatctgtaacagttcttatctaacaaggtctttataagaattgactgaaaatatgcaaagcacatagcatggtcctggacatagagacacactctatacatgagctattgtaaccatgattatttccagatgggtgaattaaggcacgagagcattgttcccttctttggtatttgcaccgaaccacctaacatctgcattgtcacccagtattgcaaaaaaggaagtcttaagataagcaaaasagtaaaatgctccttaggtttgattagtggyagataataaagaagtttctcagtgccctctgctattcatccaaggtcagttcctctctgttctagttgcaagacctgaactatcttgtcaggctaccttctgggaatcaaattagccaaatgtctgcttcttttgttctgggggaaaactgagcttggtttcttctcttaggatgttatggctactcttgaactgttgttcctggacccatcctattatggtatgtgacgacagctttctgtcaggaacaaggaagtgtttgtaaaactcgagactgcatgcattctcaatattgagtcaggttatggtatctcctgggaagatttccagttattaggtttaatgttttctgccccacattgcgttagttctggccaaaaatataagctatattagagtcaaatctgttcaatygttaaagctcactgtgcttcaggttgagtcactaggaatcttttgaattactgwgtttttcaggatgttttgagaaactcggatcatgaaatggattggatattcaaactctcatttgcatacgacatagtcaatgtaagtataacacaaacttaccaaagaatgaatatgatagtgtttttgagttgctgtgtcttgaaataaactgtaatttttcttgaaaatgttagacctcttcagatstcctcttcagagtgattccagctctaaaatctatcacttctatctgattttttcttttcttcttccctgattacagataaatatatagagaggaaagtattttatgctaaagttggaatggatgctaagtttacccaatcagaaaagagcagagtatttacattgtagggtagaactttctatctcaaagggtatctcatcactaggttgtaaattggactgggggaagtgattcctgatattcttccctgctcttcagcccctgatttctttccctaggaaatggggatgccacattaaccacatagctgctgacctaagagttgggccatagattctgatctgaggaggtagaatctttgctttggcacaggggactatggtggctgcaaagaagggaataatagtaacactaaaatatatagagtgcctactttgggccaggcactttccagtactttgtatatattaatttattgaattctcacaagaatgtaaggtagatctattgttacttttattttacagattaaaaaaacacaaagcacagaaagttcctatgaccttcctgaagtctcatggctatgaaatactagagttaggattcaaacccaggcattttcaagtcctatacccttaaccactgtaccatactgcctctcagtaggaagcactagagcttgcttttgtgttttaccacagggagaagtcagtctcacaactagaagccaattaggggctgggggggcgtgtaattcagagggagttggagagagaccaattcctgcctgttgccaggaaggcagtggaaatactgagaagtggcagctggatccaaagcccaaggtgacactgtcttgaagggccatgccctaggtataagctggtgatgagggatggagagggcaggagagggaggagattcgctgtggggcgagccatgtcagtgtggaccagcatcctgaggctgctgtctcccacctgcgctaaatccagctgttctttcttaagcttgctgcctatacttttaccaccagaagcgacaaagccagtgacctgggagtcagtccggtgaggaaacctctcagtcatgggcagcacgrtgaagggtggtggtccactgctagtcattagtccaaccatcaatcaaccaacagactcctgtggggaagactcatctgggtgttgagagggcaaaaaggatgaaacacaagctgtgccctcctggattaatgggccactgacttattgagtgattttgccaggccacttcccctctctagaccttgacctccacgtaggtagaatgaatgaggctggcccaattgaagtctaasggctttccttcaacaaggattttattgctttttgtttctagggagctgagtcccatatctctgtgagactttgatttcctaggctttagcaggaagccagcagattgttataaagcaaggtcaataggcagaagcgtctctgtgattgggtcttcatgggcaaccctggaccaccactgttattatttcattaaaattttattgagcatctgttaagagtctatcctactctggtcacttttgtaggaagaaaggacttgtttccagctttggatggcttaaaagctagggaaaaaaatagtctggagatgtacatataaaattctttaagtggcagtggttataaactgggaggatgcgacattggcatcttttcctaccctgggatcttctctccttcccttcacccacttattccttctcttcccaccgagcacaaagaagtattctggactctaattatctgcctcctgcccccatcaaaacagccaacatcatttatattggaagtgaagagtaagctagtaagtaagttctcaccaagccatgaatgactaacagatttgacctttttagtgtaggcatcagatttcaagaagcattaacccaaaggtttctctggaaaaacgctatggcaggtgggcatggcactttgaaggggaagagctccctggtggtcatcacctactctagctcastgagtctaccctctactctgtgccaggaaaacagaggacagcttggcattttgctttggaaggatcattacctcctgagatggagtgtgcacattctgggatcatgtagggccactactgatgacacaataggctagatcaaggcacaggtaggccctttgaggttaattactctgccaatgttctttgaaaggggactgcgagtaacagaaaatgtactgtactcttagagccttgccatgggtctgggcattgggccaagctccgtgggggcgattgtagtttggaaacaagtctctctatgtctatttgatcagcacctcctctatatcaggtatcagagagactctgagatgccatagacatttcaaggcaacaaacatatattgatcaagcgcctaatttggatcagacccgattctgggcgtaggaggcacagacgaatgagcctcattgtcctgtccccaaaaagttcaacccagttgggcaagcctgggaaggagtttggagagtataatactcttcttgagttacaaataggccttcatgtctaaataagagaagtcttgatggattaagaggatgaaggacaattcagcaaagaagttgtcgttgaagtttgaaccctgactgccacttactggccaggtgaccttaacaaccctgggcctcagttttcctgtgtgtaaagataacatcagtacctgactcatagggttgtgtgaggactaatgtatgcaaaatgcttagtgccatgccttccctgtaacaggcgtccagtaaatgttgattgttagtagtagcaatagtattatcacgatcatagataattctattactggtgctaaaagaagtacatattcttgttttaatttccccaacactcctatggggcaagtctgcactgtccaaatatgatagccaccagccacatgtggataatgagcactgcaattgtagctagttcaatttgagatgtgctataaagtttgtactgaattttgtagacttagcaaaaaaaaaatataaaatatcttgctaatatatttatgttgattacttgctgaaataagatttttcaatacattgggttaaataaaacattataaaatacatttcacctgtttggtttataacatggctgctaaaaatgtaaaaatacacatgtggcttgtattatgtttttattggacagtgatctcaataattagcaattaactccattattaattcatttttaactccaatagtagtaatattggagtaacatgatctccatttccaagagggaaaaagtgaggcttagtgaggtgaagtcatctgcccagctggtaagacgcagattgggatttgtagccagtctgtctccaaaggctgtgtttgctcttccatgcgatgcttccttcctgctaagtaccagagagtacagatatagggcccagaggtaggagtgctgtctgccacccaggaatttccagtagggcaagaaatgtagctaacagacagatgattgaactgatactggtgggctaggggaggtccccaaatgctggtgggaccttgaccccagccagtgtgcaagctcttaacaccactgtgagaaggaattcaaggataaatcagaaagtagtgaaagtatggagatttactgcaaagtgaagagtacacactcaggaaaggggagygcgggcagacttgagagagagtcacgcaatggaatttggggcttctaccttcatgagtttctttaaccaaggggtagaacattcatgaggattcctggaaaaaggtggagatttctgggaactgtgatgttacccatttttacattaaatatggctgttcctgggactgttgtggcactggtgggtgtgtgacctagtatgttaatgagcttataataaggtcccaggtgaaacttgggtcaaatccagcaccatgttggatccaattggtcttagctggcttggcccacaccctgttcttttcagggtcttrtcagccctgaaaataatggcttatgcagctatttcagttcctttttgctagtcatgtgtaactgcctggaattttctgttctcctgcagccactcctgttattcctgtctcagagctgccaaaagtgcataaaatctggcatgtaaataataaatcctttcatagctctatttgctctctgataatatacataaaaatcatacatttccatcaagatagaaaataaagacatgcatgccatctcttggagaggaatgcacacccagaattccaagcgcccctcagcatgtcattttcaccctaatggaaggagctctgttaaaatcctakaatataaaatcgttgactgtaaaatatctcatacttggggtaggcatggcactagcaaaggcaggaggaaagcagaaaaaaaccttgtgtgtatcagggacattcctgttgaatggagaggtctcctgctggaatcagagaactctggatcagacacaggtctcacctgatttcaagcttggaccttagcctattggagcctccctggggaagtcccagaggcagccccagccaggcccctcccggtccagttgagtgggcggcagtttcaaaatgtgattcaatgttaccatctaaaaacaaataaggcattttgataaaggaacatggggtagggggtggagagtgattggggcaggggtgggggcatgtatccattctcctggatgttttcggtattatctcatatttctttgttgttgttgttatttattttttgagatggagcctcactttcttgcccaggctggagtgcagtgtcgggatctaggctcactgcaacctctgccttctgggttcaagtgattctgattctcatgcctcagcctccagagtacctggaattacaggcacccaccaccacgtccagcaaatttttatatttttagtggagatrgggtttcaccatgttgggcaggctggtcttgaactcctgaccttgagtgatccacctgcctcagcctcccagaatgctgggattataggcatgagccgcccagcccctatcccattttttttttttttttttttgagacagagtctcactctgtcgcccaggctggagtgcaatggcatgatctcagctcactgcaacctccacctcctgggttcaagcgattctcctgcctcagcctcctgagtagctgggattacaggcacgtgccaccatgccaggctaatttttgtatttttagtagagacagggtttcaccatgttggtcaggctagtcttgaactcctgacctcttgatccgcccacctcggcctcccagagtgctgggattacaggcatgagccaccgtgcctggcccttatcccatatttctaatgcaatattggcctcagggctctggctcaggtgggatagttacttggcctgtcagcactgctggaggaagagatgcacccctgtgctggtgaagctgcttgttgtctggggtgaatacccgaggttcatggtatcacgccaaggaaattgagtactcacgacacccaagaaatgggtttaggagcacagttttaataagcaaaagaaagagaaaggagaatagctccctctcttatgagagagagggggcccacagcgaagtgcaccagattttatagactggcttgaggaggcagtgtctgatttacatagggcccaaagattggttggaccaggtgtgacatttacatagccagcgatgaagctggcttccccaccttaatcttctattatgcaaatgaaatctttgcctgcctggcgccatgttgcctactgcttaccgtacgtgtggtttacaaagaaaagggacgatggagcccctatctgaacatgtctagtccctaggtagcccctttcctattagcacaactgcaggcattcacccatgcaagcttctagcctgcctttctatgtctgcagcttgattttacaggctgctctttgttagaaaagaaaatgatttgggggctatcacacgtgtccgtatagaagaccacctaaacaggctttgtgtgagcaacaaggctgtttattcacttggatgcaagtgggctgagtccaaaaagagagtcagtgaagggaggtaggagaggggtagctttatagaactggggtaggcagtggaaagttacagttagaggtggttatctattgttagcaggggagggggtcacaaggtgtatggtggggagatcataagactcattgtccagaagaagaaagtcacagggtcrattgatcagttggggcagggtaggaacaagtcataatggtagaatgtcataaggtgggttaattagttaaggcaggaactggctgtttcacttctttgtggtgttccagctactccagacttcttggctcctgcaggccatctggacatacatgtgcaggtcacatgggttacaatggctgagctttggctcagaggcctgacgggctgctttccatttaaaggaagaccttaccgaggactcccatacactcactaagtgtctaaataattcctttattaactgtttttttttttggttttttttttttgagacagagtctcgctttgtcgcccaggctggagtgcagtggcacaatcttggctcactgcaaactctgcctcccgagttcaagtgattctcctgccttggcctcccaagtagctaggattacaggcgcggacaccatgcctggctaatttttgtatttttagtagagggggtttcaccatattggtcaggctggtcttgaactcctgacgttgtgatccacccacctcggcctcccaaactgctgagattccaggcgtgagtcatcgtgcccagcctctttctaactcttatatcactggtgcccaagaggcccaagaccctgtccttgggttcacttatctgttcaggatgttccccccaccccattcctccctgggacctcctcatagcccctcccacacatgacttcactgccccttctcagttagattgtgtcattgtgtaattacacattggggttgtgtcattgtgcagggggagtatgtgctttgaccctccttcctccctcttccctcctccccctttttatctcccatcacccagggcacaggaaagacgaaaatctagtggtttagaagaagctgggcttctaacccaatcccacctgggtttatatcccagctctggtcctgacttcttgggagcgatttaacactccaaatttactcatcctagcctgatcactaggatgtatttattttaagctggcctggccttcttggcttcacactaaggagctggaaatagttttctccattttgggtgtcccagccccagytgactccagggacaaggggctatgctggtggctcctgaacaaatgaacacagagatgggcgcatcccctgccccaggcccctctgtctgtgtttctgtccatctgtctctctgccttggttccttccagcagtgttatcarcacctggtctgcctcatttgctcattttcacccttgcagggcatgctgttcctccacaggagccccctgggctcccacagcaacctgaaaccttccaactgcctgatggatggtcggctgcaggtgaagctgtcgtgattcgggctgtgggaactcaagcatggctaaaaatacagaacatatgatgagacagtgaccaaccactcaggtaacctttggttgatcttgcacccactagctattggcagcatggtcagaggttcctggctccatctttgcttcctgatgctcatctgtacaggtatccacaggtgggccttcctctggagctgatgatatgtggctgttccgttcaactgaggagaacgagaaaaaraaaaagtatctgcaggtggcatgagttcgtggggtgatgtctgggtttggagactggttctcgtcctagctcagctgagccacctggagcaaccattgcccctctctttagttctctttgttccttcccacattcatcctatgttctcagcttagaacataagatccgccagatattttagagataatcgagttccatagttctctctcttctaggtcctggtccctctacccccaaccaactatcaactgaatcaaaatatctgaagatggggtcttggcatctgaattgttttttaaatgctcccaagtaattctgctgtgcatctgaagacaaaaccattgcctcaagtccacttttcccttccctatgtgccaagtggggttcaatgactcttcctacctgtccagttaattgaatgccttggattcgtacctttgcatgtatcctgggctctcctgagaccagtgttctcagccctgatcccctttttgctggagcagcatgtcaccaggagcttttttgtgtcaatttgggaggtttctatatcatatgataggatgatgtcttacagaaggacaagggggatgggaatggttgcttatgcctgaaatcccagcactttggaggctcaggtaggaggattgcttcagtccaggagtttgagaccagcctgggcaatatagtgagatgctcccgccccaccatctatacttaaaaaagaaaaattagctggtgtggtgacatgaggctgaggtaggaggatcacttgagcctgggaggtcaaggctgcagtgaactgtgattgcgccgctgcactccagcctttagagaccccgtcaaaaaaaaaaaaaaagggatggggagaaattttgtttttattattaattaattaatctttttttttttttttttttgagacagcgtatggctctgtcgcccaggctggagtgcagtggcgcgatctyggctcactgcaagctctgcctcctgggttcaagcaattctcatgcctcagcctcccgatgtagctggggatcacaggcatgcaccaccacgcctgactaatttctgtaattttaatagagacggggttttgtcatgttggccaggccagtcttgaattcccgatctcaagtgatttgctttcctcagcctcccaaagtgctgggattacaggcgtgagccaccgtgcccggccaagacctgctggcagctgtcctagttccccttctgcatcctctaatgtatatcttttgttttaatgactattacctataatgacataagcctatagacttcactgcagaaaaggaggtgtgtaaaatatctagaatagacccataaatctatagagacagaatgcaggttggtggtgattaccaggggttgggggtcaggakaacagggagaaacggcttcatgagtaaggagttgactttggagtgatggaaatgtttccgagctagacagaggtggtggttgcacaacatcgtgaatgtgctaaatgccactgaattgttcatttaaaatggttaatttttttttggskgggggatggaatctggatctgttgctcagggtggagggcagtagtgcaacctcgactcactgcaacctctgcctgctgggttctagtgattcttctgcctcagccccccgagtagctgggattacagatgtgttccaccatgcccggctaatttttgtatttttatttatttttattatttatttatttatttgagacagagtttcgctcttgttgcccaggctagagtgcaatggcacgatcttggctcaccacaacctccgcctcctgggttcaagcgattctcctgcctcaacctccccaggtgctgggattacaggtatgcaccaccacacccagctaattttgtatttttaggagagatggggttcctccatgttggtcaggctgggcttgaactcctgacctcaggtgatccacctgccttggccacccaaagtactgggattatagacgtgagccaccatgcccagcaatttttgtatttttaatagaggagtttcaccatgttggccaggctggtctggaacccctgacctcaatttatcctcccacctcggcctcccaaagtgctgggattacaggcgtgaactacgcctggcctaaaatggttaattttatgttctatgaatcgtaccacaattgtttttaaaaataaaggcaatacagagaaggaacttgaacatgaaaaccagctgtaattttagtcttgagtaaaccaccgttaacatgttagygcacatccttcctgctaattttctctgtattcacacacacggacccctgttagctcttcaaatcagacaacactggggctgatggctcagggctggatrccttcctttctcctgtgccccaaaggatgaagaggtgkcttttcctgttttgcctggcagtaccctcactccatgcggacatcccattcttttgyagagctctactggactgccccagagctgctgcagttcccggagatgccctggtcgggtaccccgcaaggagatgtttacagcttcgccattctgatgagggagctgatctaccattgggaccaygggccttttgatgacctccacgaggcaccrgatggtaaagcgggacagcctgcttgggaggttttggtcgtgtgggccagctttgaaatgctggttttttaaattaattgttttattaatatacaatttattccattattttttattgaaaaattcatgctctttcccagcaagcagtctcagaaaaaaattaaagaaaaataaaaattcatattctttttttaaattagaaaatgaattgcattttggttaccaaaaaaatcaagggaccccaaattatataacttgttttgttacagcagccagagggatcctattagaaaatgaggcagattatgtcacttctctatcagaagcctcccctggcttcccatctgaggagtgaaaactaagtcctcctcrtggcctacaagaccactgaaggcgttgaaaccgtgtaacctctgcggccttctggattagtttcctagggggccataacagtgaccacaagcttggtggcttgaaacaccgatgcttattccctggcagttctagaggccagatgtctaaagtcaaggtgttgtcaaggctctgctccctccagaagctctagggaaggttccattctctgcctcttccagctgctggtggctgccccagcattcctgggtttgtggccacatggcctcaacctctgtctccgtcttcacattacctcctcctctgtgtacttatcctggctgtgccacttatgaggacatttgtcattggatttggggcccacccctataatccaagatgacctcctcatcctgagatcctaaacttaattctgtttgcatatttggtttatatcccctttcccaaataaggaaacatttgtagattctggggattaggatttggacatttccckttaggaaccacgattcagcccactgcaccttcctactgtcatctcttatggctcattcctttcagtcacattggccaccttcatgcgtctccaacatagacaaatccatagagacagaatgcaggttggtggtggttaccaggggttgggggtcgggagaacagggagaaactgcttaatgagcaaggggtttactttggagttgtagaaatgtttctatcactctagacacatttctaccccaaaccctttgtgtatactgttccctctgccgggacacctctcgcctcatattcctatgtacaaatttgccccattctttcttaagggctacaaaatttttcactgtgrgaatatgccataagtggtaccttgatacacattttggaaattgctgcaatgagcagctctatatctttgcacacatggtgaatgttgtttcaggctagatttctagccatgaaattgaggagataaatatattttaactatattcaaaatccatgataaatgctgttcagttgtccacttacaaaggatattttcgggcttttttttttttttttttgctgggttgtctcttaatggctgatgcctggatctcarcctgagattctgatatcattggttcggggtgctgcctcagtgtcagggtttcaaagctcccggggtgattgtaatatgtagcagctcaggctgcttggagagaggataccagtgtgtgtgtgtgtacacacataagtgtgagtttctaagtaaactcagcccactttctctcttgattttttttttcttgctttgcctaccatttctagcctatcctcagtggtctatctcaagcctcagctttagatcattatctgttacctggagactttttgagtcaggagcccactgtgaggatatgcaattgcttttagaccagattccagtttctaatttctggctaaataaagcagaggtgagattaatccaaaaagggtaactcaaaatccaagcgcatctgactttggcatcaagcacacacacaaatatttccagactgagcccaggcaggagcccacccacagtccctcagccccttcaccgcctaggttttgccagttgggatctgtaagggaagatactgtggacaatcaatgtatttccccttcgttgttgagctcacaaaattaactgagagctggctacatgggactatgtatccacaggactgcaaccaggaagaatacagtgtatacctaatttatgggcaaacagttcttcaattaacttctgacactttcctataaacaaagcttgtactgggaactgagtagctattgattctctgggcacgcaggacccatggttctcaaactgtggtgggcatcagaatcactgggaggcagttaaaacacaacattgttgggttccactcttggggtttctgactcagtaggtctggggtgaggcctgagaatgtgcatttccatcaccctcccaggtgatgctgataaagccacagcttgagaagtactggccttggtccttgtggtccttggaccagcagcatcagcatcagctggaaacacgtcagaaatgcacattttcaggccccactcctgacctgcttcattggaaactgtggaggaattggtccagaaatctgtgtgtcagcaagctccccagcgattctgatgcacgttgccaaagcaaatgagcaacagtgctaacatgtctagtagacggttaaagattataggatggaaacagctggttagaagttactaggtaattcacacatgtgctctgaagtgcagtcccatgggtctgaatttgctctcgaagtcctatgtcatttttctgattctttcatgcatttcttagagctaaacacagaaagcagaagatgccatagtaattcagtcactgcttttgaagccattgctgtctcatgtctcaaattgtacttcatttgggaagtaaaacacaattttccagagtactttttttttttttgagatggaatctctctctgtcgctcaggctggagtgtgatggcgtgatctcggctcactgcagcctctacctcccrggttcaagcaattctgccttggcctcctgagcagctgggactacaggcatccaccaccatgccaggctaatttttgtatttttagtagagagagggtttcaccatgttggccaggctggtctcgaactcttgacctcaagtgatccgcccatcttgggctcctaaagtgctgggattacaggcgtgagccactgcgcctcctagagtgctttttaatgcacatactttcagaatacttttaggcattaaacatgtacacttaaacaagatgacattttatgcacagttttgtaacctgtatttttttattatattaaactaacagtcatatattattcagatttcctagttcttacctaatgtcctttttctgtctctgaaccccatccagggtaccacattatatttggttgtcatgtctccttaagcttctctgggaaaatttctcagactttattttcaatgaccttgacacttttgaggagtactggtcagatactttgtagaagttctttcatgtggaatttgtctgatttgtttttcttttctcatggttttgcgtatatgtattttgaaggatgactgaacaagtaaattgtccttttcattgattattgctgttgatgttgaccttgatcacttggctggggaagtgtttgtcaatttctccaccataaagttactctgatttctcccttccatacttagtctagggagagaaatctctatgtgaaacccacacttatgagtgaagagttaggctgggcgcggtggctcacgcctgtaatccccacattgtgggaggccgaggagggcgaatcgcttgagcccaggagtttgagaccaacctgggcacacgggaagatccagtctttacaaaaatacaaaaattacctggacgtggtagcgtcccagctactctggaagctgaggtgtgaggattgcttgagcctgggaggcggagtaaagatcctgccactgcactccagcctgggcaacagagaccctgtctcaaacaaaaaaaaaaaaaaaaaaaaaaggagagggaaaaagaaaaaaaagggtgggaagttaggttccacctctttgaggagggaatacttggaattcttctccgtgggagatttgtctactgtgcccattcatttatttcttcaagtacttaggtcagtatggactcatggatatttatttcatactttgagttataactgaatcactactatttattttgtggcttaaattgttccagttttggccattccgtttcaggtggcttctgtgtctctttgacatgtagccatcgctgtggtgttttgtcttgtttctgtgtatttccttactttctggtaagacaagaaagtctcattttgcatatccctgcgccagtgctagaagcaaccagttctctccaacaagccctggctgcttttgttggagaaaggtattagaaagttagagctgacactagatacgctcattgctaccggagtgttgttgcttatgggccttctcagtggacagagtagggaaatgygtgtgcatactaacccgtatgtatacatatctctataactacacatgcacccatacacatatatctgcatctacattaaactaaacatgagttcccattgacgtctccaaatctaactcatcgccatcacggttcattgcagtcttccccattacttttctgtaaattccaacattgagatactggctcccaccatccaccatccatgtactttgttcgatccctatgtgtgtgttcggtgattttagacttgttaatctgcatccccatgagaaacagttttaccaactagagtacgatgattatgaatagttccttttgcctttagtcttagaaagtttctagtgatttcacaagcgatgtaggtcagcattctttctcactcatcccattcagtaaggttatgccatatatttgtaacactgttagattcttttatcgctgtttgcattctatcttggggttgcctaatttcccaattggtattttttaaagtttgctttccttatggcttacttttgtgctattaagctctatgggttttggtaaatacatagtgtcatctatccaccactatagtatcctacagaaaagtttcctcatcctaaaattatcccctgcacttcacctagtcaacgctctctgctcctcaaactcttggaaaacactgatctgttttctgtctctaaaattttgtcttttctagaatgtatatttccttaatttctgggaagacaagaaagtctcattttgcatatctcctgccccagtgctagatgcagtcaattctccaagaagccatgacttcttttgttggagaaaggtattagaaagtaagcagataacgaggtcaagagatcgagaccatcctggccaacatggtgaaaccccatctccactaaaagtacaaaaattagctgggcgtggtggcgcatgcctgtagttccagctactggggaacctaaggcagaagagtcgcttgaacccaggaggcggaggttgcagtaagcggagatcacaccactgcactccagcctgggcaacagggccagagtctatctcaaaaaaaaaaaaaaaaaaaagaaaaaaaaaagaaaagaaaaaagaaagaaagaaagaaatgatgctagatatgcccactgctgcttgcgtgttgttgcttctggggtgccatgtaaatagaatcatacagtacacagccttttctgactggtttctctaacttagtaataatgcatgtaagacttatccatgttgttgcacacacagtatttttatttttatgccaaaacatgtatacattgttctcaaaatattattttcttgacaacatctggttaagcagaatgtttaataaatgtcagtaggagccagtgaagaagtgggaaaaattaggtttagaaaatcggacagagaggcaggacatgatggtaacatttattacgtgttaaaatagcatttctgcgacatattacagaaaatttaacaaaattgcatgaagcgcgctttgggggtttccaacacgaaatgcctatacattcctgaaatcatatagagatatgcttctcctcaagcaaagttctattttaaaaaatcttgatttgaaaacaaattaattaggaggatgtttgtttatatgtttttcattagrattgttcattttccaggcagattctcagagtattcctattaaaatatccagattactttggaattctaatctgttctatttatttaaaaactcagtttacaaatrtaagagcacaattactattgaaaatgaagtgtagtaagtggcacaaagttctgatgtttggctgtctaaacccaacatgaatttcagaaatcatcaaccaaatcaaagaccctgcagcagcagtcccactgcaaccttccctgcccgaggagaagggcaatgaaaagatcgtggccatggtgagggtgtgttgggatgaatctctggagaaaagacccagtttctcttccatcaagaaaactttacgagaggccagtcccagagggtgagttagatgtgcaacagatatttgctctcactcagttaaccattaggattttagagctgctgggcatggtggctcatgcatgtaatcccagtgatttaggaggctaaggcaggaggatcccttgaggccgggagttcaagaccagcctgggcaacatggtgagtttctgtatctataaaaaataaaataaaataaaaaattagccaggcgtggtggtgtgagcctgtagtttgagtttcttaggggggctgagaattgcttgagccctggaggtcaaggctgcagtgagctatgattgtgccactgcactccagcctgggtgacagaacgagaccctgtttctaaaaaacaaaacaaaacaaaattaaatctatatggccgtgattggttctatgtgactcattcccttcctccctcctcccttcctccattcctcccttcctcccttccttccttcctttcttccttcctcatacactcactcagtgcttaccatacacaaaacactgtactacatgctggttacagtggagtgagaaatttttcctttatttcataaatgccacaaaaatggatcagatattaataattctactgccttctttgtctatctcaggtgtcactaatcaattaaggcccttgtttccagggagttttgacatggcttcagagtctttttcaaatcagcattccaagggttaggctaatcaatttggactggactgtgggataaaaattactcaccacccatagagtaggttatgacttaaattacgcattcctctccaacaactttctcaatagtagcttcctttacaccagataattgtatcatcttttagtacatgaatttaggaagacatgcccatgttagaggtagcttgagttggtagaaagagccccaggctaggaatcaggtgtctactcttaatttggaccttcagctatgcattatttaaaaaaacaaaacaaaacattttttggagtcagggtctggctctgttgcacaggctggagtgcagtggcatgatcttggctcactgcaatttctgcctcccggcttcaagtgattctcatgcttcagcctcctgagcagctaggactgcaggtgtgtgccaccatgcctggctaatttttgtatttttagtagagacagggtttcgctatgctggccaggctggtctcagactcctgacctcaggtgatctgcctgccttgggctcccaaagtgctgggattacaggcaagagccaccgtatctggcctcagctatgcattcttaacacaatagccctgggttctgcatttccaagctcgtaatagtttttaaattttaaaaatcatttttaaatgatttttaaaattaacaaatgaggctgggtgtggtggctcaagcctataatcccagcactttgggacgccgtggcaggtggatcacctgagatcaggagattgagaccaggctgaccaacatggtgaaaccccatctctactaaaaatacaaaaattagctgggcgtgatggcacacacttataaccccagctactcaggaggctgagacaggagaatcgcttgaacctgggtggtggaggttgctgtgagctgagattgcagcactgtactccagcctgggtgacagagcaagacgccatctcaaaaatgtaaaataaaataaaattaaaattaaaattaacaagtgaaacattgtttatatttatggtataccatgtgatgtttcggaatacgtatactgtgtagaatgattaaatcaaggtaattaacctaaagatacmtcttaagtaagcttaagatacatccccatattttttacttagaaaatatggacctcaatgttatgacaaatctattttcctatgtgagtctaggtctcctcatctgaagatgaggaatttaaatgagttctctgaagacgcttcgaaaacaaaggactaatagaatctagaagtgcccttacattagaccgtctgaaaagaaaggaatgacccatcctgaaatctgcattctcaatgtctgttgggaggtggggaatgggccattgaaggccaccatttgttgagtgcctgtggccctggacgtgaccctagacactttatgcatgttatctccctacatcctcagarcaacaacgtgatcgtatgtacatgaggtacgcgtgattatcttcattttccaaatgagtaaagtgaggctcagagaaatgaaggaggcagcttagagggctgatgaaaggcaggctctgtcctgtcaygcggctgcaatgccattgtcacttccccgatgtccgttggcaacccttaactaggacacctgaaaggcaagcaatattttcctggaatgtgtagctggaagctctgttccactgaggccctaagggtcttgggagaaaacatcaatgtctggtttcttttaaagycatgtgagcatactggccagtgtgatgagcaagctggaagtgtatgccaattacctggaggaagtggtgcaagagaggaccagccagctgactgcagagaagaggaaggtggagaagcttctgtccaccaaagtgcccaggtattcggaagcactggggccttgaagctgcggcatcaccatctagcagccccacataggggggattatttccatgattatttttctaagagaatgtcaggttcttctaaaaggggtcaggcatttttttttgtgcagtttggtacacctgtaaagggagatagwggcaaactctcctgaatccatagaaatagaggctgtagtcggtcttttacgtggagggtggtggatgcagcaacaggagagtagccactagatggcgccctcgtttcacgagtccgactaattgctacctcccctgtatttgattgtaggtccaaaacctccacacagtttaatatgtacctgtggcttcacattcaaatattgcttcatttttggttctgtttctatatgttcactctctcaacacttggcagaagtatttgctgttaaaattccygtgcgcttcttgcatgtctagaccaaagaagtgggggsagggatttttaatgagattggttgactgaaatgaaattgatttgtggattggtgaatgattatattcccttccacaactgcagagtctttacaccctaactctataaccaatatacataaagaaaatcctttttgtaaaggcattatgtgaccctctctcctactcccccacaatttatacacgtcaattaaaatatctctttagagagaatgcaactggagaagtggatgttaaaagaattcctctagaaaatgaattttgttaaccaaaagcttagccattgaagcaaaaggaccaatgaggacaactttgcaggagtctgtaggagatgagatgaataagatcccattcaaaaatgatccgtttctctggtttcagcttcactggagaacaactactagccggaaggtccgtggaaccagaacatttcgaatctgtgacaatctttttatctgatattgttggattcacaaagctgtgttctctcagctcccctttgcaagtcgtcaagctcctcaatgacgtgtacagtttattcgatcacatcatcacaacttatgatgtttataaggtgagatgcctcatcctgactgtgcgatcacgtgtgctccttgcaggctgtctccggggcatgatggagaatggaactgattccagacatcagccaggaggaagctccatttcagtctatgtcacttcacggcagaaactcaatattttatttctgtttgttttcttggaaaaggtcttgattagtcacagatgtatgtgcttgtcaaaactcaccagtttcctctgtttccttccattattttatctcacagtaaacactttttaaaaagaggcattgaccttccactggctaattccttcccgtctttcctaaatacatttccttcagaggcagagaggctcctgtttactgtccttcaaaggttgtccttggatcttgtgtgggtctcacctctgttgtcctgatccttagcaattaagagtgaagaaagattcccacttttagactatcagacttgtgactaaaagcggggcagcaacaattccctgccgggtgctactgtgggagatagaaggacacggtcacctggagtgaaaaccatttttgatggggaaaacagaaatgttttggctcttcatgactgccgggtggtggtggtgatgagggctgctttctgtgtgttctgactctttagaaggggtcagcccatgactctagggacagtaccgtgtgcctgtgctcatacatgcctggtgggcagccacaagtgcaccagcactgaccacaatcccagggccctgtctctgcctgtggacctggggatagcgagatttgggggacagtgtggtcatatggtcacatatctcagtgacacagtgacacgtcttcaatgtttatctcccagtgttccccacaaatgatgcctctgttcaagggtgaaagaaaggatggtatagataacctttaagagtagatcacacacacccaacaaaatcagaacctgccctgcttaggaggatatcttctgggattttcctcttagtattaccttctcagttgtgttttgcttgagctcatattaaaacttagtttgtatttctaaaggacgttaccacggtggggagaggaaacccggaagcaggtgaggcttgtcgaatagttgactttgcgtaatttcagggtcaccaggacagaggtgttcttactgtctggctaatgcctgaaattcagcctttaccacatcatctttggattctgctaaaatgcaaatgtatctggaaagggctgtaactttaagcttctacttgtcatttatttctctattgtgaatgacagatctgaaagctgattttattaggaggatggagggggaagaggacagacaggcagatacatacattatatatatataatgtgtatatatatataatattgggtgagatggtctctgcttgacggatccacctcacccttcaaggttgactctaggagcatactgctccctgtctcactggttctgaatttgggctggggaaatatagtcaccgctactattggatttcagaggaggaaacagtgactgtggggagggaggctcagggaaggagggtgaggggggctttgtggaagagccatgacaagggcaggaactgaagaaatgctggaacttgcatggggtggaggtcagggagtgtgacgcgtccaaacatggggcctcaaggttggggacaaatgaggggccttaatctctgaccccaccccmacccttggcctccctcatggaaaacaaaggtcactctgtcactttgttttcaggttgagaccattggagatgcatacatggtggctagtggactccctaccacaatggaagccagcatgtggctgagattgccaccatgtccctgcacttcctcagtkccaccatctgcttccaaattgggcacatgccccaggagaagctccagcttcgkattggcctctacacaggtagacaaaactgatggcctgatggtccagggatggcagcaggtagttccgggttccactcctaggtccagggcttttaggaacctggacattgaacagtaacatctttaggggaaataaaagtttgaattgtctctgcatgtgtatttctatttagctaggttgcttggtaacaacaaggacacacaatggcttcaatgtattcaaccaaaagtaaggactgggcacagtggctcacgcctgtaatcctagcaatttgggaggccgagatgggtggattgcctgagctcaggagtttgagaccaacctgggcaacatggtgaaaccctgtctgtactaaaatacagaaaaccagctgggtgtggtggcaggcacctataatctcagctactcaggaggctgaggcgtgagaattgcttgaacctgaaaggcagaggttgcagtgagctgacatcgtgccactgcctccagcctgggcaacaaagcaaaactctttcaaaaaaaaaaaaaaaaaaggaagagaccaaaacccaggatgggttctacagggctaattttcttccatgccttagcatcaaatgccctttgatatgctctgtgtttgctaactcatgggcatgtgatctgtgcagaagtgatgcatgcttggtttcacgctctttctgtcactgtctggaaattcttaatcatttttgcacagagtgtcctgtgttttcactctgcacttgttccagcaaattttgtagccagttatgctacctatcttccaaggctcaacaaagataaaacccgatcctcagtcagaatgaattgctcccatgtttgtaccactattggcattgttcacagctctagttcgtgagtgacatggtcatttaatgatgatgtcgctttccagcaggtgtttgtgggttctgtcggtttcctttctgtaaaccctaaaacctattgccaatttgccccaagagggtgcatcactacatttgttcatctgatgcgtatcgtcgagtccagcctcgggcaatgcagagcggttatggcctttggttcttcattctttaggtcctgtggtggctggtgtgctggggattaccatgtccagatactgtctatttggagacactgtcaacatggcatccagaatggagagcagcagttcacgtgggtatcactgacaacactttgtaaacacaatattgttatctccctccaggcccctagctttaaccaggggatacttttagaagatgcatttgctttttgcctactgttttccatctggaggttaagatcattatccacttcaggcaacactgatcacatgctttatagacagggttttgcactctgctcttgttagaaccatgcaaatacacgcagcctccttttttctatgactttcagtcctaagcaatcacaggcacatataatcacttaaatgaagagcaggagttggaaagctttttcttttttttgagatggagtctcactgtgtcacccaggctggagtgcagtggtgtgatcttaggtcattgtgacctctgcctcctgggttcaagcgattctcctgcctcagccttctgagtagctgggattacaggcatgcgccaccacgcccggctaatgtgtgtgtgtgtgtgtgtgtgtgtgtgtgtgtgtgtgtgtgtgtgtgtgtttagtagagactgggtttcaccatgttggtcaggctggtcttgaactcctgacctcaagcgatccacccacttcggcctcccaaagtgctgggattagctggcatgaagcactgtgcctggcccggaaaaccttttctatacagggccagacagtaaatatttcaggcttcaggggccatagaatctttgttgcaactacttaagtgctgttgtagctcaaaagcagcaatagacaatatgtcaatcaacaggcatggccatgttccaataaagctttatttgcaaacacaagtagtggactggatttggcccataggtgataatctgcccttctccgaggtagagtatattcttggtggtacagaagaaatctatagccaggacctccagggaatattacattcttttgctttatagtaattttattgcattaccattcccaggcactcgtatgccatttgtcagatgagacatgtaaaaaagaattactcagtgatgtcagtttcaaaaaggcttagatgattaacattgttttatattgtaaattttccacattatataaaaacacattcattgtttaagttaaccgagtctcaaacaagaattttttttttttttgagatggagttttgctcttgttgcccaggctggagtgcaatggcatgctctcggctcactgcaacctccgcctcccgggttcagcctccccagtagctggggttacaggcatctgccaccacgcctggataatttttgtatttttagtagagacggggtttcaccatgttggccaggctagtcccgaactcctgacatcacatgatccacccgccttggcctcccaaagtgctcagattacaggcgtgagctaccatgcccagcattcaaacaagaattttaaacctctctcttatcttgtaagtaaaggtttttaggataaactttgaagctagagctgcttataaaggatctagacctgattctaattgcatttctggttacaaacaacattttcagtaaaatgtcccagctgaggagcccagtgaactgccctccatggggattaccttgtatgctgaatcagttctgccttctgtttccaaactgaatgcactaaggttttgagcaggactcaacaatgattgagcaatgtcagaatggttgagaatcccaacctaagagtcccagacttcagagaagtcgtctgtgatttgcttaatgaaaagtcctggtgatcagagaattcaagcagtgtaggttccctctccaaagcagcccctaccccactgacactccactgataagttgataactaagcagtgactggtttatggcagctctccggattcatgtctctcagagcactgcaagcaccctggtggcattgggagggtacgatttgctaaagagaggcaccattccagtcaaggtaagaccaggccaaccatgccctgcctgccctgtttgggtctctgatagagacatcgaggaacttagcgggatggatgcatctccatggagtgatgcagggagacctctaaggttcccctggaggcactcatgactgccagatcttcttccttcagaggagaagaagttccctcaaatgatcaaacgtggaatcttcaacagagaacaccttaactcccagctaaaccaaccccttagggaatgctttctttttttcttttctctctctcgtttttttttttttggctacaaatggtcccctagcttcctcttgaacaccccagtccagaaaaagaagtagaagggaaggcagtggcatcaactccccagttttgcttagcctggccttagcattctgtattcaatcaactgacttcagtaagaggaagacttttctagaaggcggcatttagccatagcttggaacccattcctgctactgaccagctgtctgagtttgagggcttgtttttgtcatctgcaaaatgggggtggtgataataccgtccttgaagggtggatgtgaggagtaaatgtggacatggatgtgaggcgcttcactgggtgtcccactcatactaagagtgcagtagattttattattatttttaaaagattttctttgcaacaagctttagtctccgtggactgtcaccccctaggacattgctgcctggccatgcaggcttatcagcaaagcccaagaaaatcagtaagattttatctgtaaggaggccttttgcttgtggagggagggagctcccactgtcccagcaagtaagacagacctcagacatctgcccagaggccatgcattacaggcagcccgccagccccaccccaaccctgccagcgattccccagggccttcctttgcctcccacagggcaaaggagagcaaacaactttctggttgaaagataaagaaggcttcactcttccactcccgaatttactgaggaaaaagccaaagtcccagagatattgtgaggtgagtattttctttcaagatgtttgtggagtcacatgaaagtctttggggacccttcttcaagatgcagtcgatatcccatttaagaggtgtggttctggggcattgatccagtctcccactagggggagccgtctagctggccccctcttccacctccaggtgtttgctcccagcctgtgcctccagcaaatgcagatttggaggagctgaagatggtgaactcatttcctggggtgccagggctgacttgtggctctcagccctgtgcaactgccctagctgccagatatttacagcccattaacttgagaatttgtgttgaacccagtttcattctgcaggaggggaaagtggagaggatgaagcctgtctttcttgtgcaagatgcctgctctctaacctttggtgctgattttccttatcagctaatcagcttgcaaggagataggagctcatatctgacagcatcttgagaatgtgttcaggaaaaaaagctctaaggcatgagcagccactgaaatccaacagggccgaggctatttcaagcagtcaggccctctgcagttattggaaagcctggttctgagccctgagttactgtgagccgagcagctcccaaatgcataatgccctcttcctgatgtattgcctaatttctctcctattcaccgagcaaaaactcctgcagtcaaggcttgaatgttaagtagaatttctcagtcatttatgaagagtttaatttaaaaaaggttccagtagacaaagacgaacccatccattcctgctacgatggttttctcttctacataatgaataggattccatgttgttttattgagtggatgttttaatagatttactgaaccactaatgcatttatagtacttctttcttcatctcttgcaactcctcacatccagatatctttcatgtggttgctcctgaatctggcagagcaatttgaatgaaatattgtgtttgagaccttttcctgttgaacttcccatgacagaaggagcgaaaatcaatgagaccagaaatagtttctttcttgctgggtctctgagctgcctttgctgagatacttttgagacctgtatgggaaataaactactttttggcttattgaaggcttttaacaccaaattatataaaagatttggtggaattcttgcctttctttaggaagagggacacaaaagcactttcacttcccaaataatccagtcttcattgggatcctaagcatttccattaccagtattttgcttctgcccagagagggaagactgaattctacatccatcacacactctgttttctatatgaaaattctgttttcattgtggtaggcttcgctcctccccagaggccttaagcattggggactgaaggctttagactgatacttaaaaggagagaaggcagaaggcatttatgtgaagaggagaggagggctttctcctgctactttagcatggagacagtaagccaaatttatcttctcattccccataactccttttcttgagataatggctctggatcccaaacaccttgctcaaccatgaaaggaaacaaggccacctctgctatgagtcctcctagagagctaggatagtccccatccatccatccatccatccatctatccatccatccatccatccatctatccatccatccatccatccatccacccacccgtccacctattcatgtgaacatttctttaatccaaggagcatttgttaagcacttactctgtgccattctggggtacacaagagaatatgaactttcccttgatctttggcttgcagtctagttagggagaagaaagcataatttcattgcataaagcaatattaaggactaatagagctatatacaaaagcgtagcagtaactaagcagtccatcactgtgacattaaaagaacattagaaaataatacacagatgaaggaatggggccaggtagggcaattgcctattattatcctgtctttgtattgtgtgtgtgtgtctgtttttcttccagccctagcccatgtgcttatgtaagttatgttcatgtaatatagatttagttctgcctttcttattgaacatcataagcatttggcatctagacacacatacacacaaaaacacacgtgtgcatatgcagacatccacgtgtgcacacatgcacatatatatgtatgcacaccctcatatatatacacacacacgtgcatacatacacacacatatgcacatggagaaagagagagcgagactgtctttatggatcacaactaagaattttgataagaacacttttctaaatctatattcagtatttgttctatgtcagctaaggatacctgggggagaattagttttcttctttttcttaatgtttctaattgtgtttagaactactgagaatttacaagagattgttttgagagtaccttgtcttattttctcaaagaagaagttatgagacaagaagggtaatcaaacatcatgaggttgttagttaatgtcaagtcaaaacacatccagtcactggtgagagacattcgggctctataggcagggatgacccaaaagaccttttccccaaaatgttaatcatacagattggctttacctccttgcatcagaaacccaatactgggagttttttaaatgtaaaggtaggatagaataattagaagtctgtggcaagccgggtgcagtggctcatgcctgtaattccagcactttgggaggctgaggcaggtagatcacgagatcaggagattgagaccatcctggctaacatggtgaaaccccatctctactaaaaatacaaaaaattagctgggtgtggtggcgggcacctgtagtcccagctacttgggaggctgagacaggagaatggtgtgaacctgggaggcagagcttgcagtgagctgagatcacgccactgcactccagcctgggtggtgacagagcgagactccatctcaaaaaaaaaaaaaaaaaaaaaaagtctgtggcatatatgcgagtctacgaagctctagttgtagaaacccctgggagaattggggaattagctgtcaacatgatatattaacactgtaaactgtagtcataggttatttattttaaggcattttatttattccatagcgccaggtagagatacaagatcataaaacacaatgatgaaatacagcaaaactaatacaacattggtttattctgacagcaaaggatttgaacatggctatgagtatgctatttaagagttttctactagaaccaataaaatatgtcttctgtttttcctgactataaaaactctgaatttacagaaagaagagatcctaaactcgttggaactccagcttagagaccaagtctagaccaaattgagtcattttactttagcctattactaaacaaacatacacttcatgtatccggagatttcataactagtttaatctctgagttcactaacacaagttgtaaaagaatcatcaaactgcaaattgcaaaacttctcaaataccttaaatacagagagacaaacccatgtgttgttttcaaattataagcctactaattaagtctttacataactaaggacttagaactctgccttttcctatcacaatccagccaattctctaccagaattggttcattcagtttgtattttgttgacaatgtaaatcatttatatgggcatattctggatcactggggtggccagttaccaagatgtgctactgcatgctttcattggctgcatttgcatttgtgtttctgattttgtgttagcttcattctaatgattgtaagtgaatgagacaaaaacagatgtaagcttcgatgtttaagtaaaagctaaatgagatcagaccatttcttataaatgaaaacttcttagtagagcaaatagagaaaaaatagcattgagtgtcacaaggcatttatctgtaggattgggtcaccaaactcacagcacttgtgtcattggagtcactttatagtcatgtttccagcagcagtttcactggggcaatgccgtgttattaggttaaattaatgtgagttgtattcttcttgtgattattctttttgtaaatattcctatttaatttgtaattttcttttgactttagaagtatacatctgctataaaaacaaggagtttctacctatatcatgtttatatatttaacaaatggtataataaaaacaaattaggtcagtactaggggctttcaagaatctatttcctttatatcattaggtttgagcaaaactattgtattccactctgaatcccacatcatctcccatgtcatcagttgaaagattggaactccctgcgtgggggctcagctctggtccttaagtagaatgacactgcctcaatgacaaagctcctttttggcaaagtcagctattaatgtgcgttgtgcatttagtgttgactttgtagttgcaccctacattctcttcaaaatgctcagcagtacttggttgggtctgctaaccttttaaagttaaaatagctttcaaaggaatttactgcagccctgacttgagtatggagaaaggaggctcctcccccagctgtagaaggactgtgagatctaagggccacgggaagtagcctaagtttttcttagaaagaaaaaggcatcaccaaattcacagaaattattggagtgcatatttggcaaagtgctattctctgccccccaacaatgtggtcttctgtttgttctttttggcagcacaataaatgtgtttgtcattcgctgaggactattgtgggtggaggagcggcagctgcctggctaactcctataacacggcacaaatccccaacatcatgatgaggtggtggagaacatctgtggaccagaaggggagggagatggcactcagagacagttctacaagggtaaagccaactcaacagaagagttaactcaggggtcttcataaaattccacacattttagacaaagtcgattttgttcatcccttggggattctgtagctcacatttatcagtacaaagaacctgacagataaacctaggttgtggacctctgacaaatagaaatcagtgatggtgcatggtactctagggctttcagtgtagaacttaaaaacgatgagaatctaggattggaattttaaaagttgatttacatgattctcctgtaatgatgagagcaaaatctgtctgtgagattattaataagtgaactgtcttaccccatctcctcatgtagttgcttccttcttatcattcaggtgagatcttgggtcttagctgaaatgtttcttcctctaaggggcttccctggctgctctctaaatcacgtcccccattgaaccccaaatactctacacatattggcaagggaaggggccttgtctgtcttgttcacggcagtagccacaagaccagttcccagtacagtcatcataatcatggctgaccctgactgggtgtttgctgtttgctgggcattgttcagtgcccttagctgtaattaaatatctataccacagccatgtagataggggcaattattagcccaatttcacagaggaaactagggtatggaggaggggtgaggtcattgcccaaggtcactcagttaataaaagacagagccataacaagaattcaaatatttgttgaatgaacagatcactgaaaatcttgttctgtaaatgttggaatccaagggaagccatctggggatggctttactaagacttggggaagtgaggtccagttctgcttcatccgatttaccttcggttcctccctctcttcagagttcaggggctggtcagagggagacctcttgatctcgccccctctgcgccactcaggtgtgctttaaagtataattttcaatccttaaaagttttgctggggccaaagttaagcttctcttaaaacactctctgccttttaacagcatagccccacgaaatcccagaagtgtctcttttccttaccty

SEQ ID NO: 94068 - DNA, 25708 bp, Homo sapiens
ttagtttttttgttttgttttgttttccagatgagagaatcattgctcacagaagtgaagtaacttttccaaggtcatacaatcagtaagtggcaggcaaggactgaaatccaagttgttaccctccaaagtccctgctctgagaactggaggaattctttatcaaatctaaaatcctcttttaggcctgtctgctttaatattccggtctttattgatccttctcttctctaaaacttcagctgtcagtataaaaatcaaggaatttagcacttgttattgtgtgaacagcttcttgtctctcctgtactgtaagtgggtctagggatttttattctttaaatatccccctgtactcagtagatctttgggagaacaagctcataggcttctaataattctttctttgactgccagctgaattagacagaaggtaagtcctgctgccgtgtcgtgcctaaccccatctttatttcctgtgctgttagagaacagtcttttcttggctggaacaaatactacagcctgctcaactagctaatatgtattgagttcttaatatgttccaaggactgctctaagtattttatatatattaactcactgaatcttaaataccctatgagctaagtcctatttttatccccattttacaaaagaggaaactgaatgtaccagtgcatcagtatttgactgagtaaatgaatgactgctttgctgatggatagtattattagcaacaaccctacaaatatgatgttatgtttgcatcatgcagtacagctttatgtaccttatgtcattgtcactcatgattagcaaataggcacgaacatccctattttatagaagaggaaaccatggctctaagagggtgagtgattctcaacagtcacatgccatctgtatccttcagtaaacaaggtatttggtccattccaggatcgggggcaagagagatgggagggcctcggtgagaaacactcatattcacaaaaggtactagatagatagacagataaataaataaatagagataaaagctagtaatagcagagatttgatgggaattcagatctttgattcctagtccagtgctctttcttttatgtaaggtgatgggaagcaagtcttaggtccagatctggcagctgctttgatttaggatcttaagccagaagcagcagcgccctaaacaaaaagcatcattttaacttctctgcatttctcacattctcaacaatgaccatgccctactttcataattaaaaacaaacaaataaacagagggggcaaaatgcatccttctgagtgggctggggcttgtagagggattcttgggtttgctctgggatgtctttgggcccctgcacttgtgggcactctgatttatccccacaggccacctggcccaccttatgggctgaggagggcttgatgggcggagggaagcagagctgaggagctggggaggagctggaaaggactgctagaaggttccactgaagctacaatgagtagaaccggacatgagagtttccaggattctgtagacctgtgaactccctgaattgtaagctgcatggtgtgtgtgcagtttccaaggagagggcccataacttttgcaaaagggtaccccatgaccttccaaaaggtaaccccagattataacaacaatgacccaagacatgagggttaggacgactggtcaaacaagggccaagaaccctgaaacacttcttgcccctctgaaaataactgttgaggggcaagattaatgaataggacaaggtcctgcctcatggactcacaatattaatttagattttgcttttttccctgagccaattctcacactcattccaaagtatttgggacacaggcaagagattagttgctccattaagcccttccagtctcagacactctcctcttcctcctagacctgtggccgatggactccaggtcctgaatctatggactgtgcacctccagttttctgtttcgccttttacccagtgtctagggccctgatttgtgctgttaccaactttctccccaggtgcctcctaaaaagctggccactctcatgtctcagcaagcactgaattccattccaccaacactgattcagccctcaccatgtgagggtgttgtgaaggagacacagatggtcggataaggcccctaagtctagcctgggagactgcaggttaatggcaggacagataacactcacggaccaggctagtggggaagggaagtgagaacccctaggagggtgacggctaacaggctgggggattaagtggtggcatcctgaatgtgcgacagtagctccagagctgtatgaaggtggagaaggattgctttacaaagaatgggggcggtgtgcggaggggtgatgagaaggaaggtgagaaacgttagaggtgggttgtggccaattggccagaccgaggaccttagtgttcactaaggaatttggattttatcaagacagtgcgtaggtggcattgaaaatttttgagcagaggaggtgggctctgtgcttagacgtaagcttaagaccacactgcagaggatgagagagcaaggagggggctttgagactgggatacaggatgctaatgtagggtccagtggggatgggggataatggggccctttaactacagcgataggcaggaccacctacagagtttgtggggtccagtgggaaaggaaaatgcagggtctcttgcacaaaattatataacaatttagtaacaacagagcattaaaacaagtgggggtcccttctaagtacggggccccgtttggctgcacaggtcacatacctgcaaagctggccttggccatgggacaagacaggatgagtcagatgagagctctgggaagcagggtcccaggacttagtaatctgttggatatgggatgtgaggaagcaatccagctgacagatgaccctcctacaccgggtgccatgccacccttctgctttctgggcaccttccttggtgtgaccaactctagcttattaatatgaataaacttcacccactcctccttttcctgctaccctcaccccagacctgctcctgtagagtccctatctaaaggttaaaaactatggtgttggccaggggtagtggctcatgggtcatacctgtaatcccagcactttgggaggccaaggtgggcggagcacaaggtcaggagttcgagaccagcctgatcaacatggtgaaaccccgtctctactaaaaatacaaaaattagctgggcgtagtggtgtgtgcctgcaatcccagctactcaggaggttgaggcagaagaattgcttgaacctgggagccgagatcacgccactgcactcccgcctgggcgacagagcgagactctgtcctaaaaaaagaaaaagaaaagaaaaatgctaaccgggtgtggtggctcaatcccagcactttaggaggctgaggtgggaggattacttgaggccaggagtttgagaccaccctggccgacatagtgagaacccagcttttttttttttttgagaccgagtttcgcttttgttgcccaggctggagtgcaatggcgcgatctcggctcactgcaacctccgcctcccaggttcaagcgattctcctgcctcagcctcccaagtagctgagattataggcatgcgccaccatgctcggctaatttttttgtattgttagtagagacggggtttctccatgttggtcaggctggtctcgaactcccgacctcaggtgatccgcctgcctccgcctcccaaagtgctaggattacaggcgtgagccaccgcgcccggcccgagaacctatctaaaaaaaaaaaatccggaaacaaaaaaatctttggtgtccctctccagttctctctccccatctcacccctcccagcatctcacttcctcaatgtgctcccattcctatggcctccccatagctgctgtcactgccaagttctggcaagtccatatcagctcatgtctagattacccatgaaatcctcccatccatcccccagactccggaccccaccaccactctcaaataaagcaccgatcccgcacagagccgcctcagcgatgttcccaaatgctatccggatcttgtcactgagtaagatccctcgttggggactgcccggccaaagactaagacccaaatgactcaaaacagcacaaggccctctgttgcctgaccctgcttaatctgctaataaataccagaagggccttagtctcccacatacctccagtacgcaccatgctgggggggttgcgttttttgttttctttaccccaagcagtttcctctgcctggaatctcccctcctgcttcgcagcctggcttacaattcattcctcggagttggcctcagctctcctctcctcgggaggccttctccagcccacgccccaccctgccacacccctactgggcgctcttccccacggactacaggccttccccttccctctgggctgggggcagctggggctgagtataagtcttactcacgttggtgccgccagccccaaaacaaagcctggcccacgtgggtgctccgcgtatgtgtgtggctctaggcggagatgccgggggtggaaagagccggtaacagaaacagaacgtgctagaggaagagcagcctgcagggaaggctggcacagataaccacaaaaagaaagaaggcccccgcatcacgtcttcaccaagaccccactggcaaggcgaggacagcgcctttgggtggatgcatctgtgacccagaggcaatgctggctgtcctggtgtctgatttgattgcatctgatttcaaaatttgatctctgcttccttctgaaaacctcattcccttatgtcagttgtcaacaagcccttgtctagtgcgggcagactgttttccatcaagcagtcccagccaggctaacaataaaatggttggcagtgagcttgggggcagaaacctgtttccatccatgtgtccccgcagctagcaaagccctggcacacggctgaccctcaataaatgcttgctgaatgggtgaattgtgtctgcttccccaggaataggggtgggaggcctgaagcccctggggaccggtgggggcagacagcctgagattaaacttgatccatagataatcccccaaatccagaagccacctggacaacagttggctgaactgagctccatcgtgggatacatgctgatggtactgctgagttcaccaagggtctccccgggaccagaaaacagctcctcaaaatacaacttattattctaatcattattggagagtgacagagaaaagagcgtcaatcctttgagggcagaatccatttaggaagattaaatggctattctcaccgccgaccccaacccccgtttttacttttacaaactttattatgaaaaatatcaaacatacagaaaagtggagaaaacagtataacgaatccggccacccatcacccagcctcagcgatgaccaacccgcgcctgacctctccagtcatctataccccacccctcgaggcaaatctccgacgtcctctccttacacgcgcagacctcggtagcgacgggaatccgttccggactcctctggggccctggccggctccctcggccctgctcagcgcggcgcgggcgggttctcagcccacgtccgtgaagctgaaggccggatcgtgcggcgccgccccgccccccacggcgcttcctcctcggtccgcaccgcgagggtcaccgcggccccggagcgcctgggacactcgaccggcagccgcgggtgatgcgcgagtgagtccctcagcgaagcgcggaagagagaacgaagaggcgccttccacttcctctcgctctaacgccggcacccgccccgcgcgtccctcgcccccgctgccccgccccctgcagggcgtggccacggcccgaggggcggggaaacacccatatttggccttatatgggcagccgcgtcacggacggcactcattcacataaaacgctgcgcggccggcggaatccccggcttctagggcggcgagcggccgggctggctatcgagcgagcggggcgggaacgcggagttgcgccgccgctcgggcgccgggctccgtcgcggccgcagccccgcgggtcgccctcccgtgcctcgcccgcggacaccctggccgtggacaccctggccgtgggcacccgcggggcgcgcggcgcggggccgctggccggcggcggcggcggcatgaaggtcacgtcgctcgacgggcgccagctgcgcaagatgctccgcaaggaggcggcggcgcgctgcgtggtgctcgactgccggccctatctggccttcgctgcctcgaacgtgcgcggctcgctcaacgtcaacctcaactcggtggtgctgcggcgggcccggggcggcgcggtgtcggcgcgctacgtgctgcccgacgaggcggcgcgcgcgcggctcctgcaggagggcggcggcggcgtcgcggccgtggtggtgctggaccagggcagccgccactggcagaagctgcgagaggagagcgccgcgcgtgtcgtcctcacctcgctactcgcttgcctacccgccggcccgcgggtctacttcctcaaaggtgagcgctcggggtccctgccacgctcgcccctccggcgcccccgggtcccctccctgcgccggggcgccctcctacaccctgggaccgggagagtcaccacctgcaggagtctgcaccctgtggcttgttgtgcgcttgggagggcactgcaaatgtcagcactcagagctccccctcttccccacccgcgttcctcgaaagcgcccggcagcgggtctgcccggtggtctgggtggagttggttatgctgcgggggctgctgctgtttagcagtttgggggccgtcggctcgtgccgggcacgagccccctttccagacgcgagcttcgccgctgtcgctggggtcagggctcggggccttcctgatagactgatctggcgggatcagcaggtcgcgatccactctcccttggtgtggcgccgtggtgccccccttcctcccgcctagccagctgtggtcttcaccgacccccttgcctttttgacctggcgagtcccttccctttccatttcattttattgctttttattgtttccctccggcctcttctcccctcctaggtcttttctctagctcagtttggagctcacatcctttccacccttttcacctcctccttcctccgccccaggattatccctgggacccatcctgagctgagcctacagccagccagccacgaaatagaggtgcgcgggggcagggtggtatggagattctgcggcctttgatttgacacctcccggagctaccgccacaggcctgcccatttcacctgccgggaagataactttggcttctggtggtgggtgggtgattgactctcaaaatccaaagcattggttttttctgggttacttcctatgactgctcctgctttgtgtttgagtcctttgtaacctcaaatgacacccggggagacctgacccacatgtagagatgagggtttagccccagcagggccccaaggccgtgccagccctggcgcggacaccttgggatgtaacagtgttggggatcagagctcggtgcagagagccggcgccgagttaggagcctgttttaaagccatgcaacttgagtttcacacagtccgggccaggaagattctggagacagttcccctctctgctagcacctcctgctgactggtcccctgttgatttcctgttggagagttaacagaggtagatggtaatcgtccttcttctaacagcctatcccccaggggatagagggttggccctctggctctgcagaggtttcagcgtgcctcctgatttctttctcttcctaatatggtttttatctcctgtggtttggagaagtttctgcctcagtagtatgaaagaggttccaggagaccctccctggtcccacctctcctccccatgcttctctaagctggccctgctgacagtttagaagttgtcgccacaaagtaggcagctctatagactcacatctcaggaaaactgggttaaaatgttttttaaaagaaggtaacatatacacaggtaaaaatttgaacagcatgaaggccctgtgatgagaagcgggtcttctgcatatcttagaacccagttccactccccagagacagtcgtcaactattttttgtttacctttagatagtttttcataagtatcttagaaatagattgattttgtatagtccctgtcctgcctcttgtatctatctagatcttggagacttgtccatatctgatcatacatgtctgtttcacattgaaccggtctcctgtaatgaccattaggttgcgtcccgcctcactgctccaagcaatgcggtagatgtccttctccatgtgctcttgcgtgtgcagtgcctttcagtaaatcatgagaattgccaggtcaagaattacatgcattttaagtttcagtagaaattgcttcatgcctacccttataacactactaaactttaaattgttgccagagaaaatttttatttctttacgtaattcatgtgcagataggagttcaggttttaatctggtggcatctcagatcttggygggggcaatgccttttgacactttccataatcccctgtctcccaaacaaccactaaaatgaaatggtgatgactgaattgcgtggtcagtgcttatttatatatagtatctgtgctctctctgttccctggtgatgtggtggtgattgaaagcagactcactccaaaagaagtagctctaagaattgccatggcttttgccactcgagtgaggcaccagcgaggaatgttctgtctctccacacctctgatgggagtgggtgaaagactgagaccatttaatctggaggattcctctgaatcccagcttgaagaggcaggaccctgtttatctgtccctcaactaaattttgtcaacagcatgcaggatccagcccacacccgaacctcttatctgtcctcctgatagccaactctgaagtaatatatttaaagccaaaagatggggtagcctgaagattcctatttccccaaccttcgtcctgaagtttgggagggcccaggtcattctgaactccaaattcccatccaaatccttgtttgtctcctggaacccataatgtcgaggtccaggcacgggaagtgatcaggtggtttactgactagggatgcctcttccaaggaagctgtgggtcattgtgagcctgcctcattctctcttgactgctggaagggaaggggcccaggggctatggcagagcatgggaagctaagctgcctatagcaccatcttgcacctctgccgtggcctcccgttgtcgtggggagcatggtcattgaggaggaccaggagctcatgggcaggcgcaatgggctgcttgtgaggtgaccacaggggagatctgggtgtactaagtgggggcggggcagttccagtgagctgagaggaagcggtaatggcaagatgactcattctaggaattggctgcagcttctgggagggagttggagactgccttgtaatccattaaccatttgtctactgcagggctttaaaaaagccagcatcacaacacccaaagtcagaaaagaaaaagggggttctttggaaaattcatggtctcagaatgcatgtttaatggatttgactccaagtgaattctctgggccagaaaaagacaagtgggctttctggaggccctaggaaatgtctcaggttgctctctgggttaccagcaaaggagtttcccaagcaaggctggcctgttgcacctggcagcccttggcattctgagggttccaaggccaccttttcattcggttcttccccactgaaatgggcccaagaaggcttacttatatttgcaagtttccgtgacttgctcagagggtcgtttttaccttatatccatttggagaggtgtaaatgtaatattaaggattctgagagtcacacatgccgtaagttgacttattgattggggggggggtgcaggaggagtaggagagaagtaagaaaagtggggataagaagatagggtggtcatgaaggggacagagacagtttttgctcatgagggctgagaattaaattcagaagtctttattctttcagttgatttagaaggtaattaactggattgatgactccaaattggacctagaaaggattgtcagcagtgttcttagcaccttgggagtgagaagcagtgaggctgttttactgccctgagtcgaaatgaaacctcgtatcagcccccatttccttataaatggaggaggttccagctagaatcctgcttagagcagatgggctggggaagaagccacttcaggagcctgtcttctcgccaattaatgaaattttgggtaatcacaycttccttttagataaacaagagagaaaatagcctttgttttctggagggatttggttagtatttgccagatgctagacactttctttcacagtttaatctgcttctgatagacacaaaaagttaatcattgcctctgaaagagttctttttagaggtttgtatgtgtgtacagcccctttctattctaaatctgtttgctggttttgctcaatttttaatgaccagaatctgtactggcttattttttttcttaactgtgtaacactcagagtattgattaactatgggtatttttgacagcgtgagaaattgatgcttaccatctgtctcacctttttgtttgtttttgtagggggatatgagactttctactcggaatatcctgagtgttgcgtggatgtaaaacccatttcacaagagaagattgagagtgasagagccctcatcagccagtgtggaaaaccagtggtaaatgtcagctacaggccagcttatgaccaggtaygtgatgtgatggggaagaggtatcctgagtggtattctgggctcctgtctcccttccttcctcagcacctgactgttctctccccactcagcaatgatggttagttcttttgtggatcagggtgttggcaaaatcccctggctttagggagcttctgttgcttgccagcttgagcttccatccaagagtaaatgggcttccttccagcaaaygagctgacaagagcaaaccagccacaggatgcttggcagcttctggggaaaaggggaagtgaaagatacattattgtcatctggcttcggaggttcagagaagctttgaaatactggtctaggtttccctgaagacatttcagagttgactttcaggcttcctgtgttgcttttctttgtaattgtycatgctctgcagtttctgcaaaccatcccggtacctgtcaaggtgtgtcttattggtatgtttaactgaaactggtgttggtgggggtgctacagagaaagtcctgtttgggtggctaagtaggctcctctaaggggttcttatgcttacaattccacagataactgaaaccagaggaaatcaaaagatactagagggcttcatgtttctgtaaactagtgagtttttgtttttcttctaaaaatgagtgctttgtgataactcattaaagggaaaaataaagtggaagggggttacgtagcaccatccaggaagatgaaaaagcaggtgagaatccaaatctggcagaagccagagatcaaaacctaaccattttacggaagggaaaagaagtgttctgtgacaagtgagatgattgattttgcagagtcctacagctggttcaaggcagcatcaggctcagaacccctttctctcagctcyctgttgtgattatttcaggaccttgttctgttttccacatggcctctaatctagacacctgacctggtgggagtaacctttcaaacttttcacataaaccaagaacatacccaaatcataagaagaaagattgctagatgctaaaatgccagctccctgccatgaacaaaaccctgtccctggggataaacttcaaagtaaagccagatgaccttttcttgaacgggctccttggtcaggaatcctattagcttgtccagatgccagggttaggattttgtttgttttcctttaataaacatccttacagtatatgacgagcctgtggctttcaagctgtggacatctggcctagctagatttctacttttgtttgtttgtttgggttgtgttttccccccatttctcagaaagtgaaagagaaataagaattggcagaatgttgcgaaagcacggcacatctttggccaagtgaggggtgagaaagccctgatgtgtcttcaagattcatctggggaaccccctaatgctacttcttagaaatgcttctgcatttagagcagccagatgaggttgtgttaacttttggggtttctgaaggcctttggcttcttcctcttggtctaaacagaagttcaaaaagggaaagaaatgtagtttcaggggtgtgttgggctgagctccaaaagaaactggataggatcccaggtctggtgtatcagcaatttccaggcactcaggagaggaagagatcttgagtcaaccatccagcctgctccttaaagggcgagcctgttagtgtccattggtggggacccataagtcatcagtggccacgtgaatctggacttggaactctgactcctttccaaagaactttgtaccacctctgctgttttcctggtttctagctggtggggatgctgtgcccagggagtgggtccaactcaggtcaggactagacctgcttggattgcctaaaaacctgtgtcttccccatggagagaagccatgttctgttcattcttcaatctctatgacagtggcagctatgtgacgtgccaggttttaatgcattcattatcccatttacaccttaccaattatccagagaggataggtattatccccagtttagagacaaagggtcatagattaaagaagctatccaagatcacatcaggtagtaagcatggagctctggaacttaaccaagagctccgctgtctgacgcccaagcccaggttgttaaccactgcaccactttgccaccaggaaggctgctctgtacgcatggaagtttgggaggtttcgaggaggtgatgcagatggacattttatctctagaggaagagaggaaagagggaattttttccttcctgtctttacctgaaatacttactttctcatattgatcactattgaaatggagtcagacaaggccttgcatstcatgctacgcaatcagttttgggtttcagcccagctctaccactgactagctctgacttggacaagttattaaatgcatctgagcctcaagttgcccatccgtaaaatgggaataatgttayctacctcacagattttgtgaaattggtatgatgtaggcacatctaaakggttaagcccccagaggccagccatagtagatgctgataaaaataccagttgttattaccgtatgtaaaatcttgtgtaattttctttcaagtgactgamctggcctttgcttaaacacttgacttctcaggaaacaaaaagctaactccgggtgtggggtaaattgagaattgcctgtggctggcccctgtcccacgcacccttccctgttagggatctggctgagagtttccattccgttcttattccagggcaggaaatggaaacacaggaagcagatggttggcatgggaaaggctcccaaagacacagccactgtcacccagccccttgtttccctctcagtctctaagggctcccatttttccaaccatcactagcttttctgccaccttcagagccctgtaaatgctgtgactgccagagtctaaccagcggttcattttagttttgcctcaaggtggatggtctctggttcccccttgactagaaatctggggtgtgggtagcctcccaaaaggatggctctgtaagcgggtctcaccagcaccttcaacaaacccccgtgtgaagaaggtcagaggcrgggaagcccctctgcttgtggcctgacaacattttttatctaaagattctgagtaggtagtggttattttcatttctaaaaagcatacttttttgtggaggtggaggtgcattttaacatctctaaaacctgggtgcatcttaggatcaacagtgtcttaggtttgatgaaatacaccatataggctaggcttggtagctcatgcctataatcccagcacttcaggaggctgaggtaggaagatcgcttgaggccaggagttgaagaccattctgggcaacatagcaagaactcatctctaccaaaaaaattataaaattagcyaggcatggtggtacatgcctgtaggcccagctactcgggagactgagacggtaggatctcttcagcgtaggaattcaagattacagtgagctatgattgtgccgctgcactgcagcctgggtgacggagcaagactctgtctttccaaaaaggaaaaaaaaaatacactatgtaaaatgtcaaggctgtaaaggaggacacacaccatgttgagtcctggtccattttatctgtaaagaaagcaagactgtcccaaggcataggagattgccctggtactctcagggcagctgtaacttcaacacaggcctgtcaatttttcccatattaccacatggcttctcatccttgtcagcgcaggaaggctgtcggcatatcctgcctcctggatatgtgcaaaaaagtgaactctttgctgtgtggattttgctgtcattgagtcacaaggcagtcacataaggtagagagttggccaggatggagatacaaccacacttggttgaactgccctggctctgaactccacttggaaaccagaaagggaaccacccatcttaagaaacaaataggtcggagttgttttttcctctctcaaatgaacaagctaatccaatatttcctgattgtcctttgtccctgcatccagggtggcccagttgaaatccttcccttcctctaccttggaagtgcctaccatgcatccaagtgcgagttcctcgccaacytgcacatcacagccctgctgaatgtctcccgacggacctccgaggcctgcrygacccacctacactacaaatggatccctgtggaagacagccacacggctgacattagctcccactttcaagaagcaatagacttcattggtaggtttagccattccccttcagttattttgggagcccctttggggcatgtgttcttgacttttgatgccctgatggaagctaccttcactgaaagaaaagtgtcttgtatatgccgctgctgagagttggagccaacatgggatgcagctaccaaaaaggtggaagggaggatttaagttgctatgaataggagctttaatttgcaagataaatgaattaayataattttatggcagtactcactgtcgatcttgttattgtttctagctgggcaggagctgagtgtatccctgcgtaatgctccacacaaggaaagcagggggaagaacctccctaactgtgcttctacgtaggttgggtttatttttaaaagcaaacagaaggattcagagagcactacttacgcactgagccccaagggcccccagcagctttccatactcttggtgaacggcttggggcaatttgttttgcattttcagctaattttggattaaagatagcacttgactcaagctccatgctgtatgcacagaaaagttggcatcttttgcctgctttctgcattcttgttacgcagttatttattccattgcatagacctgaaaaccgaggccttggcctctggtccctctgccaggaaagggctgtggccttagggtttccaggtcctctgtgttgcctggattgttctcccatttggcatcttctcctcccccatccatcttcctaggaggctggcctgacttttttctgtttcagatttgcaagtaccagtctctaaccttgtgatcatgccccgttttccagctcccatcttcctctttaacatacgtagttgttgaaactgacgcgtgattttcctgtctcttgttccaagggatgttggaagaggaaaggcaggtgttagcacagcaataattacttagtgcagatagcaattaaaggtcccccttgagccacatagtggccctctgttcaccacacaatttctgctccccaggaaaccctgacgagaaactcatcagaggcaaaaggccgagcctgtcctgcttgtcccctgagcctctgggctgaaatgattcctttggagcttgaaaggcagccaaatgatgggttcagggtgggaaacccttgacttgttctccctgtccctgggaatgccttgcccttctcagcctgttatttaattacctgggtagctacttcatgaggtcatgaaacacgcccccatccagttctcagaaccctccctccccatcctgtgtgtgtattgtgtctgtgtacgcacaatccacaaacccacagcagtttgaaagcacaggatgctttttctccgattgcttgccctgctaatggaaggagagactgggtctccccagtgagccatgtgctgaatatatgctgaccccttccaagggaagagggccatgtggaaggcaggctccgaggtgtcgagtgggctccagaggcaatacactctggaccctttgcattcttggatgtggcactaggccagttaaaagctaaactttgaaggaggccaacagaggagcgaagggagataggagcccgactctgtaattctagggacttgggggtctcccctttgaactaatttaaagagactgttttgttgtttcttttgagtcagactgaattggaggacacccctattgaactgctttggggtatgctgtggggtttttgttcagatggggaaactctaggattcctccctgatgcctcagaaattttatcttttagatcttgcagattgatttgcatactttgaccttggggcagggaagtggagggtggtaaggggaatgactttttcttttggcccttcaaaatcgtaaatgtttttgcgtattgtagcctgcgtagtgccagctacatctaacttcctgtgatgtaattgtttcctcactagcaagagagggaattggaaagactgtattttttgtggatttgatgtgtacgtatctttaacctttcaccccttcccatttttaatagttgtagctggttttctgggggcagggggctgggaggtagaacaggaagggaggcatcctcccctttttgtcatattgagctaaagaatgctaactgatggtggtagctttatagcagcgactcccattgttgagcaagatggaatttgtgaaagccatttatatcctccgtctagtaggcgtcacttagccagggctataattagtggccatgcgctatttattgtgtgtttggtggtgagaaccctgggagctgagccaagcatcctgccctggcacagccagacagggtgcccggagagaccggaaggcctctaccaggatcggggttaggttgttacccttagaatcagacctggagagacaagagttgcttctccaagtcagtctttgagcctgggatgctctccttagaaaaatgtatgtgcccaataaaaatgtgcacaatttcaaggattttccartgccctcttggaaccatcagtggaacctaggttaagatggcatccccaggaagggactgctccaggtccatcgcctccagaggcasaatctgcaagtatcttgggaactgtaaagcttctgtgtgcttatgtctcttgtgacaatagctgctgtaaactgtaaaggtcctacttggggatagtctttgctgggaccccaaaagctctatcctcaccagtggggattaaagactggcagaagtgtagtgtagggccgtggctcttaggcaggcacaacagtttcatatctaggttactccagtgtttgattcttgtgttttgccattgcccttagattctaatcccaactcactcccaccatcttttcttccttccagactgtgtcagggaaaagggaggcaaggtcctggtccactgtgaggctgggatctcccgttcacccaccatctgcatggcttaccttatgaagaccaagcagttccgcctgaaggaggccttcgattacatcaagcagaggaggagcatggtctcgcccaactttggcttcatgggccagctcctgcagtacgaatctgagatcctgccctccacgcycaacccccagcctccctcctgccaaggggaggcagcaggctcttcactgataggccatttgcagacactgagccctgacatgcagggtgcctactgcacattccctgcctcggtgctggcaccggtgcctacccactcaacagtctcagagctcagcagaagccctgtggcaacggccacatcctgctaaaactgggatggaggaatcggcccagccccaagagcaactgtgatttttgtttttaagactcatggacatttcatacctgtgcaatactgaagacctcattctgtcatgctgccccagtgagatagtgagtggtcaccaggcttgcaaatgaacttcagacggacctcagggtaggttctcgggactgaaggaaggccaagccattacgggagcacagcatgtgctgactactgtacttccagacccctgccctcttgggactgcccagtccttgcacctcagagttcgccttttcatttcaagcataaggcaataaatacctgcagcaacgtgggagaaagaagttgctggaccaggagaaaaggcagttatgaagccaattcattttgaaggaagcacaatttccaccttattttttgaactttggcagtttcaatgtctgtctctgttgcttcggggcataagctgatcaccgtctagttgggaaagtmaccctacagggtttgtagggacatgatcagcatcctgatttgaaccctgaaatgttgtgtagacaccctcttgggtccaatgaggtagttggttgaagtagcaagatgttggcttttctggattttttttgccatgggttcttcactgaccttggactttggcatgattcttagtcatacttgaacttgtctcattccacctcttctcagagcaactcttcctttgggaaaagagttcttcagatcatagaccaaaaaagtcataccttcgaggtggtagcagtagattccaggaggagaagggtacttgctaggtatcctgggtcagtggcggtgcaaactggtttcctcagctgcctgtccttctgtgtgcttatgtctcttgtgacaattgttttcctccctgcccctggaggttgtcttcaagctgtggacttctgggatttgcagattttgcaacgtggtactactttttttttctttttgtctgttagttatttctccaggggaaaaggcaataattttctaagacccgtgtgaatgtgaagaaaagcagtatgttactggttrttgttgttgttsttgttttttatagtgtaaaataaaaatagtraaaggagaaaagcacttcttcatgttgttggtgaattgggataaggtaggaatacccttgggtggggacccagcctgcttcattgggatttatttatttgtaaatgaacaacagggtgatggtggtggaggtgcagctataggcatgacgatacagaatgttgctttccaactgaggggtttycctaagctaaccggcaagagaattccttagtgcaggcctcatagggaggtggtgagagtatctgcccactcagggcccttcactgccatcgcactaggcaaagagctctacttgaacctcagattcctcacctgtgaagagtgagctgagttagatgatcccaagagtcccttaaagcataaggcccttggttccagtaagcctgagtgccaagcttgtggccagctacctccctccagtgcctggcatatggcagactcagaaaaggctgggtaagtggccaagggatggagaagtgaatgaggtgaaagtttgccctgccagcctgcctgacgccctctttccactcttgcaactaattctagataattccccaggagttccaacgtaaatccctcaatgagtaggtttaaatccaaggctgaatcgacttgctttgtgagtaacttcctctgcgtaggtggaggaaggaaggggcagttgtcagcttctccccatgattggctctgcctgggctccagcctaactcctgggtcctgttcctaatctgagggaacagggagctggttggggtttatgccatcccagtcagctgataaataacagggattccagccatacttctcaatgctggagggtccaaagggtgtccagttctcccgacatgcattgtgtcaacaaatagcaagatggtggcagagcacaggcagcccagctctctaaattcctcacctcaaaggctttgcgtgaggtctttctctccacctgtctttcctttccccaactgtgttcagaggttccttggaaagtccacagatgagaaggtcacccagggttaggatgctgaatttctttcagcccactcccctcatctgtgtaaccaaacagcttccacagtgaagagcactagaccagatggtgagaagttgtgggttctagcccttgcccttcccccagctctccagtggtttggagctaatctccaacctctgtggactagatttctccagggctcttatctagctggtgcctaatccctcgtggtgtcccatctctgagcctctgaccagccttggagtgtgtccctgaagcctgcccattgtgtgggcctatgcaggtgctgagtggctaaaggaaccttgggtagggagagccggggagtaggaagctggatgcaggctggggtgatgtgctaagctcagcccacttgctgacatttgctttattgcattaaagtctttctctgaagggtgagtaagtcctctaaatcaggcatatgaggattgctcatcggtgggtgagtcactggagggtaagccaagtgaagccccacagctggggatggctctagaaccctcactccacttaatagtctcttcattgattacatctccattcttgccaagaccaactctacactggcttccagtgccaaatggggaattcaagctgatggcgtttagatccttcatccccaggttttgagaaacacctctgtcggtctccaagcatcatcgcacatagagatgtgttcaggagaagaaagatgttagttctctctttcccggctgtacctgtaggaagccccctcagatccaccctagctaatgagctaggccagatggggcaggagttgtgtgagcagtctctaaccaggatccagtgtgctggcaggagtcctgggtactgtggatcttcactgtgtgaggccctcaggaaagtgcctcaccaatttcaatactctgaacagctctatctctttgagttactggttgttcttctgaacaccataaagctcatgactgctctgtttcccttccttgctaaggccaccaggcagctcagaactaaactcttagcccacttctggcagttttgtaggaacttaacatgaattttgggtgttgattccaccgtttcctttaaaatttcccatctttatttttcttttacttccatttcctcatcattcttaaaaagaacagcaaaacttttacaccctctttaaatagactccactgcatttatggaatgaaatagggtataaatatatagagagtagcctgtgcatcctcagtgttactattgttcaactcactctgaagggttcatccataagactgggttcctttaccttttcagtgagtctgccaagtcctgtattacttctgaaatagattctgtacagagcccaaacctcatagctggggccctggatccttgcctcagaatcactagcactgccctatactttcagccttgtattctgctgccagtaccattctatggagagtgttggcactgatggacggatgctcaaagctacagcgcaggccctcctgacccctaaccactggatgggatggaggggactcccatgcttagataaccatcacccttccatccacttgacaacccctgctagaacctggaattcaggggaaaacagccaaacagccatatggccccaccctcatgggtccatgagtactgatgactgttcactggctttctgtccctgcctggagccgacctccttagttggaccaatgtcgttagccccacacaatccccttctccagctcccctcttctaggctctagcttcatcttctatctgtggttcagcacaaccttgtacccaagctcctcagatttgccagcctgtggttatggctgtgttactgtgccagcaatccacaccctactcagcccaccccttagtctctcttgcattgttcattaattttttttttttttttttttttggagggagtcttgccctgtcgcccaggctggagcgcagtggccccatctcagctcactgcaacctccacctcctgggttcaagcaattctcctgcctcagcctcccaagtagctgggattacaggcatgtgccaccatgcccggctgatttttgtatttttagtagagacaaggttttaccatgttggccaggctggtcttgaactcctgaccttgtgatccaccctcctcagcctcccaaagtgctgggattacaggcgtgagccactgcgcctgcctataaatgtttttatatctcatttttacagatgcacaaactgaacctcagaaatattaagtaacttgcccaaagtcacacagttagcaaaaggtagagctcgaatgaagctatttcattgatcttgtacccctctgaacacctggggtatataataggtacttctgtccattgggcttttgtttgcaaggaagtctcctcagtctactttaaggaaaagtgtttgtggataaatgcaaatagcactgaatccccagttatactccattccagccacattggctttctgacaatcccttaaacatgccaacatccctcctgcctcaggacctttgcacatgctggtccctctgactggaatctttctcctataaattccccctccaaccgattaactcatactggtttttcgcctctcagttcaaaattcaccttgccaggaaagccctcccagactaggtcagatgtccctattggctctcatagtcttctatatcttttcttcgtatttcatcaaagtttaaaaatttttcatttctctgtgattattttattaacgtcatctccttcagactagaaacaccgggagaacagagattacattgcatttcaagagtaaccaaggacagggtctgacttatcctaggtattcaatgagtactggttgagtgaaggagtgaagaagtgacaaacagaatgaaacgctggtcagaagcagaagctgttctctccgtttctctcagagcccctatgaccctccaaacgtgagtttctttatcctggacctatttgccagttcctccccaatcctggaggaagcagattcccagccttagctaattactgctaccttattggtcagaggccatggtaccccctcacctcgttggtcactggtcagcctacggctgggctgcccttgggtcagatgcccaccctgggatcaatcggtttcctctaagttcagagacctgcctcgctcagactctgagacttgagcgttccataagaagtccccagaaaactgccataaagaaaaaccctaccgatcacttgagcccaggaggttgaggctgcagtgaaccatgatcacacaactgcactctaacctgggcgatagagcgaggccttgtctcaaaataaataataaaacaacccttccctgcttgccccaaagtgatcaattgtggtaactaaattttattttgttttctttttttattttttatggtttttttttttttttttttgagacggagtctcgctgtcgcccaggctggagtgcagtggcgcaatctcggctcactgcaggctccgccccctggggttcacgccattctcctgcctcagcctcccgagtagctgggactacaggcgcccgccacctcgcccggctaattttttgtatttttagtagagacagggtttcaccgtgttagccaggatggtctcgatctcctgaccttgtgatccgcccgcctcggcctcccaaagtgctgggattacaggcgtgagccaccgcgcccggcctttatgtatttatttttgagatggagtcctgctctgtcatccaggctggagtgcagtgacacaatcttggctgactgcagcctccgcctcccgggttcaggtgattctcatgcctcagcctcccccagtagctgggattacaggcgtgtagcaccatgcctggccttttttttttttttttttcggtatttttagtagagacgaggtttcaccatgttagccagtctggtctcgaactcctgacctcaagtgatccacctgccttggcctcccaaagtgctgggattacaggtgtgagccactgtgcccggccatggtaactgaaatttaaatcctggttcatttgtactagtaggtccgatcccttcccactattccatcacccatccccagtacacacccgttcacttacgaagtttacagaaaccaagaagccaccaaacaggggcttaaagcaggcccttgaagtatctgtgcatttttcattctgggcttcttccagaggtgaggagaaaatgttttgcttaaaaggaactaacctcccaaatggtgaagcctcatatatgtcaccatggtagaaagatgaaaaactatccccacaaggaaacaacagtggacttagaatcaggaagcatggcttctggtgccagacacgagggaaccctactgtctgggacccacaagggaagctgctcccaaaggcaacctgtatgtacgtgagtgtaagtgtggaaggaggagggggagccaggagcaggtcctgtaatgccctaaagttgccagactgcaagtaatttcaaaagttcacatagttctatctcctgcttcagaagaaccatccccaaactaggccagaatgacctgttttctatagaaaagcaggggagagagataatgtattgaatatttactatggtccagctgtgtgctgggtgctttgcatatgttctctcacttaagatctgcaagaaccctgcaagatggatattgttagccctgttttacagatgacctatcctgcccaaggctacatagctagagtctgaattttagagccaggatacccaacttgcaatggacttccagggctatactctttcccatagaccagggttccccaacccctgggctgcagactggataccagtcagaggcctgttaggaactgggccgcacagcagtaggtgagcggtgggcaagtgagaattaccacctgagccccgcctcccgtcagatcaggggcggcattagattct

SEQ ID NO: 94069 - DNA, 130349 bp, Homo sapiens
gggattataggcgtgagccaccacgcccagccctcaatgcctaaattttcaaaagacaaaatgacagaatgcaaaaaatgtatttctagaacaaatcttagagatgtagaagtagtctctcctttgtgcccctatattttcattcattgataaggatgtgtatacaattttgtaattgctagagttaagtaatttggtaatttatttaactggtaaacacttctactgtcatcattctttgcctgtgcaacagcacaagcttctccaccgttctcccaattcttactcttgccaacccccaatatgttgaccacgccacagcttcatgtgtaaatcttctcattcattcttccatttatttaacatgtatcacatatggcaaccattatattaagtactgcctaagcctcatggtctatcatccggaacagtggtccccgacctttttggcactggggaccggtttcatggaagacaattttttcatgggctgggtcaggggatagttttcagatgaaactaccccacctcagatcatcaggcattagttagattctcataaggggcatgcaacatagttccctttcctgtgcagttcagaatagggtttgcactccttagtgaatctaatgccaccgctgatctgacaggaggtggagctcaagcagtaatgcgcaatggcttgcaactcacctcctgctgtgtggcctggttcctaataggccacagatggataccagtccacagccctggggttggagaccccttatctagaggacaggcttgtgttcttggcagggagttggatatgaacatacagatatatcccagaatttggagaaaacaaacaaggttctgagaaagaaagtaacttagagaggcttcttttatgtaggatggtcagggaaactccattgaggaagtgacatttatgctgttaccagaaggaagttatgtagagtggttggtgggggtgaaccagaaaagcatcttgggaagaatgaagagctaaagccctgaaataggaaagcatgacatttctaggaatagaaaaaaatcagtgtggccagatcataacgtgaaccaggtggaagtgtattaaatgggttgagaaataatacagaggttggattttattaaaaatgcaaataagaaaaatactgatagattttaagtagggacttatcccagcttgatttgtatggacagaaatcggtttgatttctctttggaggaaatactgaaggaagataagatggaggcttggaagttagtcaaaagcctgaacagtgatgatggtttgattctaagtggtacaattgtaaacagaacacaagatagatggtggagagagtatgaatgggatttgttaatgatttagtagttgtaacaggaaagaagaaataaaaaataaaaattaggcttctgttgcaagttactgtgtgtatactggtgcatttacagatataaataagattgagaattgggatgggtttaaagaaaggatgggtcaagacttctatgttctgttgagttggctctgagacaatctagtagactagttaagaatgtggtagcaaaatgtgaatctagagatctcaaatatatcatagatctgattggaaatataaattcgttagttattcccacgaaggagctcacacagaaagagagaggtgggtacagaattgagcttgtaatgtatcttagtagtacttaaaagttaggtagagactgggcaaggtagcccacacgtctgtaatcccagcactttgggaggctgaggcaggtggatttcttgagtccaggagttcgagaccagcctgggcaacatggcaaaactctgtttctacaaaaaattgagctgggtgtgttggtgtacgcctatagtcccaacttctcaggaggctgaggtgggaggatcgcttgagcactggaggtagaagctgcagtgagccctgatcgcaccactgcagtccagcctgggtaacagagagagaccctggttaaaaaaaaaaaaaaaaaaaaaaagtcgtctgggagcggtggctcacacctgtaaccctagcactttgggaggccaaggtgggcagattgcctgagctcaaggagctcagaccagcctggacaacatggtgaaaccccatctttactaaaatacaaaaagttagctgggcatggtggtgcgtgcctgtagtcccagcttctggggaggctgaggcagaagaatcacttgaacccagcaggcggaggttgcagtgagctgagatcgtgccactgcactccagcctgggcgacagagctgagactgtctcaaagagacaaaaagggcagacagaggaagaggacccaatatggcaactgttgaggaaaagccaataagggttaaggaaatttaaatttgtaggtaatgatgttttggaagctgacaaaacataatggttagagaaggaaagattttgtttaatgctactaagaagtcacataatatgagggtagagaaacaaatgatggtataaaatctggcaacatggagacgattggtaagaaaattcaagaacaatgtttataatgcttcataacttcctcatagctcttagggtaaatacatattcttggaacctgcaaggcctggcaagatttggccatcatctccctctgaaacctccttattttccaggctctgcttctttctacatcagcctcacatctcttcctgttccttgaacacagtctcctcctttaaatttattatttctgcctagaatactttccttctcctcatactcatttaacttattttcttcaggtctagctccattgctttttattccaggaaaacttcccaacctccagaatagaccaaatatcctattatatgcttaaatcacagtgtggaagtattgcctttgtgatgaaagtgtcatgatgactggataattaattattgtgtcttccactaaagtgtagataggaaagaaagcatgcctgtttttgctcaccattttttcctcatgtcaggtaaaatgactggattacattaggaacttgctctgtatttgttgaatgaatgagtgaatgaatgcatgaacaaatgagtaacatctgcctctgtagttaacttgtaatctgtttctgtctttatataacctctactgtaggtagccttaaaaatctggaaaatgactttattgatttaagtaaatattaagtttttaagcttttaaaaatctattgtaagttgattaactatgattattttgaaattttcttcatcaaaatttgagatgactttggatacatactgttttcagctactcaacaagtgccattgtatttactatgtatgaaatctggtgttacttcctgcccatttcctagactcagttgttctttgcaaaatacccatttatcagcaaccagcccaccctccctctgggaatcagtgagagtggatcacatcagtatgtcataaatactcctcctgttttctttgagagttttctgctgatgcaagcggaaggcttggatgccaggcctgtatgtgatacagtagaaatttccccagatgccctgtggaaagacaagctgctacccggagtccttcctggatgtctggcttagtgtagtataccatcaaggacaacctggctctgtctcctaacaagctgctagggccttccctcttgcctaccctcctgacagcctggacctcaggctaacaaacctctgggttgccactgtctccattctgagccatcagaattgtatatacattcatctgctgatgtctctgtatttcaagctgtatgtctttacacctttataatacacagtacagattttgctgcttaaaattctagtatttcctatagacactaaactcaattttaacacaatgaatatgttaaaacattatatatgtgttggattaacacatataatgcaactcatttgttgctaatctatcttggattccttgggtagaatctgtcttctcacctgtctgaaatggaattgaatctcctaacttcttactatttttttaaagccacaaatcccttttaaaatgtccgtttaaggctgctaaactcacattgttatagagtatattttatatacttttcttccttttaaaagatcatatacacttttctcctggcctctaattttgccaaatattctgccataacagcaagctcacagaacacaagtatttgcttaaagatatttaaagcaaatccccaaagagttttctgttgcaaatgtattttaagacataggctgaggagctgagtattcaaatccatgagttctgacactgatgttttattaggcctacccacatgaaaattagtgcttacttgcacagttatcttatttaaaaatacatttgcaaaaagagaataatttcattttcactgattcaaaggtctatcttttcgagtattataaacttacatagtacaaaaagattggtaaaagggatgagaaaaataaagggcaatagtaaggtgagtaaggaaagcaaaattaaacttggagacttgggttctaaatatagcttgtctacatcctagctgcaagatcttaggcaactcaactaacctctctgaacatcacagataaaatggggaataataacattatctagctcaagggtatcgtacaaattatacaatatatgtaaagtgcaaagcatagttcctgcacatagtaagtgctccataagttaaatataataataatcatagtaaaataatattcttaactacaatcttattaaaaggttattacctagagtttaagctgtggggttatttccatttgcacaaagtgtgatagaaatttggctctgtagttcctagcagccaatgtaagagtaaaacaaaaaagtttgtaagtatcaaaagatttatttacttaaatataagaaccctacaataatgcttccaaactagggtttgcagaattaccacaagggctctgtctgtctaaaagtcccccaagcattatctattgttcaaataaatgagttgcacatgtgtgtacttttatttttaaaggcatatagatattgtattaataaaaccaattcatctaattgtattgttgaatttatactttttgccagtaagcattttcctaatagatggacttaactaagaacatcagaatggtgaagagcattgtgttaatacaattcattgtcttatttgttaaaaaagttgaaaaagtattgctgagaaaaaggaaacaagttaacttttgttaaaggtatctcttggttttcactgtcctttccctcatcagtagcgccaagaacatcttaagtcacagaaacattagtttttggaagcagggtttgctgtaactatagtagaaatgacattctgattccactcctagcttcacaaggatatctgtgaaagatttggggcaaaactgttaagctgtctgaaagtgcttttgcataagaaatgggttttactgctaaaactgtcatattgctgagttttgaatgccctaatggtaaatgatactgggttgccaaaaataaccagattagtagttttttcattcatttggccgtctcagtaagtcaaatattgatactttctactaagtcatcttgccaacacccattttgttatacttatgctgaatctgtttgtcatctcttaagtaagaaaattattgattattttgtggggatttaatttaaaaaaaatggtaatggatactgtaaaggagcattatttggatggtttaaaaacatcttccttgatgggaaaatcttttaaaaggctttctaacttggtgtaattacttgaattaaggaagtgcaatgccattctactgacttagaacaacttttttgacttcctgcaaagaggacccttacagtatttttggagaagttagtaaaaccgaatctgacatcatcacctagcagttcatgcagctagcaagtggtttgttcttagggtaacagaggaggaaattgttcytcgtctgataagacaacagtggagagtatgcatttatttatttacttttacatttttgattcgtttttacagagaaaaacttctacagagataacaattattttgcttttcagaaggacgcatgctgtttcttagggacacggctgacttccagatatgaccatgtatttgtggcttaaactcttggcatttggctttgcctttctggacacagaagtatttgtgacaggtaagtacaaggatattaatattttttaaattattttttctcttttggaggaatgtttgaaatagacataaaaataatttaaatgtgttggtaactggaagtgagaagcctgctgtaaaccatcaagattgttgtctcagggagacatagctagttgtgtgacagaatacattgtttctgtttacaaagacataaatgtttcgggacaaaaaatacaattttaaaaggaaagcaatgtctatctgtatctttatttacaactgttcaaagatattacaaaagcaacattattacttaacttccaaagtgacaataacacacatttataaaagcctgkgaattttttaatgataaaataagtgagtttttattcttttaacaaatttgatcttttaaaaagtcataaaacagctttggttgtatgtaagccactccctcttttcagacctgaagtttgcttcctcaaattttgaatttaattgacatattttattgaatacttgggtatataatagttcaaaaatatattgagatatttagtaaaatattaactttctgcaatttttatcacagaatgtattttaaatcaagtttttagtttcttgttaatagttttaatacatttttgctttagaaattcttgtggagccaccgcccttcctgggtggtgggtaaatattacagccttgatgagatagaaatatttaaactcttaaaaatcatgcaaatgctgtattcagtaggaaaatgcaactagttggacttccagtgcctattaaagtttgaaatctttgcacatttatggtctattcaatggatagttcttgagcggcgtcaatatgaatcatgagtacatttcaatagattatagaatgtaactaataattaatatttaatatttctctttatgatgtagtatctaaaaggacattgaaaataaaatttttgtagaaattccaaaaagtataaaaagtattttaaaacaacttgcttattacaattcactttgaagtctttttttgacttttaccgttcttctttcctctgaaagtcagggaagtagctacctcttgagcatgttacattgacaatttctatttggagaggaaagaaagaggaaagaaaaacaacataagatttttgttgttgttgttgtggctgttttgctttttattgcaaaggtgaattttttaaaaatctatatatttgcagcatttgtcttagtacagaaaatgtttatcaagttaccatccctttaaagcttatgataataaaaagtaaattataaagaataataatctcaatgaagtgatatatgtatattatcacaaatcagaacagattttcatttaaaattcccactcaggaaatgtcgaaaagcatttttaaatgagcataaagaaatactgagacattttgtaagccagaatatttttcttctcttcatattcatttaacttctattattttcttcaggtctagctccattgctttttattccaggcaaacttcccaacctcctgaatagaccaaatatcctattatatgcttaaatcagagtgtgaaatatttcctttgtgaataaaaattcaactcattctattacaggatgtttttttaaccataagacacatctttgaatttataattgaaataatatgatggggtctagaaacctttatatcaactttgctgaatgatttataccatagcaaataaatggatatacataaatttattttgaaaactcaastttatcttcagttgctcacataaatattgagagcaaacatttttctaaaagacatttgtagactccctgagatatatgcttatttgtggaaaaacatatacagatataatcatttgtatctgcaaatattgtttataatcctttcaagttgcaagaaacattttgtgatttaatgtataatttggaaaattcttaatgctttaaattatttatttttcttttttagcaacaaatgagttggattctatgtttcattttaacgtgttaaaattagtttagtgcctacaggaaataataaacttttggggaacaaaatttatattgtatgctgtaaaggcataaagaaatagagccaaatgtagagagccatcaatggtaactctatgcataattcaaatattttatttaatatctaaaatgcacacacggacaaggccaaagttaatctttgccacggcaacaaccaggcagggttcagttttactcaagacttcctaatcctcttgctctgtgcctctttgccatggcaactggaagccaaactttgtttagaatttctaaataatgttaggggacaatgatggttttaagaaggcaggtgaaggtgagtgttctctggttctaataaagttgtaatgccaggcagatctaccacactatagcatggcagttaggagtatatgagttatggtatgtgaggtatatgatgagttttgttatgagtcataacagttaagactcatttcctggacataattcttcatttttccatctgtattaaaaatatatatctcatgttataaacatggactgtgccttgcacatcacagacattcaatgaaaattatttaattgaatttggtaagcagtcctattaagttctaaatactccataatttagagatttgggaatgtgattagaattacttattaatttgaaaaaaaatgtcctactaaaaacctgcctgtgacctttatcattgctaaagtttgaaatgtactttgttacaggaaagactacggctagggcctatattatctttttctcttttgttctgtgtaagtaagtataggggcagagtagttagcttgaacttagttctttctttgttctggactatttgctatcctctcaccagtgacaattaaccagtatagaaatatagatgtttctacattgttcatatacttgaacatatatttctttatgtagatactmacacataaactagttatatatttgtgggttatatatactagtcaatctatctatctgatctatctatctatctatctatctatctatctatcagttctccatgtttgtctatttggcgttcccatgaacttcagaccttcgcctgtgttctcttttctccatttggttacgtatcattgcctactatgtgttgatcactctgattctccatctctagactcatccctcagaaacacggaacttactacctttcctaaatccagacattaacatgctccccaagtcctgaaattttgctttgtaataatctctaataacttcttgctttgacacctccattgccatcatcttaattcatggctttattatttctcacctgtaaaattgtaatagtttttttaatcagtctgaagtctcatcctttttttaatgtaatctacagcttaaaaagtaaaataaaaagtgaagggttactgatttcttctcattgcctttggtataaattctaatcttttttgccagagaaactggttccactaatgatctgggggctaggcctggagctgggaagggatcttttttcttttctttctttcttcctttctttctttctttctttctttctttctttctttctttctttctttctttctttctttcttttttctttctttttcttctatgattgattaaaagaaaacaaacaggaggtagttttaacacccacctctatactttctcaaggtgtttaaggttctgggcaaatcctacttcttctattatgttctcttatgtcacttttgccacaaaatatttccattgaattgcacactttttatcaccttttcttggcatttttcaagtcatttcaatctgctcttttttgtgatgatgattgatgatgatgatgacatgtgaattagtggatttcttgacattgtaacctacatgaaatcaggtataggagacacaaaaggcataaactcatagttcccatacctaatttttcaccagacactgaataaatcatagattaaaaaaataaaactgcatattgtagtgacaaaggaaaggaaaattttcaaagagggaagtcaaaaagagggagaatatgagataaaaaaattaaccagaggcgaagtgggaggatgaagacagcaggactattttgtccagattaaattaagttgattttggatctagatgtttacagtcttgcctttttgtttttgtttgtttgtttgtttgttttttctttgctccctttcttactctccttatctcacctctcgtctggaaagagcctcctgacttcctaaaagttcatagtttgagaatgtttttcctaaattttctttgatctgctctttggacattctaggtaatgtaatttggagggtcaattttatttttcagatacacatacccataggagaaaaagcaaggaatgggagggaaatacaaatgtagcggagtgataacacaaacagatcaggtccagtcatggcaattgctggtttgaacactgatgctagtgctctgggattgcttgcaagggcagatggaatatggtgcaccctaggtgttgcattatttgcacgacaaaagtttgtagagagctgggaataatttctttacagacagtgtggtgatgaatgtcaatctgagtaggtaaggggcagagatttgtactgaggttgattcattctcttggtaaatacacaatgttcacaaaggcaaggtttcatcttcagaccatgtgtgtatatgtcaccttggtgcagagagagaaatttttcatcagtgctgacctttgatttttttttctagacatcttatagatttatgtagttatttacatgggaaacaattagaatggaaatttaacatatcttcagtttaaaattaatttctgtctagtctaaatatctttgtaagtactagatactcaatcccatagcagtggccttttaccaaaggcttagtgctatgacttttgcatacataaagacctcactttttaagatatgatacaccagaaaaaaaatatggcaagactttagcaatatgatttgatgcctatttctatataatacccaaatatacaggaataaaaattatggcaatcactggattttgtgtacctggctctaaccaatatttatattagaaaatatctaattattgtctaaaatatttaatcttcattcctgtttgtatgtcagtgtgctacttcaatatcagtctgttaaaagagtctaggaatgactactataagcagagaattatatgttcaggaatcacaacaaaaaacaagaacaaatagagaaacaaaagctttcctactctttcatctaggacaagaataaatacacataaagtcaatattagtgaagtaaacaagcatcttctatatccattcatagtaccttcaattgattgatttcttaacagacaatcagcaaaattatcagtttttattagagattttagtagagaccgagcttaaacaaatawattctatggtgcttaactctatagtatttaaagattcaatatttatttcctctaaaaatgagtcaagtgtctgaaaggaaaaagccacctaamtgaaacttcagtttctactatacagggtatttattataaaactgtaattacaatgcaattatattgaagtataaatgatcatcattcatttatttaagaatataatcaaaatttgcatacctggaagaaaaccatccaccctccaaaatagggatttgctaatgtaggagtagaaggcaaaagttgagggtaactcaggtaacacactcatacgtattaggatatgaacagctggtatagcaaacttgatagaaatcactgatagacaagaagacattctctgcattttaaattaaagtacaatttgtctgtggtcattcaagagatagtttagagaaacctatacaaataacaatgatgctaagagacaatatcaaaatcacaataaatatcatggcaatacagtgtggccactatattttaaacacatccacttgatgaaaaatataataatttactgataaaacatattaagcataatagaaaatgaggcagaaaccactccaagctgggaaacatcatgacatctgtagtgataaatattttgaaaatctaactctatgaatcttgtgatttttagctaaatcaattttcacccttgagacccaatttcctcatctataaagtgttgtaagcattaaaagttataatatttgtgaaaatgctttgaaattatgtgatactctgagaagtaaattttttcatgtgagcccatgaaatcagagcacatagccttttagcataaacttgattccaaatgatatctcttcctttcagacactgtgagcagataaagggatagtttaaggttaagtgatagaggcataatcccttataggcctttgaattcttttaactttgcattctttatttcagagatttttcaggcttctccagattctacagtctaaatagtttgtaaatccacacacttctactttgccagggatttcttagkgtaaaaatatcctgaagtctcacctgccttcaatccttactgtgtccatacccaccattaccaggataatctttgtaaaaggcagaacttacctttgtccattcctcttttaaaagctcctattggtagaaaatatactgaacccrtgatttgataccaagtatgttttggctcaacttttatgaaaacaaatatttaattagaatataccaacatttatgagttttccttaaagataaattttggaggaaaaaaactccattagaccaatttaattccctgatgattatatatatattacctagtgaaatccttggcagtttttccattttaattttaattttactgaactaatgtttagcagcatcactttcatttaatttttacaataactattagattcatgaatccattttacccatgtcaagttctactgaatatagcttatgcttggaattttcctttgtgattattacttttctaaaggtaattcttcttttcaaacaatacagatctaaattttccaaaaccatttaaattcttctctttggccagaaacattttctgtgtgtagttttggctaccgctagtttagtttttttaattggttttgtgtctcaatgctacaaaaaatataatttatgtaatttttcatttttgtcaaacttaaatcgggcaatattaaccattctcaattttttgttgtgttgaaatttctatcagtgacattaatgtggagattgacagctctttgagctagattcattttgaaattttaagactttcgattatttcttatctagccaatagaaactttagaaacacttttaagactgcttgatagcctggaattattatgtttgaattctcattcatttgtatggtattcctcttattagctttcacacttagtaccaatttcttattcattattggagcaaaaagtaaagagaagaatcaaggtgataagtttaaaatcttctcaatgtaaaatagtgtgyggggaaagtgtcaaatcatcctactttggtctttgtgcatttaggaaaaataaaagcaattagcattgcacacacatatgtaattgaatctcttcagatttgtctggctttatctctaaccactttgtgactctttttgtaacttgcatttttctaaaaatgtgaccttgtttggtcttcctactgttggccatgctgtttttccttctctccacatctttttatcaatggtgcaaattataaattgtattcaaatttactgtaaagatcatgtcctctagacagcccctatcccacttgtataacccttgctcttcagcccctttcacacctgcataggtattcttctgctgtgatgatcctttgaataattctcttggagttctctttaccaggctctcttgcagcaactggtgagctcatgtaggctatcactgggtctctgcttatttgccagtgcctgcaggtcctcagtacctgtttgctraacaaacgaatggtctgtcagcttaacccaactctgtatgtagaaggcacttaataattcttaaaaacaattttgattctgtccttttattgttatttatgggaattatttatggtaaaaatttctacataatagaaaatttggaaaatgtcaagaaatagaaggaaaaagaaattgcttagagcccatgctaacattttgtttttyttcctctatcttttgatcacatgctgtgtatgaaatttcatgttcaattttttcccaagtaaaccttgattattctagacaatttgaaaaatatagaaatgaatagaaaaataagaatttcaggtttccagttctcaggatctaaaaactttttgagtatttcatttgactaggacaactagatctattcagttatttattaacttattagttcatttgataaacaactattttgtgagtgttttccatgtaatttgggctgaggacacctatcccatgaagcccgtattttctatcagtggcttcttggagatggtgttttaaatcttccaaaatcttcatcagcaccccaaaacttcctcctcaaagtaacaacataccttgctacagataattattggkgttatcaatgttttataaattataaatttaaaaatcactatcttaagatctatatataacatattaagtaaaacttatattcttacaagacttcctccaggtccctgttacaaccagattttctttgcagacttttaaattatggaagttctggtgctgccactgagttgtgtagattattattagatattcaataaataaagttggtagatgtgaagaggtactagacaatagtcctattttgttttggtttgtttgttttgtaatttattctgaaaaaatgtttatgtggagagaaaagggaaaacatacagaaatacacagcacacaaacaaattcttacttttttttggtagtctttctaattttccaaggtcaccagctaatagcaaatgagagttgtagggggtggggtgaaggctggggtcttaatcggggtctatctgattctagatagaccagattctagattttccactcggttactcaatcttcttagtggtcagtttaataacctggaatttaagacatgactgtgtgatgatgggcaaatcacagcaggactgaatgggagctggtaatttctcagaggttgtttgtgtgacatatgcatgtaagttcattcacctgatttagctacttacatgaaccattgtgcactgagctgcttctatatctttagcatattctgtatctatgtaaaattcacataagattgtatgacttttataaaaaacaaaaagacatctttgattaatttgtcttcactatgaatactgatgtgatgtgttacaatcatcctgaaaaggaggctaacaaaggacaggactgagtctgtcttgaggtgagtgatatgatggaaagaatggattttcccccacccaactcatttttgatattacataaagtgaaaaacattaaataattcaccaaagtatctagatttttttttgtttttgaagtgcaagggaagtaacttgacctttgttaaacactttgatmatggaaaacacataaggttctcatcttattccaggaagtgtagacactagataatcttttcatagtcatccaaaaagcatattaagtgaaccaggtaaatccatcctacactttttattccagagacaagttggctaaactttgaggagactaaaacaaaacaaaaaaaaattattgtttggttcatttgataaatgtggattccaatcatataatttaggccaaatattatactttgacttcttagacttagatttccagatagtctggtttataaaataagattttaactatgcttactaaactctatgtatttctactttccaatgacccatgttcttattttctgaatttacttattgatgctttaggtatgataaaggtatgtaatggctraggaaacataaatgaagcataagacatcagttgagagttttgacggaaaggaagtggtgatatgaaggaaacagataaaccaaagaaaaaggaaaaggtcagggagctgataaaagtaacttgaagaaactttagtgcaaatgttggattcagacaatcgctacttttaaagtacttaaagaagtcagtctttgaaatcttgcccgkattccattccagtttcatcattggagacttccaatgatgaaaaattggggaagaattaccttccaaagcctcagtttcctcgtgtgtaaaatggaaataatagcaagagatattaaatgagatgattcactcatcgattcatcaattgtttatagagcccctgctaagctaaaaactgttttaagtgttgacacagtggtaaagaaagcagaaagtgtaactacttttatgaaactgacttcctagtggtgagagataacaagaaaacaaacaacaaattgagataacttcagttatagataaatgctgtgaagaaaattaagtagtgtaatatggtagagtttaatctggccagacccagatttaggggtgaatgcacttttagacagagtgatcggggaagatccttatgaagaagaatcattgagctacctgttggctgacaagaatatggggatccatgtgagggagactggcaagagtaaaggttatctggcaaaaccaaacaaattggtaggttcgaggcacagaaaggtcaggcatctgtagtatggtgagtaagaactgagcaggttgtggtgaggctagaaagataagcagaaggcaggtcccacagggccttgatggaaatggaaagagcttgaattttacctgaagtataaagggaaggaaccattttaagttcttaagtacagaataacctaatcttctttctgtgttgaagagatcactttgactgttatgaagagaatagattggaagtaaggcaaagcctggaagcagttatgaggagactgaatgggaggatggagaaaggggatggtgatctggaccaagtgttggcagtgcaggtggaaagaaaggaaagactgacatagaattaagagaagtggctgcatggaaaagacaaagacattttagagaatgactttttttccccatgagcactgggatgggaaagagccaaattagggggtcrgaaatccagagttatgtttgggctgttattgatgtctgattttcattaggtggtagagaggtcaagaaatccrttggagataagaggctgaggcccattcagtaggtctcaactggagacataaacataggagtcattgcattcagatggagcttaaagctaagggactgcatgtgacagtgtaaataaacatgtagagagkagcagatgactggtttctgagccttgggaaacttcatatttggaagagacacaaggaggagctaggaaaagatagtgagaagaggtagccagtgaaaaaaagtagaactatactttgctttgaatgttgaaaagggttggcattatagtgagaattcagtaaattccacataaaaatctgaatttatgtctcccctagaaaggttggttgtgaacatgcaattggtaaatatctctattaactttaatattgttacaaaagtaatattaaggaatttataatatttggaagaattagatgtctttacctaatatatcccttgctagcttaacaattagaaaaagaaagaggtacatcttaacataatttgttttaataaaaactacagaatatattgagagactaaagaattagaaatttaactgaaaatttcatgcaaaggtaatgctctgttgaaccattttgtagcttatgttttgttttgatacatattttaaaatattgtttaagacaatacttgaacagattgggattgtgtgtgtgtgtgtgtgtgtgtgtgtgtgtattggttaaataactggtttatttttaaactgaaattaaaccttccatttctttgagaaatttaaaaagtagttgttatcaatgtggcagatattaggtagaatctaatatygtgaaaattaaactgcacataaatagatataaatccttttgtcagtgtgtgtatatctctgtgtgtaattttgatctcaggcttggcaggtttccttaaaacttttttttagagctacttaattttgtacttactggtggttagctaataagaaaaagctaataaaaaatagtgcttactctgtgccaggcacttctgttaacattttataaatgttatctcatttaacaagctcatgtcattgtatagtctagcttatacttgtctttaacataagcaaatttgttaatttgtgtttcctgatattatcataaaatttactggttgtcatatcctaaaagggaatagttcaatttaattttccttgttctaattttaaatacagtactaaggttgagaaagaaggggtcaggaaagggaagtaacattgagtgtctcgtgtgcctggcactccatatgatgcttcaatgcacaccaggctattcagcctcagatttgtttctacattgcttctagttctacagattattcaacgaatgtacaatccttggtcactagtcttaatagggaaaacagaattatggttaaaacaaaagagtaagtaacttaaatatgatctatcggtatttattttgtattatgatattttgcttaagttgaaaaaagggcgcatcaggtgttttggcagtttactgtgatctcaatagtgagaatgtattgaaaaatctcagtacaggagaaagctgtgcagctttctcttcctgtcgctgcttaattttcatgtagatataaagccgcagtttaagcacatctgcttaatccttatttaaaagactaggagagaactagaaagggagggagggagaggaggggaagggggaagagattgagagaaatctctcccatataacacaaacactgtattagtgtgtgagaagcagataatcgtgcatgtaggcactatcatttgtgaaatcagaaagcataatttactcccaatgctgaataatctagttgtgtgtaagcaccagagagatatttaaatacctatccaataaaagataataaaagcctagcaaacctaagtaatccattttcagatgttaatccaattacgtaaacaaatattacccttttttttttttggtcattgtttcaaggataaagtgtaaatgaaagaaatagcattccatctaggtaaaagaggaatcagcatcattgaaatgtgaatagctgtgattcctccttgctgaatggtaactttagaagagagggaacccaggagtccatccagaggctcaaggaataagaggttctcacccataggaagatgaaaaatactttcagggtgacccatgagggaaaatcaccaaagcctttgaaataaaagattttcccttttctaagaataaaagatggtgttatgtcaagggcggctcgatggtgtggatgaaagaactattgggaatggctactgaragatcaaaggcaagtggaacctcaaaattctggaagtrkaacragtcagatacaatataagaagtacttcaaaggcaagaaaataagaataataaaaatacctttagttgtcaaatgtaaaatttgtgccagttttgtcacattccatttttcaggaacactgtaaaggtattttctattaatatcaatttaactgtacatatcttcccatctatcttaattagtcacttttcaagaacaaatgtgttatgctcaaagcatccaaaggacttttttgttagccttaataaaatgctttctcttaaactaaattttaatttagtttacatgtctacgtataaggtggttatagaaaatgaatgtaaaatcacttcattaagtgtaacaaaacaaaataatatgaggaattgttatactgtttaagcatttgaaaaackataaaggagtatagaaattttgttaccactactatgattagtttctcatttggtttttcactttaagaattggaataaaagttgaaatcttgattaaaaaaacaagaaatgattcacaaattattttacaaattgaaatactgaaatacagaatgttcaaccactgtcaacatgaactyctattctgtaattaatctattctataaacatctgtatttgctaaagagcaacagatcaaggaaaagaaaaaataatccttgccatccatagagccatgatttttgtggaatcttcgctccagtttaagttttgtcagtgtctggaagaaaatacttcccatggatcatctttttgctaaagagtattctttacattttaaaacatatgaatatttacataaaggtgtttgtggaaaaggaaattatgtgccttttattttaattcacccattattctattccacatgtaaagtagaaaatactactttaagacaaaagtaaagcattatttatttaaagatctattttgtccatgaattttatcagaggtaacgcttcttaatgttattcagtgccataacttgccttttttctaggcctccattttatgaactgaacatctggatttgatggcaagaaaacatttccttccgctggcttttctaataactccctcttacagatatgcatgcctcatgtttgttaataaaattgacgtgattttaatatctggtattttaacacactgtgaattatggaattttcagtggctttatttaattaaatgcattttaaaatccttacaaaaaaatattaagagtaactctaaaatgtattagagccacagatgttttcctttatagtgttaattgatttaaggtccatcaaaatgctgttaaaatgtctagaggttaacaataacagtggcacatgggtcagattaaaattctttttgagtaaaataaataaataaatgacagcttattttcttctgatttaaaaaaattagctagtggattgaaacaacaatgtgatagctaagatttcattctctcactttataatgaaaggagatttaaaattagggattatatggtacacgaaaaatttatatacacagattacaagtactagtttttttagtgaagaaaakacaactatatattttctctttttatctgttgtcctattttacaattgtagcaattaatctgccaaactctttaatcaataaaatatggtatttaacaaccaaatttggcccctccctccccttaaatatatttccaatgctccttgctccattttaaacctgctgtcctttataagagaataatatattttgtaatttgagaaaatcatgcaaaggaaagtttctcaaaattcacattaatatgtaataatagtaataaatatgtataaccataatatcttagaattttacaatattttatagaaaacatgaatattaaagtgaaaatttaaacacatcaatttttcatgttaaaattactaagaatgaactacagattcatgaatactaagggcaacttttatctcaggaaatatatcagtggactgaaaatgtcaaatcaattcaattaaatcagtaataacactttgctgtttatgtggctgttttttcttctatttttattgtcttagattgcatggatacaatcaaaataagttaatttgtatacaggatataaatggaccagagaatgtgtcttctattaaataataacaaataagaataccttttattttgtgatggtctttactatttactgagagacaagtattgttcaagttgccgkttttttttaattagctgacatatttcctgcttttatttgagttagaattcctgtaccaaacattttaaaaagagaaaaaaaattaaagaaagagaaaaggaatttggaaactactataatgtaaagtagcattatttatacaacaattaattttagagaagcaagagaccttagaaataatctatttcaacgcatctattttacaaaaaagaaaattgaaactcatagatatttagtgacttgtcctttgttacaccaaaaatgagggaacttggtctagaattcctccagcatattatgaggtatttgttctgtggcctgatacaatgaaatgaatgttggattaggcattttgggacaagttttgaatcctaactctattactaattcctcttcactagactgagattctggtatgtggtattcaataagtgacttgacttctttaagccttggtttctttttcagtgagatttacagcttagactagtttctgaatcttgaccctgtggacaatctagttggagaactgagatgacctgggcattgtaggatgtttagcaacattcctgcctctgtaaactagacacagcagcacatttacccaacctgctctgactgtgacaaccagaaatgtctccaggcattgccaaatgtcaamtgagggcaaaattgcctaccctagccaccttaactgaaaactacaaacttcattgaaataatttctttatggctcccagcagtaacactgtgctattctagaccagttggttaaactactggatgcttcatcagaaagcacccactaagcatcactcaccatgaagttcgttgggtactctatacaatgaacaaaggagataycacataatttttaaaaaacttaaaagattcacaggtgagaattttgtagtaacaattaagtattaactattagaaaaatttaagaagttttaacaaaatgatataaaaatatattcactataagtaggatgtaatttttgtcctgtaagagttatccatgtatttacgaattgtacctaccagaggttacaaaaatttggtcattatttgaaagattaacagggacttatttccaatcatagatgttcactatactattctaagacatttgcaactgtgtaaggcagtcatttccagtaagaattgctagaacaaacattaagcatttcacagtgaaaagggtcataggtatattttcatcctttgcrtatagaagaaatagcaatctattattctcagtttttgacttaaaaggtattgttgcttccctttctttccctcccctactcaaktttttgcccatggatccagatacctacaagggcctaatacagggaaagtgcactgtgtatgagctatgaaggcacaatggaagcttgcctggcaatcagtgccagaacagacagctagtctgatgaattctgctacacatcacagggctactagttttttkttttttkttttttttttttttgtcatacattactgcaagttccctgaggaagtttactgatctgtagttttacgagaaatgcacgtcatggaggtggcgtgggggagcgggtgaacaaggaaactttagttgctataaaacaggagctgagagctcaagcaggttggttatgttctgccagatggagataaaactgtggcagccacatcctgtgactagaaattgtttaagtaggcagacctgttggaggactaaagaacattaggcaaggagattaaattagtgtaggaaaaaaaatcagttttgtttaaaacgaaatatctacttgtgttaatagaacattctaactccaccataggatggaatcaagaggttttttttttaatacatatagtgtatatatataaatatatatatacacacacacacactgtatgtattcctatgtagattaaatattttgatttacctctttctagtaaagcaaagttcattctgaaatccaaaatattcacttactagagcagaaaaaaattagctgtgcatttatgctgatcacagtgtagataattaatctttaagaaagtaggtttttmtgtttatagttgataaagtgttagtggcaagaactttttctgttattgaatattatcatcagattactcgtgctttccattttattcctttaaaaaaatccaacttttgtaagccaccactattttctgaagattttatttctctctaagctaagaaaggatgtcaagaataaaccattttctccttttaaataaaaatgcattcactatagatattcatttgaaatctcaaacatacctgaattaagtatactcagttttgtgagtgaaaattaattattatttaaaacaaaacaaaacaaaaaaaatgttcagtgttttcattttacttctcttgctgcttttgggctctgactgggcccggaagcagaagttgcaaaacattatgagaaaacttttgctcttttcttttttttcttcaatctccacccatatggaaataccagaaatctgaaaccccattcttgctaaatattcttctcaggattgtatctctactgcaggtcttctatgacgttttacagctggcctctttccattcagaattgctgttcatctttgaatgtctctgctttactcctgaatgaacacaaacacattttttttaggtttcttgttgacattggctttctttatagcccataaaaaatgcatttgtggcatctcttccacagacaaaaatagtataattatgattcaatactcgatgaatgtgtgttaaactaaactgtgcccaagctctgtgcaacagtacaggtttttcacctttccaggggagagatgtggagcacatatacatttcagccatcctacatgcccacagggacatctttctggtctgtctcattggaatacccttccttatttggtttttagtttctttctgctttaagcacctttcagagagagagagatgttttcctttgtctttgtataggcagtgcctatcgttacagagtagcctttaaatacatatttgttgaattaataatgatacacatgaactgatgaggctctataattctatgagataatctggtatcgtgggaatattttagcatgttttgtatagatagactgacactatgactggtaatctgatagtaaaaatggcaaaatattgagcctgagtattattttattatgttgctttcttatacaaggagggaataaaataaagtgatgtggactgtaattgtgctcatgaaagacacaatgtatacatacctccttgagacggaatgataaggataacgtagaatgtttaccatgatttatcartctctcctatataagaaaaatatttcttgtcctgaagtggtaactttggtgaagtcttttgcttgctcttttacagactaattaacaagttttctatgccggctctgtcctttcctctcctctcacccctgaaaagtggttaaaagtttggcatttgttacccagaatactaaatgtaacacatatgtggcaagatttgatggaattgcacttctgttcttattatgttcctttctggaaaattatgacaatttgtgtccccttagagagtgtagcacagttttctggttgctcctcatgataatccaaaaaaaaaaatccagctaacccttaccttttagagtaagaatctttagaagaaagagtgctttcatcaaatcatttgagaacgttaagttgaataactgatacggtactaccctacagacatgcgcaggaagtatctgcatttctgtggcgttctgctaaggaaaagaattttctttccagacaagatttttcaaaatcatattttaaaaatatcttaatgatgaatttgaagttgagaaccaacttatttcaagtaaaattaaaattttgagagataagagaatatactttttttaaggttagaactcagaggccattatgacaattaatgggctagtggagacacctggtctctaagaaggagacaccagcttcttcatgttttgatttctgccttgttctcttgtctgtcaccactagacacatactattttatagtaattacttgcatattttgtagaaaaggcagctgtgttttctacaaatatttcacaaatgttagtattgctctatgccaaggarcagaagacaaatttgtggaaaagatacatgtggcccctccccaggtgggatttcttgtgtaggccccatgcagtggagggacagagggggccagtgctcattttgaggacacgatagttcggactgtctgaggaaatcsacagtgtgtgtttaatgaccaaaccaacatggctttgaagaatayatatatatttttttttttgctttttttttttcrttgcccaggctggagttcaatggcatgatctcagctcactgcaacctacgcttcccaggttcaaggaattctcctgcctcggacttccgagtagctgggattacaggcatgcaccaccatgccttgctaattttgtatttttagtagagacagggattttctatgttgttcaggctggtctcgagctcccaacctcaggacctcaggtgatctgcccgccttggcctcccaaagtattgggattacaggcgtgagccactgtgcctgaccaagaatatttttcttaatttttctgtaaaactagttgttttagttttcaaagaaagatattttggtagtttttctttaaaatgcatatcatcatacagaaatcattgtccacgtatatggacatatatatctatataaatagattatatctatataaatatatagatatatttgtccatatatatgtccatatatatatatgatcttttttttgatatagtgtcctagacctggaattcctgtgttaaaaaatgaaaacattttcagtctcttcatatatattgacaaatggctttcagaaaagttgtttcctctattctcttcctaacattgtatgagtttcctttcacatacttttgtcagagtttaattttatcattttcaaaagtgttacttttataaaaactggtatttcttcaatttaccattttgtgattaatttaatttttactgtgttcagggttttatcatatgcttattatttacatttcctttgtgaattgtgttcctatgatttgcacatttatcttttgtgcagctgtgtttaaattttgaatataaagttatatgaaagaggaaatatgtaatttacataaacacacccaaatatatgtgtgtgtgtgtgtgtgtgtgtggtgtgtgtgtgtattctgtgttgaaataaatggtagaaccaggacaacaggtagaggttatgaggttgtcatctgtgacacagtctagaggagaaactgtgtgggcatctatcaacttacctttttgaaagaatcttaactattagtttctggaatattcagagaagacttgtaaggccaacatggactctagtttccatcctcctgagaagacattccattatgaaatctaagtaactttgacagcaaacccttcagtcttatcattttcattagataatctaccaccaacacaatgatccaaaaatgcattatattcttgcactggagttcttcactttttgcttcaccccaaaactgccgctcctaaccacatgcttagctgctaactttcacaccaggcttatgagaacagtattttcagtaagctctcttttcaattcctttcacaatggagctgcagaatctttgagttgaaagaagccttagaggtgactaggatcaatgtatatatatccctcttaccacacacactcactgaatattttctaaaaactacattaagaaaaaaagaaaagcctaatttagtgctgaactgctgaaatattttgaaatttgtggtttcaaaatcttaacactgttaattgaaaccaatgtttctcatgccttttagtctctggactcctttttaaacattcttaaacataaacctaatttttagcataattgtggaatataaagaggttttgtctatgtgggttatatatatttattgtaaaataaactagatagaatttwaaaatatttaattatttattaaataataataaatcaatatattaatataaatagcacatattgtatgaaaaacaaccagatattataaaacaaagatttaataggaatagtgtcacttttttgcatttttasaaatcttttaaatgtctgtctgaataatagatagctggattctcatatatgctttaatattctctatctgttgtaatattatataccatatagtttctggaaacattaattttctactaatgagagaatgagagagaagaagaaaaataacttcttagtactgttaggtaaataataatactcataacacttaattaatattattttgaccttgaagaatctttaaaaggttcttggggactatcttgagtctccagaaaacactgagaaccactgatacgccaacaagataaaattcttatccttaccgcagcatggaataggaccatactttcttccttataataatacttcaagtatttgaatgtatttattgtattttcatctatactattattttttaggacaaaatagacttctttaagttttccgtatttgacacattatcttgctcccttccccactacctacctccggttagcctcctctgaatactcttggatttcaatttcatttataatgtgtgatattctggactggacacagcacttcagggacctggtatcttgaatcaacaaagacttgtcttccaaacgatggtgattaagaagccaccatgtccaactggtcagccagtttttatattgtacaaatcagcaatctcagagtcaacctaaccagatttaggcaaggcacttccatgatgtattgatgtattggctattttattaatagtaatatcaataaaaataatcattaagataactgataatattcaggacttcatatgtgctagatgctatgtttaatgcatacatttattcactcttctaattcttaacaactttataatgtatatgtatttcttattcttattttatagataaagaatctgaggcatggaaaatgtaggcaatttatttgagattacagagctaataagaggcagagccaatgtttgatctgaacaacttgattctaggatcattttggctgggaattttctgagagctgtgtgtgtgtgtgtgtgtgtgtgtgtgtgtgtgwgagtgtgtgtgtataaacatgagaccatattagtatatacacaaatgtcaatatatattttaaactggaatgttttaatagagtggcttatatgatagaaataagagaaatagaggaggatggaaagggacaaaaaaagggaaaagtaattaggaatattgaaaaacctaaaatgtagttctctccatattctggatactcctgcctttttcttccactttccacacattgaccagtattcctttctcctttcctaaaatagttttacagatactatagatacccttagctatttgacagttatgtttctgttcttttaacatgtctgcttctataactgtcacacttaaatgttttcataggaatcatgaaaactatagtttttcctccaacgtaaggatctcatatcacgctttcattctgaactaaccattccctctctgcagttgatgtaactgtgccatgtgaccattgtacmcatgtgggagggaggagctgaattacgcctgacccctggccagagcaagagctactggccaaaggggagattgagcatctgtgttgtacttcccacgtctcttcacctaggaagtgcaatagatttctgacgagtctatgattacccactgatgaataaagacaatctccctgcacaattgcactgcaggcaagactgaacttatgaccaccacttctgtgtaattttgaatttcttagacctgaaccctgctgagtacacctgcttccytctattccttgctgaagttcattcttttcagtgcgttaatggagccaaaccaagctggtggtggtaacaatttgaataataatagtctttaactttttatcttttgaaaaatagaattctcaggagcacttttagctataagattccttcatccaattaaataagctttaagcttcatgaaaagtgtaaaagggcacaggtgcatttgtggaaatagaaggaagcaatcttgagcctgaatacattgaggtactggcaagcttctggaagtagttgaagaagacttcagttagaagcttggtcaaatggacaaagccctgacctggacattggagacctgtagccaccttctgaatccacagctgacctagtggccttgatatataatattgattgcaggatagttttgtgatggttaagattgcaggctttaataactagatttcttggatttaaatcccaactctgccacttactgcttttctctgggaagagtgattaaccgctttgtgcctcagtttccttatctttaaatgaaaataatttgagtgcatacctcacaggtactaaagaataaatgattggaaaataaacattattgaatatatgttagtaattattattttcattgttatgctattattatttttattattaatgtatgacatcatgttacctgcctaacaacagagtattgagacaaaagcaaaatattttttctatattaataatcataataaacaccactaatgtttccaaactatacttttttttaaccctacatgcctttagttcatggaaagaaaagtatgttaaagatgctatgggggtgaagagaatgataaatattattatttaagacaatgtttgctataatttttatatatcaaataagtttatatgttctcagaaaattggtctttgaataattgaggacagtgtgggtttttattctgtttctggaaggcggtgcctgtggctgtgagaaataaggaacagaccatcttcccacatttgagagggaactatacaaaaatgggaaaatatttgttttaaatatcttttggatgtgaattttgtcataattgcaaactgttttggcagcaaaacgaattatttcggtagcaagaagagacttaacgatgctatgtgggagaaaaactaagtccctactatctttctgagagcacgtctcagaggacatgatgtgatcctgtaagtttgtagcaatcttattgtgccccagtgcagacactccttcctacttccctgtagaaaacagaactgtttttttaaaattctttctcaactaccatttttaatagtcatgttacttgatgacaaaatctgatacagtggcctttaatactatatagtgaatgatttttgaaaatttggaaaactctaaccgaaatataccaggaactgctctcctcttcatctcagatgtctacttcctcttcagacctgtgtgtgaagctctagaataggctgtttgggaagactacaaaatctcctctccgaggtcccttataaccctgatagttgctagatttgaaatcaaggatttattctccccctgccctgagcctctcccttatgtccacataggctctagcattggaagaaatattttaagatctctttctttttgactttgtgatactcccatattaaaaatggcttatgacaggaaaaggacaaatatgctatattttttcccttaaggctaatgttctcgggactaccatgaaaaatccaggtatcctaatctggagggttaccctttggatctgaatgggattggagtcagtacaaggggtggggagtgtttttagaacatcccggcagcmtttttttttttttttttttttttttgagacggagtctcgctctgtcgcccaggctggagtgcagtggtgcaatcgcggctcactgcaagctccgcctcccgggttcacgccattctcctgcctcagcctcccgagtaggggggactacaggcgcccgccgccacgcctggctaatttttctttttttttttttgtattcttagtagagacggggtttcaccgccctgctgccttttaaagcaatttaatacatgagttaaatatcatattttaaaaatagattttattttttattataattttgatgaatgcatttttgtcaaagttgtcaaagtcaagaagtcattattgagaccctgagggtaaggcaggagccaagtgagaacaagcagatgtcaaagatggtgaaaaacyagaacagccaggtcccccaggcatatacagagaagttttgcaatggcaggtccccgtggttgtctgacccagacttccaccttgaggtaactggggtaactataacgatattttcatcctgatctcttcatgcagttatatgtttccaagaacagataaactgtgaacttaatacaagtgtctcctttmcttggattctcaccatctgggtggtaaacatgacagaaacattcaagtatgttcaatgtagtacatggtaacaaatgctttagcacagactagggagcatgtctggcaacatgttggcaaataattaaattggcacattcaggataaaatgagaacatggaaaaacagaatatgattctcttyccagccctggaaagacatcccaagtgtacgtattgtttatattatgttattagtatatctttaccagcaaagggcaggtcatcatcattcaatatgctcaaatactcacatttaaagacataggcactttgagaggccaaggggggagaatcacttgagcctaagagttcaagaccggcctgggcaacatggcaaatcccatctctacaaaaaatacaaaaattagctgggtatagtgcctgtggtcccagctacttgrgaggctgaggtgaaaagattgtttgagtcgaggaaatggacgctgcagtgagccatggtcacaccactgcactccagcattctagcctgggcaacagagcaagaccctgtctcaaaaaaaaaaaaaaaaaaaagagagatgtagggagcattgtggacatctattcatggagggttaaacaatagaattagacaaccatgtgtatgtgtggaatcatgtgttttttccacacatgtaggaaggagaaggtaggaacaatgaaaagattcttttagtgatcatagtggctccaaaacagatgctttggtatatgtaatacccatttatcttataaagaaaataaagaaataataaaagcatttgctaaccatgttagatgctatagtaaatgtaaaaataaagggtctgttaatmtattaactgagcttaatatatgatgtgatataacagcagccttcaaatatgcggagggctataacagagatcatgatgaacagacttttattctggcttagaaagactagacacagaaattaaaggcataaattactctacaagcaaagcaatcttaacataacactcctttcaaggtagactatgaatatttccaccaataatatatttattaaaatagattccttttcatttgtctttttaagttaaacataatcttgcttgaatgaggatgagtataagatacctcagtcatgaccttgtagatcactgcatcagccagctttgtattcagctatcaaacaaaataaaatgtgatcactagtggttcaaatacattggagttctacaactaaagatctaaaggaatgaaatccatgactagtacaaagacataataatgccctaagcaacttacgatattttgatgtttcttttctgacaccccattcgataggcttttgtcttcatgctcagcatctcctatctcatttgggatgctatgcgtccacacctttcatcacattccagcaaaaagaaagggaaggcaaagtggtaatatatttttcctagtgaggttttgcctctttattcagggatggaaaccttccccagaagcttttgtctacacttattggccagaaatttaacatataaccattcattgctgtcagaggtgggaaggagtccctgagaaagaaattattcttgttttccagcctctattgtagcatttaacaaggaagaatgggattatgaatagctttggaatgtttatcatgtcttctagttgccatagctcatagtcattttatatgattgaatctatattaggccttttatctgacaagtttcccaatgtacaaagactgaaaaaaaataattttcctcagatgggaataaagaatgtcaactggtctggccaagtgagtttggaaagctaagatttagccttgggtgcattattgatggacaataaaggagtaggtggcactcatccattcattcagttattctagctgtgctattgaatacttgctaactgcaaagcacagagctagatcctagtaagaatatagaaaagaaagtcacagtctctgccttgaaaacatatttattttatttctaggacaagacatctacacatatacaaactgtcaattcataacatgtcatggaaacataaaagaaggtatcagtgaaagtggagtgtttaaggaaatttccatgcagttgatagaattttaatcctataatttcaataggtagtagctgtgtctcaggcattctaggcagtgcacagcaagagaaaagattgagataaagataaaaactggaaagaagtaggcaatcagtcatatttctgcaaagcaatgttagaaaattgcatgtgttagcttgtatacacaacttagcttacaatgttagcttgtagctaactgaatacagatgtgagagttaaaatatactctcctaacagtagaataatgattgttagagtggcagggatgatcttatagaaataaacattggacaaccagcaaaaacagtgaaagccagccatatggctatctggaggaagagcattccagctactcaaatccaaagtggtatcatggtgtgatgtctttttttttatttttgttttagagacagggtctcactatattccccaggctggtttcaaactcctgagctcctgtgattctcctgcctcagcctcctgagtatagtcacatgccaccatgcccagctaagttatatataaacataagcacagagtaacatggtagcaaaaaataatgtcacccaaattagggttttgaagacaatacaggagttagatagataaagaagagagggaagggcataacacaaaggaacaggaagtattaaaatgtgcgtgttatggacttgcatacaaattgagtgctttaattttgccaagcatctttcataacactataaggaattaacagtatgagatagcataagtaagggggcctgagaacttacataaacacccttggtacatggaaagtaaatataaaatggtgctgataattctaattacatagtttatagaaaagatacatgaccaagcttgaagcaagaatgattgataaggaattaggtaggttctktataaggaaaggtgatttcagatcccaaaagggcatggctgaatgtttagcctttcagagttggggaatccatttcttcctgtggaaggattagtctttaggtgaatagataygtatcgaagggaaattaagagagcataagaaaaccccactttacctgccatctatccatggaagcagcaataagaccacctgagagctatggtacaattaaattgaagatatttgaacacataaagtaggtgtaatgtaacatataggctcaaacatttgaaagtgatgatatttggtcattgctggcctacaaaagaaatgattttatgtgattcagtctaatggtaatagttacaaaggattgacttcttcgcaaataaaatggttgaaatagtacccaaaactagcagattgggcaaaaattacaaagaaatatctaagtggttgcatagtaaccacaaaaatgaacacacttattttcagagttcaaaccgtggtagatttgagagtatgtttggaaatgactaatgcttagtgttgtttaccctgtcaccacattcctgcataaggctctttatctctgactggtcatgctcacatctgttttctgccagccttttctggtgcccgcaggcacccacctgcacccaatgtcctccttttatgctttctggcctcctttcatgtactgtgtggtccaccatactacctaatctgctatatactcacaaaactatttacttcttttgaaaaaaatgtattattagatttaaatawatgtatttatatttcccttcactttttaaagttttcactttatttttatactatgttttaagcttccctaatatcccactgctgaatcccaccgacatggaatccacggcatggtgaatccctgacttacccattcctactagaagtagagccagaatctaatccagacctcctgccagccactcccagaccccttctttcccccaaagaaaatgaagaacatattttttgtgcaaagagatacaatcaggaaatttttttaaaatcagcttttattttaactgaatagcttacttagtcctggggctgtaaagtcaactgaatgatggagtcatttttttcaaaatgcgacatcttcttacccacttctcttattactctcatcattatgaaaatcacatttgtgaaaggaaatgaatttatatcaggttttctttggcatcacccaaaggaccttagtaaagaaaattaatactaattttattttctattgtgagcaccttaatacggaactgtaagaataattactatttttaatgccaaatgaagcatgtaagtattactagcttcttttttgtattaacttctatacttatctcaggagtttttatagtgatatagacattttgtgaaatagatcatgagtgaaacatagacctggtatagcttgactggggcctactttacagatttgtccttaagtactgaatataaatgtttctgcttcttattttccttagcatttttaaagaaagtcctggaagccaaaaatctccatgatgaaatatttataattattaatcactgttatatgaccttattatgtatgaaaactatattcaacatcctaaatatgaaatgtgattagttctgattttaaagatttgtgataaaacaagacaccattgatgaaatacatagaaaaaggaagacaaaatagcttgggacacattaataacttacacaaaaaawtttaaaaattaaatcttctaatagatttgatatataatataccccagaaatatttacattatattttcaaagtctagagcatttcttccatagactccaaaactatttgtatatattatcatcgaaacacaattttgagagaagttggaatggcagtgcagttagcagataaaaaaaatacccacttttctttacaagtctctatctaattcatactccctattgctctttcctgcttcacaaacttcttaaaagattttttcatgtggtgtgaatatttaaaatctgtcttagcaattttcaaatatacaatatagctggccatctgtatttgtgggttttgcatcctctgattcagccaaccatggattgaaaatattaggaaaaaatgacgaaatacaacaatacatcataaaaataatacaacttaaaagacaatacagtataacaactatttacatagcatttattttgcattaagtattataagtaatctaaagatgatttaaggtatatgggaaaatatacttaggtgatgtacaaaaactttaatcatttcatagtgtatacatatatcaaaatgtcacattgtaccttataaatactcataatcatttgtcaattaaaaataatttaaattttttgaaatgtaaaaaaaaaaaatttttctagcctcccagtctacactctcacttttcactaacccatttactgctttcttgcttgttctcccagcacaccacaaaaacaacttccatgcatacaccagtatcacccccctcacccccctgtttccaataaattaaacccaatggaccaagctaaagcatttattatacttcacctctcagaggcatttaacgctattgacaacttccttcttttcaaaaccctgtcctcccctaattttcatgaaacatgaarctaccttctagttctcttatttatctcagccatctggctcctctttctctattcccttgttacctattggtgttggtatgtattccattctagaactttgtctcctctactgtgatgctatcatttagggtgaaatcaactactcccattgcttaatttgtcttttataaatttgtgacttctacatctatagctccagttctgctgtcttttttgtattaaagaccaatttctccaactatgcactagacacttccaactagtatcccactggtatctcaaattcaacattattgaactcaaaaacttcttttgttaacttgccttgctgtcatatttcctgtattggtgaattatatcagcttccatagacttgcctgagccaatataacctaggacatattctccttttcccttaactcagcattgactgacaaagaacatgctaggaagtctgtattcttcatgtcttaaaatattcacctctgcttccattgccacagctttgatttgggccactcacatttctgcagtagtctctgagattgttatcatccatatctctgcatttttcttgctaatgagaccttcattaaaattattttgtaagtatttaattatttagcagttcatgcctttccatatgacttaaaattccattgggttttgcttttttcctgtaacctaaagttacatctgggttggtcaaagtgaagcatagtaactacattccctttgatagtgctgcaattaagaccaatgaaatgtgaaggagttttagggaagctttttcctcagtcttaaaaagagacaaaaggaaacaatacccctctcctgtctctggttcatatttgatgagaatgtggcacctagtctttttgagaccagtggggtagttaggcccacaccctgtggatgtcagagcaaaaatatggaaggaatctgggtcctgataccatcatcaaaccattgagctaattccgttttgtaagataataaattccttactgtttactctgttcgagttccttttttttctgttagttgtagctgaaaccattttaactgttgttttttgtttggtttggttttgtttaatacggagtcttgctctgttgcccaggctggagtgcagaggcgccatctgggctccctgcaacctccacctccagggttcaagcgactctcctgtctcagtctcccaagtagctgggattacaggtgcacgccaccatgcccagctattttttttttttttgtatttttttgcatttttagtagagatggggtttcaccatgttggccaggctagtctagaattcctgatctctggtgatctaccaatcttggctacccaaagtgctgggattacaacccactgtgcccagcaccattttaactgtattctaaaagcattttacagcctgctaatacataacctcatctccaaccttgcttcctaagttccactctgtgttccacaaatgggattaatcacctactgaaagctctataataattcctgtcacctgaggatattgttaaaacttctcagtttgtagaagagggccttcattatcagcatcacatttattttccagaaagatatctagcacccctctaccttacatcttgcttttcagccaggaagaacaactttttctttctgaaatgtactagaatctcagtgttgggccacattgcttttttttttctaaaagactaatcgtcttcctttcccacctaactcaaacatatccctcttaacttagacattacttattttggggaagtcttccatgattaccctaagaatagggtaggcattctttctctctgcttccatagaaagtaggaaactattgcacttactcattgtaatgtggctatattttgatcaaaataattaaaaaatactgtgtggattcaaatttttctcagctactcacaagctgaatgatctcacacaagttatttattgcaccttattgtgctttctttttctctgaaatagaggtaataattatacatacttcatattattacaatgattcaggaagctaatgtatatggtatacttacatatatatatgacctagtataacgcatgatacataataagtgctgtgtacatgctcagtcaaataatggtcatttgaaaacatttattgagtaaatgaagaggaaagtgtttattttcaatacattcaaagatattgttttggttatttccattacagaggcataatcagtttactattcagaaaaatgcaagagtacatttttactgctcctccagtgatactatggaaaacaatgttttagaaaaataaagaaggtgtgaataatgattaaagaatcatacactctcaaagtgaaacaatttcccaagaaatgcggtagaataagccttttggtttctgattttttttcttaactttgcttgtatgttgtagaaagctaatctaaatttaagaaattgaaattttgaagtattaataatgtacttctctcccaaaattgttttaatgtaatgatttttgccatatggatgaattatatatgcatctagaggctaaaaaccataaaaacaagcttcttcttagtagacttttgttgtttattttgtacagcataaagcagcagtcaaaaagttttccaaacaaattatcttatgtattttgactaaacccagatttatcttcttaaaatgaagacctttgttgtagttgcatttgttcctcatatgcagtagaatgacccagcctctttggcttagaggtagtgcctcctttttacgacacttggagcggcatctgatgctcatcacttcagttggataaggaatgctgtccagtcacagagactcatgagatcatgtccaatgaaggcatttaacaataaattcacaactagtgagtgagaattttataaagcagtttcaagtattaagtagataggtaggtaagctttattatattttttaaatgtgaaattttacaattgtgaaaatttacaattttacaattttacaatgtcaggatggataacattgcctttttagtaatggtagccttcactatctgcattatgactgtacaataataacatataataatatatatagcatatatattttatatatataacataatatataacatatataataacatataattataacataataactggggctatgattgcaaacatttataagatgtggtatgaaaatgtcccaatcacaaaaacactcaatttaaaaatgaaagaaaatgaatctatgctatgctttgcttcatctttctctgaactagttacaaacaaaccttttaaaaataagctttcaatttgggaataattttagatttacagaaaagttgcaaagatagtaaggaaagtccccatttgctcttcatttggcttcctctaatattaacatttgccaaggttacatttgttaaaactaagaagtaaccatgggtacaatgctattaaccaaattacagctttcatttgaattttgcccatttttccaatattgttcttttcctgctacagcatccaatctaggacctcatgttgcatttatttcttatgcatctttagtcccctaggatttgtgacggttttctgtcttttttcttttgaagactgttcattgcctctgttagtttaatgatcctctgagatgttattcacagtaaaatagcatgtgaatttcacctaactaaaaagtttatttgatccaaagccctgattttaagaatttgaaagaaaaaaatgactctatttttcccagttctaaacattttactagaataataattgtattctttcaacatggaattaatgttgatgagaagcaaacatctaaatttaaaagaaaatatagtttgttgagggaggtaatagacaataaaatgtatttattatagaaaaaattcccaaaactttctcattaaatgtgctttatctttacttcattactaatatttagcttttattcttttaaaaagcatatgccaatgataatatctcattaataataagaatccatctaattttagcttgatcttccccctgactaggtttgattggattaaatcatcataaagagacaaaataatgcaaaaagtgataaatctataagcctcccctaaggtttcccatagaatgatcaacccaaatgtgctctttattttatgccatgaaatgacatactgtgtcaagaactgaatttcatcatacatgagacgtaagactatttttatatctctgtaaattgggtatgaattataaaagtatgctggtaaactgatcacttgagaacataaagtcaactttccctggaagagtttctcattataaaagaaaggcaagcatcttcttcctaatatctagctttatcaggtcaggggctatattctcggaagggataagtaatttctgttgtatctactaatttcatttaaaaagataactagagaatattggaagcattattgtagaactgtgtcaaagaccgaaatatcattcctaccttagactgtacctcaagatcgaagctctggatgctatctggaattaaaatgtttgcattaagtttaaaactcagtaaaataaatgtttgaaatgaaaaccagaccaataatgaataattttacttagacctactctccaaatgtgctaaaagacttgtaaaagttgttgttgttttaataactaagtcaagccagttttatttaattcaatacatggagtattaatgcgctgtatgaatgccgaaggtagtattggacgccacaatctttaggaaccatgcttctgagttttaaaatggtgactagtttagcatagattcaacataagcattaggtgttcttttgacatttgggaatcagccaatcaacaggaggaatagtaaattgaatacgaacttgaaagagaccatgtctttttttcatccaactgtgaaaaactttctttgtacaattgttaaacttaagaaacagatggtagatctgtatcagtcagtgaggggtttctgaagtacttttctggatgaatgccaagaaaatgggtttctgagacttgcatggctctggatttgttctgagctgtttagtgaagtgagggctggcattcagaacccaggggagggggagtagtcattcccattgccttgcatagagatagaatcacaggtgacaggtcattggaaaatcacttcttgagagtgggtatctttattttgagttggtatctttttgagagttggccactcataagccttgcttttgataacatttctttaaattcctccaaggaacaaggggaagtgcaaaaggaatacgataaagtgcagcattgaatgagataagcatattcaacttaaggggcacactaaatactgtaatctgggagcataactcagatttcttttcttctttgctcagtataagttgcatgatcatagaagatttatgtagaagtcagaaatcaaggtcaagagggtaggcatatttagattcttaccctattcataattaacaataaaataagattttgtgtcctgattcagagaatggatggctcagtccttataacctcttaaattagttttatctataactggatttctgaatctcttttgaaaattactaccattgatggtcactgagtgaaaaaagcagaaggatagactggtgttaactgtaatgaacatttatccaacattacccgtgggcctgctatccattttaaattctaaaagcactttacagcttgctaatacatagcctcatctccaaccttgcattcctaagttccactctgcattccacaaatgggattaatcacctactgaaagctctataataattcctgtcacctggggataatgttaaaacttctcagtttgtgagagagggccttcattatcagtgtcacatttattttccagaaagatttctagcacccctctaccttacatcttgcttttcagccaggaagaacaacttttactttctgaaatgtactagattctcaatgttgggccacattgctattttttttttttctaaaagactcatcatcttcctttcctacctaactcaaacatatccctcttaacttagacattacttattttgggggagtcttccatgattaccctaagaatagggtaagcattcttcctccctgcttccatagaaagtaggaaactattgcacttacacattgtaatgtggctatagtatgatcaaaataattaaatctaaacaatactgtgtggattcaaatttttctcagctactcacaagctgctatccattttaccaagcctcctgcatgtattactatgtctaatcctcatatcaactcatatataaactagattttatgattatggctctaaaaacaaggagactaaacctcggaaatatcatttaacctgtacaagaccttacttggctgagctaggattcaaaactaggtcattccgaggagaatataaagtccagcttttttttttccacacagggatgtatatttccaggtacagttttacattttgttctttattgtatgaacataaatatagatacatatgaaaattcgaaagcacatgaaagtgccaagaggaaatgcaataccatcttatgaaatgagaaattacacatatcttacagtgagtttcaaaattatattgctcaaagtatttttactgtggaaccataggcacaaactatagcaagagtaaatccaaaaatgtttattgttcttctataaactaactactgtgtaggatacaagggatgctgatttcaccagtgcctttaagaaggacaaatcaaattaaaaagtcaaaatgactgaaggtgataatccagatggtggtaacaataatgactaccatttatagaactttttgatgttgttcactcaacgtttctatttttattcaattataagcaaacagcagaattaacccaacattcagcaactccagatcagcttttcttacccccatgaagagctatcaatttaacaaccacagttgtaaggattcttaataagctgtcaatgagcactgctgccggtctagatggccatgccccaacaaaagcaaagccactctccctaatgctttttccaggattgctttttaaaggcaccagagcgagatactgacgcctattaaggcatctgagatgcaccgtgttggggtttagcctccatgccagccagcctctggttgtctaggtgagcgacagcaccataaaaacacgctgcgtacaattctggtattaggatcacaaaggcagagaggtgacaaatcctttttctttttctttttttttttgtaacctcccttaaagattctttgatgctttgctctattactgtgggcctggtctttttttcccccccagttttttcttctttaaactctggattgctattttcatattaatttgatgaccccatcacagtaccagaatattcctgaaaatagagttccaatttgatcaaaacataaaccagagtgagtgagtgagtgactagaattataaaggccaggcagcaggaaaagttaccctaaaccatctgactgctcaggtcttgcatgtgcaaaggggagccggaagaggagaaatctattatacatgcaacactgaactggagaacacggcttggggcctctgggacagttcargtccctgagctgccccctacttcccagacagctgctcctgcagtttgggcacatagtcgtcccactcagcctggtaacgctttctggccactggggccacgagcacgagctcgtacttttttttttttttttttgagacggagtctcgccttgtcgccaggctggagtgcagtggcctgatctcgcctcactgcaacctctgcctcccgggttcaagcaattctcctgcttcagcctcccgagtagctgggactaaagccgtgccaccacgcccagctattttttttttttttttttttgtatttttgtatttttagtagagacggggttttaccatgttggccagcatggtcttgatttcctgacctcgtgatccacccgcccccgtgatccacccgccccagcctcccaaagtgctgggattacaggagtgagccaccttgcccggccaagctcgaacttttgacagaaggatgccattttgaatttgccactgtggcctccagatccattgctgaggatgggctcgtcacacttcagcagcctgtcctgtttgtaaaccagccagacatagcggtggagatctgtgccctccggaggcccgagcccacgtaatggagatgactgggccactgctaacgtcattacccttcatgttgaccaccaggaaatgacgccattcagtgtattggggcttcttcctgccgggagcgtccgggtctgttaggaccaaggtgtagagtttccttgactcaagatcatcccatgaaatgctggtgggtctgttaacctaggtgggcgtcagcactttgcccagctcgtccaccgtcgccctggcgtaggcgacatgcagcgagtgctgcggctgcccgtccacttcctgcaggctcaagggcctggaccgcttgctgaggtccctggcatggctgtgcaagaacgcagcgcgcagctgggagtgccactaggcaaggcgcaggcgcagcggcgactcggcagcctctgaaaactagccagggaagccggggctcatttataggattttaaaaatattattaaaggcttcacaaactgtcttgtttaatagccacaacattgggaggccgaggcaggcggattacctaaggacggagttcgagaccagcctggacaacatggtgaagccccgtctctactgaaaatacaaatattagccgggtgtagtggcgcatgtttgtaatcccatatactcaggaggctgaggcaggagaaccgcgtgaacccggcaggcggaggttgcagtgagctgagatagtgccacggcactccagcctgggccacagagcaaaactctctcagaaaaaaaaaaaaaaatagatacaacaatctccttttaactgaagaggaatgatgtaaagttatataaagttcagaggaattgatgtaaagtgaatcgtaaagactttggaatctcctactaaaatattttaacaggaaagagacacatcagtgcattttacaagcagatcaatgtggcggtatctagcatgcatggggaagggatggaggaagttgtcagtttagaaactgagtataaacattattgaaataggacatgataagtacctggaccagggtaaaggcaatggaaaggaaaaggaagccacagaccacagataggaggaattcaaggactgtgtaccgaaattcaggagaatgatgtgaaatagatgctctgaatcctctattcccaggaggcagcattatggagttaggagaaaatgcaggagctttggattctagtagacctgggattgagtttttacactgttactctatattcgaagcaatatatttaaaccagctgtgtcttccttttgtcctttataaaacaagaataataatgcttatcacatagagatattatgaggattgtataagacaatgtatcaaatagtaggtattcggtaaatgttccttctttactaaagatagagaaaccattttctgatgtacaaagggatgaagagctggcccaatatgaattttcccaaagaagttaaatgaaaaggatctcatgatccttttcaggatttattatttacgaatgttaatatattattttaatattttctatcttatgaaataattatttggtcaaaacataagacaattgataggaatatacagcatggaaaatggttaccaactagagctgcagggtatcagggaatgtgacaaggcagcaaaatgtttctacacatgtctgttttttcargcattatctttcwtgagactatcaagtgtgtatttaaggagccattcaacttacttcagtgcatttgcttgcaaagggtgcaatgtgatgtttcctactggtagggtcgtatttcatatgtggtgatagtgttgctgaacaaataggaaatatccttgcctagactatattttatcatttcattatctagtggtaaaggaatgtgagttctatttacaaataaacattttgtcttacttttttctttgtgatctattttctccaagttgcataatgtaatgaattaataaagcttagttgctggccaaatcaatggtgactttttatgtttttaaatataatattaggtttaacttatttttgtcattaaaatatcatttgtgagtgcttttcaaaatgaagtgcttctgaaataaatcacataataaaactaaccttacttttgaaatacatttttattgaagcaaacacaaatcaatctgaaattcagcattttgtagcagttaaatgtatagtcaggcagcttcaacgtcaactagagaagttgtggttttaaccccgagatagggctgattatgctggtgctatggcaacctattgcaccatttggtagcgcctgtgtgcttaaccgcatgagctgcgcctcttcctttcctataaagactcagaataagaaaaacagaagtacacsgaagagaagaaaccacaagagcagtaaagacactgctgttagcttttagctgtgcaaacagcagtcttatgagaacaacacattgaaaacctcttctatttgaaagtgtagcttttcccattatgcctgggttcctttaatgattttgaaagtaagccaagtgtttctgttcagagttttcattaaagggaaataagaagaaataagcagtgcatttatcagcctttgcttttattgtcctcagctttaggagtgggaggcttttgtgcagcctcagcagacattttattctgtttgtgagatgggagattagtttctattaggtggactccctataatctagcatttattttctgcttttttttattatattgtagttagttcacaaaaaaaagtacaattttaattcatctcctggctcatttagaaagggttgtggttggtgctgtaaacacgtttctacataactagattaaattcacagacactcactgtcctagcactgtttattttctatggggagcttcatttacctattctttccctcaccccacttcttttacaaggtataggttgatcagcaaaggcttttgtatgttttcctttgtttcaaagtacagacataatataatcataacttttttttgcatgttctactatttttccttccttaaagatttgggtaaaaatactgaaggacagacaagttcatgctaccatttttgttaggcataggcctgttcacttttcttcccatttttctgaaaaataagaatctaccccttttgtagtcattgtccagcaatttacactttttaacaataagttttaatgtgtggtactctgaatcccattttgatggttatacataatatttactcatttttgagtccctaatagctctttagcacaaatactggatttagcattaaatattttttccttacagtgcaatgcagttgaacaagcatgggggtttttacagtcagacagatctgcatttaaatctagactcattttgctacaagttctttatttagccttgcatacacgtttttatgattttgagctttcatctgtgaaaagaagagaataccatctactttgtaggatttctataatgattagataaaataatatgtaacagtatttaggacagtgccattcacatagtacccgcttattaaatagtaaacactgttgatagcaccaaatacactaataaaagatttcaccacttatgcaaacatcttttgatgattctttgttctttaatgatgatcgtaacctatcctagaggaagcaaagagctacaaaaacatacacttactaagggattaatataattaaatggtttttgctatctgaagtatattgcataaatcaggtatatatccctggatttaggtaaatgaaaacagacattttcataagaagcaaaaagataattaatatgggaacaaacctattctggaaaatgtttaaaaagagaatatgggtaaggaagcatctttctcagttgttcttaacccttgtttccatcataatcaccatcagagctttaagaaaataccagtrcacagatcacgttaccccacaaacctactaaatcagattttccagcgctggagcccagaaatagtcacctttaatctaattcccagtcaggattaatacaaataaaggattgatattttttcttcctcaggataataatactggttacacacacataaatatacataactgataacaagccagaattttgtaaactatgttctcagaaacattgcagttacattgtacaaatgtcctatagtatgtccatgggaaaaaaatgggtttgtggcaaatacttttaggagatcttgagctaaacgaagtgacataagtttctatgcttttaatatattaacacactttataaatatctcaaaagggcatgtagcatgaattacttctgaaacaaatttgactatgggacatttaaaggcacacaaatctaaatcaaagacttcaatttgaccatcattgcacaggaagcgataaaattttccccctgacttgtagataaatagtttaagacagaaaaaaagcagtgtaactgattgttcttaaatggttatctagtagcctttattaatttttttgtcattaattgtttcgttaatcaacatgcctgaaatatataacatgatgttttaaaccaaatataaaatacctacaaatgcattcctagttttgaggtgtgtgtttgcaaagtcatatgtattcacaagcaaaaaacattattgtaaatattggacaccataagtcattgggagacagctagatatggttgctatctttaaaattttttaattatttgattttattcctctcatggccacaaaaatttgccttctttatcctcaatactgctttacatactgatatttttctttattatttgcattattatttaaaagtgtgtatataatttgaaagtttaaatagtaccataaggcctagagtaagtaagaacagtcttttgctcccacgactctcccctcccttgatattttgtgatttttaaatgttatcttttattgtagtgctgtttctttaaaacaaaaaaaaagatttttgccagtatctattgacttcttctcttgatcttgagatgttgctttttataacctcttgctctttgttcatgggtgcaatgttttctcatttctgaaaatatgaattgtagttggttatcctctcttttgctccttgcattgcctcattctcccaagtgcctcttttgtttatttgagctctatctttctttcttattagaggctttgttctagtgtttcttggatgtccatttgtatttaataaaaggcctcaataaagggatgttgaaattctttggacattggtggagctcataaattcatgtgctttaactagattgaatgaaatcagaaaggcactacactcactgagtcttagtttccttatatatcaaatgaactgcatgtcaataatcactaaaatcctttgcttctgtctgagtagaaatctttggaattattttctgatgataagcagaaagtcctttactcatgagattccaaaaataatattaatatacccaatattttaacataacgtctacataaagaataagaaaattattaaatagacactatttcaaatctagcactttcctcgtgtgtgcctgtgagcaatttactaaactcttttaggtcccagtttcattccctataaaaaaggataaataatgytaactcattggcttactgggatgcttaaaagaaaaaaaatacatatatattatataaagaggtgtgcatagtgtctgctacataacatttcagtaaactgttgccatcattattatatttactgataagctaatggagggtagaaaagactgtttcctgtggttctctgaaatcataatacctggcttgtcgctgcccagagtgcttactccataaatacttaataatttaatatgatttgttagatttattgtctgtggaccatatagcagatttctagcataaaaaaagtgcaattctcttatttttattgtgcactttattattatcatgcattgctaagaaaggaaagccatacatatctgttttagctgacccttattttttgtcttgatttgcttttttccacttttgtacaggctttatgtttatggaggtcaagtatgcattctcaaccttcaaaacatgctatcattcattttagggcagatgctgagaataagtatttatttaatctattctattttacccttctgcccttgtacttttcccagatttgcagaactagacaggtttaaattccctaggaaatagcatcccatttttttttcttttttttttagcggggagggagaacgggtgatatttaaagcccaagtatgtcttttgaaatgccgttttcactcaaattgattcctagtttttgctgaaatctctgatcagggacttaggggtgtgacttcaaggtaactttgatttgtgatcatttaaacattttgagttgtaaaagaaacatattgggaaaggtaaattcagtaacaatacatgtgttagaataacacagctttgaagatcaagtgttctgttatctacattttcatctgtttaatgtatctagtcaattccattggtgattcacaacaggattataatgggaaaaagagctcttagataatttacagttttttagtgctatggtgccacctactgaaatattactaaatactcctttgactaaataatgaaaacacaagacatttaagttttaaaaaatgtagaaaatttcatccctagaagataaaagtcaaagtgtagaatgtagtaactgtaatatgtggaacactagatatattactgtgttttattttatatttatttgatgtgtttatagaatttgagagaaagctcaatgcagttcttactttgagaaatagtgatgccttctctttattgtcacacacctacacatgtgccctcttaatttccattgctatgtcacatattttgctttacctattttccacactttcccagtattgttcataaagaatgtttacatatattgtagtgtaatttgtattaaacaatctccaaatattaaatatttattgtgcactggttataaaatactttatgcaaaaattttgtttgcttttcccagatctatttgactccactaagaatatattgttgcttttaagtaatacaggaaatagggtagagtacaaggctgtctacatacataaaacaacttaggtaactacatcagttcatttgttttgcattggacaagcacagtaatatttaaccatatactccagtctaaatggataggtcatgaagtagttaaatatgttatacaaccaatcttttgttgttgttgttgttgttgttgtttttgagtcagggtctcaccctgtcacccaggctggagtacagtggcaccatcacatctcactacagcctcaacacacactcatgggcgtagcctcccaagtagctgggactataggtgtgcaccaccytacccggataatttttgtattttaagtagagacgaggttttgcatgtttcccagactggattgcttggttcaagcgatccagctgcctctccctcccaaagttctgggattacaggtgtgaaccattgcrcctggccacaaccaatctcatcaggtcttttttttctatcagtgaagattcagcacagtggcttctatctatgattttggtaatgtttaataatgtttgcacatatgaagtgcaacagacaattgaagtcattgctcatgtaatttaggaagaattaaaatatgatagagaattaataaattattgcagatatttggttttatagttttctctaaatagttaagtaccttcacctactccctaccttgtttcatatataaaggcattctccaccaaagtatttgttagtgttctgctaacgttgatgtaaaaatcattagatgactgggggggcggggtgtggggaatgtcctttagatgttacgtaggtgttttaactaagctattttatataggtcacatttagcgtgttcctactttaagactggtaaaatgtttaacattaaaaagactgaaaaatagatttatgtaatctagtgcacatggcttattaaaattgatatgttgctttaagttgcatcactctagtgcataccttatttccttaggggcattggcttaaattttaaagtagtttttaatttaaaatttttattttaaatagattctatgtgtttttttcaggcacgaaaacatttttatgtcatttatcatgttgactaaaagtgttaccaaaactaaaaatctgtttatagggattttatgaccatgagaacaagcaagttgagtcttacactaagtctaaacagtgatgctgaagtcttggaattttcttttaaaaagataaaatggtgtgtggggtgtgtgtgtgtgtgtgtgtctgtgtgtgtgtgcacgcacatatttgaaatagtatataaaaatgaaataaaacatagattacaatgttttagtgtcacctaaaaatcactcagtggaggaatttagaatcatatccagtgataaatcagtgtacaagcaaacacatattcaattcaagaggcctttatgggaagtaagcatgaacatagaagaaaggaaaatgttggctctttagatattatactgttttccaggatattaaattttgctgcattaaagatgaaaagattcgaggaaattttgaatatggagcgatgatgagatcagaaaaaaatgtatatgtatgcccattattctgtcctctagctccagaaacctcttaacatctaaacaaaaggtctgtaaattttaataattgtgcttgatattagtgtagtttggttgactttcctgtcaaaatagtattctgtaataaattaacttgacacacctctaaattttctctaatatttgtttgtaccattatagagcattcactcagcacattgtgatttaatctgcatatctatttttagggtcaaggttattttagcatttgtagcactactagtaatttacttgcagccaaattatgattaagaygcatttttacttagctcatgagtttttaataaacaccttctgtaaaagaattctcatgcttaaaatttcatatgaagaggaaaggctgtaaggacaagttgatgggaaaaggggacgcctgatgaatgagagcatggcctgtaaagtcagacaggctcaggttcaagtctggctcacatatactagactggccttgtgaacttggccaagacacttgacttttctaagcttcttagggtttttgtggtgcttaagaaagaaaacataagcaaaagacttagtatagtgcctggcacccagtaaacactcaataaatattaacaattaataacaataaaatattatttctaaattattctttaaaaaagtaaatcattagaaacagtcttctccgttttggtaatttacctcttgtccttcttttcagaagttagattaaaataatatacatcatgtatttcttttaaaaaacgtattgcctttggaccacttggaagtttattaatctctctgagacatggaacatatacgtagtctgatgaatagtgtactggttggaaacagttctagtatatttactcaggcattcacagttcttttgttaaaaaacaaatagcttcacatagtgtcccagcatttttcttctcatttctgtggtaaacagatgatgaattataattttcttttatgaaactctatctatagttggtgctacacattttggtgacaacaaagtagtaaatcagaacaacagaatataggggtctgtggaattagtggtgcaggtaacattaagatttctcttttctctgtcatcaaatttgctttctgatttctcctctgtattaactgatccaatggcttccgtcattctgaggaaaaagttcaagctccttttcaaggcctacagtgcttgctccttggctcttctcctaaagctgttatcatcagatctgtttgatttctcctttgcacttactcatgcttaaaagaatccagcaattayttatcaatcacttcttatacacaagactctttgctacagctatttctctttcttctcctcctcttcctcatcttattatgtgattcatgctgatgttgatgcgagaaattttgattattagtcttaatcaggtgtatccatgactaaaatgtcattgcagatgactagatatatgtgttttatgggttataagcttatccagggcaagggtcatgcttttatcatgtttgaacctagtctccaacagcataccagcaaaacaatgtatgwttcttgaacctaagtgaactaaattaacttgtttcaagttccaaggaatgaggtgcttgcatgagaaggggcatatcaacctaattttagatatgtaagagctcatgtatttctcagataaagaagagatatgtgttgtataaagtatgttcacacactcaaaaacaatttgaatattttaaatttggtgatatgttttgttcttcacaaacaatgaaggacacttttcctttcacttcaaacatgagagctattagttattgctatactaatatttttttcttattacctcttttgcaaatcaacacaattctaagactgtaatttacaaggaaataagaacaaataaggagagcggaatgctgttaatgggaacataaacataacaatagtttacatgaaacagaaagataaaagctaactagataagaaaagggacaaaagtacaaacaatatcaattaaaaacaatatttaagtatgaattattaagaaaaagagaaatgtaatgagaaaacaagaaagtcattatgttaataattatgtatcacccatcaatgatataaaaatatatatatcaaaaatgcattttacttcaaggaataagccagggaatgtcattgaagaatacggggtgatgctccttggatggcaactctgaaggaagaaaatgttttcacatcagtttgttctcagaagataaaatataaaggcagaaagtcaccttaagtaccagctaattcactttcccatctgatctctgattctctttaacaacctgagtttacagtcatttggaaaagaactttacaatcttttaaataggcatttactaagatgagggatgaaaacattgcacttcactgtagactgaatctagttcccatcatgccaagaaagctgctcttttcaacatttccacaaacccagatgataaatccagttgacccatgttaatgcaccatgtttatcctgcatgtgaatccccatattatttgacttcaaccatttccttctcraaacaccctctactctttattcttgtttgctacagttttcctcttacttggaaaatttgattacctatgctggctctctccttaatattcactgaacttcaggattctatcctggacacttctcttttatgtagttcggtgatctccttcacctctgtagctgcaaaatgtatctatatgctgatctatagcatcagcccagatgtatgtcatgagctacaaacctctatattcaaatgctattatacattttcacatgaaatctcaagcaaattctgattcacctctctactcactgtttattactctcaagttcagtgaaactataactcactagcatgttaaactatcaatctagatattttccttattactctttctcctttattctcacttgaaaggatttacaaagtcttggtgattcttgagtgtttcataggtccttttcccccaacctttcttttggggtatactcttcctacgtaggacatcatctctgtctgttttgctttggttttggtctcctgattttcctgcccccacctttgctctttaataatccattttccatttcctgaaaggttgatctaaaattcaaatgtttctcctttaggcctccctttaaagacatccctttaatggatatctaaagcctgtaagataaatcccagcttcttattcttctgggaccaagctagctatatgcaatcctttaggttgtagcttaaatacatccaagaaaccctctgtatcaactcctttaccagccaaccaccaactctggaaatataaataagatgatcctgttatgttctcctttagcacattctgtatcacctgtcatcacactgtattgattgattgtttttgtttatatctcacactaaattgagctcattgagggcagggaatttttatatgttggtcatattatatccctagcatgtggcataatgtctagcacaaaataggtgctcaattaatcatcattatctaaataaataatgcatttgggaaaaaaaagtttcaaaagtttttcaaaagtcttttgcaggcttgaaattaatcccaatagtgatcctttagtctgttatgtttctgatttagcctggggattcaaaaaataaataacataattttgatatatttgggctttgtaaacatggtactaagagaggaaatatagtttcattagggtaaaagctactgaaaattgccacttggtgaatgttctatcatagacttgaggtacatataaaaatctaatatatgtttacattaatatgaatgaaatttgaaattttctaagagatttttgtttcttctttgcagggcaaagcccaacaccttcccccactggtaagaattaatatttatatttttactaattttattttcttgttgcaaagtttatatatttaactacaattttctattattaacactgaaattatttttaaggataaattttataatcatgagtgattcttgacattcacttgttcttaaactttctgcttatacgttatagagtttaataactacctaaacatgttattaaatttgtatatatattttgtgtataaatagtaacttttcccaaacttgacagtaaatcacacaacaggtttctactctcttttaatattttaagactataaaaaaatgcatttaaattagataacaaaattttatagtctgaaagcaggttaacagctgtctatgtatgttatagatatgtagataacagatttgcatatgtctatatttctttaagagtatgttgcttttttcaatggtatgcaaaacctttgagactattgagatatttttaaataataattttcaaattctactgaacacttcaatagtccttataaatgtcttaatcatgagataaatttaaaacacagagatgctgcaaataaattcatacatagtacatacaaaataagagaaaaaattaaattgcagatggttaaatatcacatcacttaactgatgttactgaaaatgtattttcctgcataatcatatggttgacagtatgcattaagaaggtaagtaaaacaatgaagacaattttgatttaatatggtaatgcacaattccaactaacgtacattcaacagatcatgaaattgggttattaaaatgaatatttttgtcattaaataaaaattcygtccaaatgaagaaaacaaataaccatgaaaatagtaacaaaaacacttctgaatctgcataagaactatatttccttatttttaaagaaggtctaacacaattttacagcgtttagcatggcagtgatgttttataaataaataaaagtcattcttgcatagtagattgtgattggtttatgccagctactcaaatgcaacttagtatctccaacttttacagaagatagattcatctcaaccataccagatggttatttttgcaggaaagggataggtataaggtagaatggggagtgattctttaaaatgacacatgactcatcaccttattgagggagtttctgttatctctgaattgactctattatgacaagcctccaagtgatgaaaccaggtaagttaaaactgttaaccaaaatgcaaaggaaaatggtctctcccaaatattggccacaacaatgtcatcaatggaaaccaggagaatttgcaaagtggaggttcaagaacaatgtggaattggcaattgagtcaggttttctaattttaaattcttatttgtgaaagggaatgtgaactgaacttaagatgtgtgcaaagatatgaaggagagtagttctctgaaaacctttctccctacccctgggactgaatttgcttggctagaagtaatctttaggaatgctactcatcaaaatagcgtggtactatgtattagtctgggttctctagagggacagaactaataggttagatgtgtatatgaggggtagtttatgtgattgacacacaatcacgaggtgaattcccacaataggccatctgcaagctgaggagcaaggaagccaatccaagtcaccaaacctcaaaagtagggaagctgacagttcagccttcagttggtggccaaaggcccgagagcccctcacaaaccactggagtaagtccaagagtccaaaagctgaggaacttggagtctgatgttcaagagcaggaagcagccagcacgagagaaagatgaagaccagaagactcagcaagctcacttctcctaccttcttgtgcctgctttttctagccgtgctggcagttgcttggatgatgcccactcatattgggtgggggtgggggggttggggagggtctgcctcccccagtccactgactcaaatgttaatctcccttggcaatacgctcacaggcacacccaggaacaatactttgcatccttcaatccaatcaagttgacactcaatattaaccatcaaatactattataaggagaatgttgcatgattttccttctagtctgtttgtaattcacatctaatgaaagagtgagagtggacgataaagggaacttgttgaaacatttctctcaaagcaaaagggatcattggaagcaggcagacaccagaattggtttaacctaaaaataacaaattaataattatcaagtctataatgatgacagtgacttaatgtgaatagaaagaattctaaactctctccttccttcctccctcccttctttcctactttctttccactccctttctcccacccccttttcttttcctttcttttctcccaccctctctccctccctttcttttattcaatgcatagtagttgaaaaaatctaaagttagacctgattttacactgaagactagaggtagttactatcctattactgtacttagttggctatgctggcatgtcattatgggtaaaagtttgatggatttatttgtgagttatttggttatraaaatctagagattgaagtttttcattagaaaataacacacataacaagtctatgatcattttgcatttctgtaatcacagaatagttctgcaatatttcatgtatattggaattgaagttcaattgaattttatctgtatttagtaaaaattaactttagctttgatactaatgaataaagctgggttttttatttatcatactatttccattttcttctctagtaatattgcaattttcattcttaactctttcctgtcctatcatttctactccttttctagtttctctcattctctccctttttccatatttgtgccattgtcttttgcccaatcttgttgaactgatttaattattttttgttgtgtgatatagttcagtttttacctaattaaatatttaaatttttttttttgcttttcaaaaagtaaatatatgttaagcaaaaaaaaaaaaaaaattaaatacatctttataattccaacctccagagatcacatgagcttttttttttttaacacatttggtatatttttctattcttttattaagaaaatcacttttttcagtaaaagagcattaaaaaaactttaaaggactttaatcaacagtgctgatttgccctgcagaattttttttaccattgtacactcatgtcaactgtgcataaacttatttcactactactttgtcacatattttcctcttcttaaagtaaacttgagctgtggatattatttcagtattttaaattgtatctctttgttatcatgacgtcaaagacatttttgtagactttggttgtttgtaaacctagttgtgagttttgtttttcagtcctttacacacattttcattgctttgtttgcttttaatttattttttaaaaaatccatgaataggccaggcgtggtggctcacgcctgtaatcccagcactttgggaggccgaggcgggtggatcacgaggtcaggagatcgagaccatcctggccaacatggtgaaaccccatctctactaaaagtacaaaaattagctggatgtggtggtgtatgcctgtaatcccagctacttgggtggctgaggcaagagaatcgcttgaaccagggagtcggaggttgcagtgagccaagatcgtgccactgcactccagcctggtgacagagtgagactctgtctcaaaaagaaaatatatatatatatatatagatagatattttttcatggatatatatatatccatgagtaaatggaagttttgtcttttttttcccctggaaccctagccctgctaaaaaccttctaactttacctttctctatccttttctttatctacaactttttaatttttttaatcatctttaccattatgcttcatccttctgaactcaattgctttggataggcgagaagctgctttcaatttcatttccccatttttatctttagctaatgttctgtagcttgttttagatctgtgtctacatattatatgtatctctgtatgcatcaatatttgtatatatgcatgcatatatgtgtatgtatatttatgaatacatatacacaccatatacatacacttatgtatggtgtgtgcatatgtatgtgtagatatatgtacatacacactatagtggactggggagttagtatactgggaggagcatacatttagggtatgattcacatatttattttgtccttctcccattttccattaattaacaggattgactacagcaaagatgcccagtgttccactttcaagtgaccccttacctrctcacaccactgcattctcaccsgcaagcacctttgaaagagaaaatgacttctcagagaccacaacttctcttagtccagacaatacttccacccaagtatccccggactctttggataatgctagtgcttttaataccacaggttggcacacaaaagttgttaacttaaatatcagggaatgtcatttagaarattctacagttatcagtacaacttgtctttaaattatttgcacagtttctaagtawgtgattttattcaagtgcagaaattgcaggaaattagtatctgtgaaatayagatcgactgaagtaattaatgcatgttgttagggrgtggagagagaaaagaagggaagcaagatctccaaggacaatcaggaggggaaatttgttctagtatcctctgatctatacacactcgccatgattctcccgcttggcttcccgccacctggacagatgagaatttccctagttcagagattatcagttctactctccttggaaggtgtcttaaatgggagtcttcccatttctttgtttcactctagattctctttatccaaaaattgttgaagatagagaatgtattatttttaaatccactctgagaatcgacaacccaattttgttatttgagtttcttttaagagcatttgcatcattgaaaacatttttaattaaggttgtgagttctactggtaaattaaaggcaatgtagccatgttcccgggaaaaatcagattgatgcaagagatatttttgccaaggaggggcactatgctccttagaatactgatatatgtatatgctcatttaatgtttagcaataggtctgccagtgtattcagactcagatttaccatcagtagagtgttcatgcttttctgaaataatgtgttatgttgacttttttgtgggcaaacaggtttatagacatactctgataaaagatactaagctatttgaactgtttaacaatgccatttatcttcgtttgaaaaacaagcatatataataccatcacagaaattttgtttagggtacatcaaagtattttgagtaccttamtgatgaagtttattggatatagtaagcagttaaataaatggtcagtgccttcctacagcaagtacaagactgtgtatttaatcttccatttgtttccctgtcaccatagcagagtagtaactaggacctgtctaaacactgtaaaaatttgaacacattgcccaaaatttttacaaaaggaatgcaaggatgaaggtgctgatgactaggtggaacatctcatgctattttattattttgtttattgcctgagtagtgtcacattgagttttccttttgaaggttctgtatttcacgtcacatgcacaaataaaaacatgcaacattcttttcattcccacatttttaaaacctaaaaccacttaagccataaatttacaggtagagcaaagtatgagaaaggtttaaagttgaatagattgaaaataaggatgaataattttaaaatactgatttgttctagcaaaataatactgatgttgaaattaccttgaaaagttcatgctttcaaataaaaacacactttcttttctagaaaataatcttttcatcaggtgatacttcaattatctattggaataaagtctatatgagttatttaatttatgattatgattgatttatactgctgaatgcagtcaatttttttcatttactgatataattgggggaaaatcctttaatctgcatttctaagaatattattacacactattcaaaattgttcatttttgaaaatggctacaatgaccatccatgtgcataacattaaatttaattatgtaattttattttataaagatagtttatgactatttcaaagcattttcaatatagatgggtatgtgtgtatatatatatttgtatatactgttaagtatatataaagtatatgtatgtgttgtgtgtatatattttaatcctatgtatacatacatatacatatatacatataggattaaagtatataaaatgtatactttatatgtacttaaaagacacacaatgaaaataccctttaaattctgttccttaaagatacctttttaaccattgttgtatatcctccaggctctcaacatatgattttgtgagtatgcaagagaccgtgtatgtaagcatggacatgtgagattgtttccacatgttttcaaacactagatattatcaaccttttaaaactctgccagtatgctagttagaaatatttcatgttgatttacatttaaaaaattgttcttaacactgaacactttttcatataccttttggcccttctgtatattaggtagatgtctgtcacatctcttgtccatttttaaatttcttcttttctttgtaatttgtaagagatactagtacattggaagattcctttcttattctccctacaaagaaatgtcccatctgtcagtttgtagagttgatggagaattcagaaagctcatagtgatgtgaaagtcaataaagccacctggaaacacgaattctctatggctgcatccagctcaggaaacctcccaaggctatgtaaatagaggactcaggtgcctgtcactttccagccaagcaaatttaaatactgacagacacattttaacagattcagttacttcacagtttggtaaactataatcgcaatttgctccttataacctcttagtaaattattcatctccagtgggggaagactgatgtaatgatctcactttcctaccttaggtgtttcatcagtacagacgcctcaccttcccacgcacgcagactcgcagacgccctctgctggaactsacacgcagacattcagcggctccgccgccaatgcaaaactcaaccctaccccaggcagcaatgctatctcaggtttgcgggtcctttagacttgtgcaaatatgaaaagtacatgacgactacctgtatttaagaatggtgtgaggaaatctaaccacttattcaatgtgcagctattgctagttgatgaatttggaatttcagtcactcttaggaatatgaaaccacagaacaaatgtccttttaacagagatgaaataatagtgagaattgtgagactacagcaaaaatctgctcaggaggaaagagttattcagaatagtctattttttatatatttcaggcaattaccattctacagggaaaactttttgttagaagtaagaaataatatgcataaatctttacttaaagactttgtaccaacaaacaaaagggtgaagagtgattcctattatcagtgaagggcagtgagaaattgtaaccacaatgaaactgttatttaaagaatgagaaaaaaagaaaggaatgggtttatttcccattcaaacattaagaatctttcaggatggcatctctgtgtttataacaacaatgcagaatatttcctcccttttcttttcaaaattagtgtccaaatcacttcttggtgtccttttatatgcaagaaaaacaagtatgtcttttgtcagatcacaaatccacacagtctcgtatataatttcagtgatctgagtgcttgaaagttaaagatataaatggtagacctatgtagctggtaggaacatggtcttgctttaggtaggaatcaaacacatcaaatagaataattattattttgcagtattaaaactgtgcccttggcataaaaatcattccaggcaatccacactctttaaacaagtgggagaagagccgccctcaccttcctcattccatctagtccagctgccatgggaaccacaataaaaatatttggagcttttagcaaacccacagatccagaaatagtggaggggcagaaactgtaaaacaacaaaaggggactgacccctggggctggttgtcacacagactagtctgctctgtcctgatcaaggaattcttcttctcaaagaagtggctaattccactgatgaaaaatctattaggattaatcaacctaattaaaattgtaaatgccgtccataaccaccactgagagtacctacataacaagggaaacgaagttttcaagtgaggaggagggaaggtaggaagtttcgggaggttgagagtggaagcctcaaaacagcttgggagcagggtctgctagagaggggagaacagatcaagtgagtgagaggagtgtggaaaagaaggtggaaaaaagctgatttcaaaactctgcagagggccagttctatgtctgaatgagttttttaaaggatgaataaatgagctttcctcactcttctacatattctgctggagccctcctctggggatccagagtggaaaacctcatgtttatgttgtttattctattctatggtttagttaaatttcgtggtttagtggcttttgaagactgagctgagaacccatgctcaattatttggaagatgcattttcaattctaatggaatgtatgtgtgaaattatagactgtactgcatttgtaattggtagacacctgcaagctcaaatcaaagccatgttcagaacrtgcatgcatgtatcactgcagaaatacagactctgcctgcaaatgtgagactaatctcacatcattgaactgatgaccccagggatcttgacagaaaataacccaacaagctcttgaatagagggcagctcatatttcttttgctttttccatggcaactagcatagtgctagtcatctagtaggaaccaaatgaatatacattgattgcctgtgctgtaattctggatgtgatgttgggcaaaggtgtaaaatacattaggtaatttgaagcctgaaaatggaaagttctaacctagtacaatgtgcagtttctttggctacaacactagattctataccaattagcaactatgtgattgaaaaataagagaatgatgccactgtaatgtggagtttgttggatttcaagccaatttgatttttcctggccagggaagcctgaattgtgaaagtagaattgtaaccttcagctggaaaggaagaaaaagaaaacctttgagctcatgctgtggcccaggcaggatcccattcagctctattttaagaaaattaaaactgagcacctgcacccagggatccctccccagagaggtgtgtgcctgcaaggctctcagcatgtatcaagttgcacttcctcctgtgccaaccttttacactcagagctctacctccatctacatggtctcagcaccactaagacagcaccagtctctactgctttgatgcattttttatattgcctaaggcagcctgcagcccagagtcttaggcttcttgggctgtccaaactatatatttttttaagttgtgctctgattatgaagctgcataggtttccagttgtctgcccctaaatgcatctttcccataagccctggtatttttggtacagttctgtagaatgcatgtgtcrtggtatagcagaagtgcttgaagatttgtttctctgccttatctttagtaattgtgtttatgttggctatctggctattgcccttgcgtgacagacacaagtgacagtgctgatggcccttctgattgcagatgtcccaggagagaggagtacagccagcacctttcctacagacccagtttccccattgacaaccaccctcagccttgcacaccacagctctgctgccttacctgcacgcacctccaacaccaccatcacagcgaacrcctcaggtctgactatgctgctctagtagtgtcttcagttatagataatgaaatggaaactcaaaactttaatgtagctcttttattttgtgccagatattatttgtaggtttcccattttacaaatgttcacgtatcaacaccaaattatgcaaaagaaacttgccagtaagctttttctgggcatattttattttactattaatattataaaagtccatggcaaagaagaatcaataataggccttaatgtcatatagctctgggatcaaatccaatttcttcaacttcgtagctgattacagggcaaattactaatactttctgcatatcagatttgctttctgtaaaaatggacataataacactccttttttaattatgtcaaaataattaacgtgatgtctgaatatgtaaaaatctggtatgtaataaatattttaaaagagtaattgtgacgcttattagaatccaagtatggaaagccgtgaatgaaagggaaatgaatagtytgaggaagattgcatatcatcaactaagaattatatcaaggaatgaatagttttccctcaatttatacaatgtttagtttaaataacttgaaataaatctttgattcactttattattttaaaaacaagcgaaygtcaaatcaaacgmggactcctagagcaaagatgccaataggaaattatctttgctaaagagtttttctttcaccttttaatataacgaattaattagcttttattcttctattcattttcttgcagatgcctaccttaatgcctctgaaacaaccactctgagcccttctggaagcgctgtcatttcaaccacaacaataggtgatattaccctcagtcaggcagccacaccatccccatgtgcctggtgatgtgctctcacaagggccttccacccactctacctcgggctcctttctttaagttgcattaagtgtttgaatcctgagggtgatggaacagcaggaagatatttctctgcttagcagtgcaacagctgatgagatcaggatgtaattgttactgtcataattcatcagaaagcatgtgtgagaaacaaccacatctactagaactttttctcacaggggtttaggtcttagtaaggaaaagaacaagcccatcaaaggggctgtccattgcaagtggtgagcatcagacggctgatggcagagttcccgttaagcagtgagagggcgtggagataaaggaaagagaaactgaggaatggctgcagcaatggtggtatctgtgaatcagcaagtaagctgatcagagcttgcaagcccacaattctcctcaaattcttccaacccaaaatcaagatgagcagagatctcttagcttacacaaagcacatgttctcccaattattcaacttaaatgcctacactcacacaagatactgctaaatttgttgacagagcaatttgttaccctggatctagtagatgtgcaaagagcttacaaaagttaatctagagaatgaagcagtctttgcattttctctgacttttttttatgtaaatgaaaagtataaacttcgtactatgggggttataattatataaattaacattgagattaatcaaaatatgaagacctttaaaatatttttggctgtgtgaatcttcagccatgttgccataccgccaattagatgcgtacctaaaagtcttaatattgttaattgtatttattgggtatatttatgaaaaattttatagaattagctcattcctttataatgctttaagttttgaaatgaaaacctgtactaggcaaatccttcatattctgttaaatctaactagatagactttatgaagtagaagtattgtaaatcagctttcccaaaaatgacatggcagatattctaaagcaaaattttaataatttacattttttttctccattacagctactactccatctaagccaacatgtggtaagtttatttacttagaatcagcatacctcactttggaatagcactttaattacatctttctttattccaagctttcaggacccactagtaagctaaactcactggctctaatttctcaccgatgactagtctcaaattagtaaaaaattactagctacacatggacatagagttgggaatgatagacactgggaaatacaagagcgatgatggagggaggaagacaagggttgggaaactacctatattgggaactgtgcctayttgctgggcgtcgaattcaattttactgcaaacctcagcatcctgcaatatacctttgtaacaaacttgcacatataaccctggaatccaaaataaaagttgaaaactaagttttccagttagacaactttggtaaagccacttaatttaatttaggtatttgaaaaaaaaatggaataacagcaagtttgttggtgagggggagggggacaaggattcagtgtgatgataaatataaaatgtggataataccttcaaagcttatcaagaagaaaaatctctctttttctctctctttctgtcttgcttgttaggggctggctcaaagcagatacttgaaaacagtttgtctctctttttttttttctcattttcttccttgattctcagttgaagcaaagcggttcttcatggtcagggcttattcctccattcatttctaagtctaaccactggagtcactgccttcagtagctttccatacatttagtgtaaagagtggccttcatatgtctgtttaattaatatgatcttttgtaatccggttgtcattcatctctcctcccgcctcttgaatcattgcctccttatgttcttcacttaagtaatatggaaccactttcagttttcttttctttctttctttcattcgttagttctttctttcttttttttttttttttctcactctgttgcccgggctggagtgcagtggtacaatctcagcttactgcaacctctgcctcctgggttcaagtgattctcctgcctcagcctcccaagtagctgggactataggcacatgccaccgagcccagctgatttttgtatttttagtagagattgggattcaccatgttgcccacgctggtcttgaactcctgacctcaggtgatcaacctgactcggccttccaaaatgctaggattacaggcatgatccaccacgcctggcccacttacagatttgtaaacacatactgttccttcctgcctctgtggccactcctgctcttcctctacaattggaattctgctccaacctcatcccccaaaccccatgtctatttttctatttcctgctcatattttaaaacacaaactaagtcactttctctggaaatcctgtcctatacctccaaatggaacagatctctctctttctagtgccacattatttcctgcataatcttattttagaggtttgtatgtctcctgcaattcatgcttgtgtctgcctccacactggattatacatttctaaaagctgattatatctaacttgcctttgaattcctagtattggtgaccatgtcttacatatgacaagggcttaataatttttgttgaataaaaacaaatgaataaatttatatttgttgtaaagatatttttatcagtcagcagaaattgttgacactaaacaaaggtgctttggaggtatattatcaatcataattttacscaagttaaggaaagaatgagggcttctgatccctgagtaattaatgccccacatatatcaagaaacaggtggttaataactacgttttagaaaacaagaaaattataaagcaagaataaatttctcaaatgcatcatttatttgtgcatcaagtcaacaagtaactagtgagttcccattaatgatacatattatgcatactcctgaatttacagtgataataaaaatagcctagactttgctctcatggaagttccaagtccagctaggaagacagacacttatctggtaatcatccaaatataaatttacaagctgaggtccttgttagggcagtaaagcacagataattacgaaaaaaatgatatggaggcacctaatgtgttttttctttttcatgttttttggggatatttggttagttgatttgatattttkgcatttgcattaatgtagttttatttattctggaaaaataacactcaatgttctattttcttttagatgaaaaatatgcaaacatcactgtggattacttatataacaaggaaactaaattatttacagcaaagctaaatgttaatgagaatgtggaatgtggaaacaatacttgcacaaacaatgaggtgcataaccttacagaatgtaaaaatgcgtctgtttccatatctcataattcatgtactgctcctgataagacattamtattagatgtgccaccaggtaaatatcaatttatttcttttaataaatttataaaaacagtacacttttgtgtgtggtgttctccagtggtcacaggagctagtctggtgagagaacagggctgagggaaaggaaattccttggaaacaagtgggtgaactttctgctgtcttaaccaagtaaaaatgatagagtcaaataagccttctgtttacatccattaatcaccacttctacttatttaacagggagatgtttatgtgcactaaatatagtttatcctgctaagtgattgtctgcaagctttctttattctcctctacttaaatgaagtattaattatatatgtacatatatttattcttttaagtacaaatttatctgaaatatattagggagaaacataaaggatttgatgtgtatgggaagaaccaaaatacattcataaaaaggaaggttatggtcatgttagtgagatcaagttggttttgtcagctaagctactgcttggaaagaggagggggtgacaggcgtcgggcagactctggggaagcatctcttagccaaatgcattctggaaaagggattccagagccgtgtaatttttttaaaaagtcatatcatttaataattcaagactattaataaatttgttaacatttaaatatgttaacatcaaatgtattttgaaaataaaatccatttaatttattcattttccctaaatattactgagataaattaccaattaaacacagaagatgacaatacttaaaaatgcatttcccaatagggaaactcccaatacactttataataatcattcaattaaaagtaagtaaagagtaaacaaaaaatttaagataaaaacaaaaatacaaaatggaatgagtgttttttaaaatgtgcgaaagctacaattttatcaatatgtttgcttgcatttcattttttaacgtggtataacttataaatgaaacactaccaaaatatatggtgctaaaaataataaagtaaataataaaagaaacaaatccctagagttattagacttttcccatagcaatctcaatccttgccaaattctatgtcattagcataatttcagtggctttaactgacatgttaggaatgaatgagggcttaggatacacattatgaaatactaatcaagtttatttctgtatcttcttgtcaggggttgaaaagtttcagttacatgattgtacacaagttgaaaaagcagatactactatttgtttaaaatggaaaaatattraaacctttacttgtgatacacagaatattacctacagatttcartgtggtaagaatataacattgaccagagaatttwtttttgtggcacaatgttgttctagatattatttaatcttactctctgccctttctctcttcctccctgcctctcttgttctccctctgtttgtcttttttctttcttgtctttttcttggtctgtggtatatttagagtcaaataattaaattacctatacaattcaaacaaattcacaaaataaatgaatacttttcatgaaaaataaatatctaaaaattgaaagtcaattaatttacaataattttcttggcaattgttatacacaggcattgttgaagagatcatgaaagaagggtgttataaggaaatgataatacacaaactctgttatgaagtaaggaaaaaaaatacaggattgtatggttcaagagtttactttttccatcctgcatcaacaaaattcatacacaagttcaagaacacttaaataagaagaaagcagaaaaagaacagcaagtgcatctagggatatgtttggatttgaattgaggcaactaataattgagatagtatttttaaagtgtatttgaatttaatgaggtgaactctcccaccctttgacttaaagccatctgccaggccatagctggcatgacagacagatgtgctcaggtgtgcatgcgcatgcacgcatatccacagctacacacatagaggatggagcattgcgctgggtgtaatcatcacctaatcaccatagtatagattcatggccatcaggcaagcagacaaggaaaggaagagcaatcatgacagaccaatgataaaatgttctctctagacaatctattagatgaagactaggtgaggtgcaatttcaactttaagttgtatttgctatatacagattgggcatccctaatctgaaaatccagaatccaaaatgttctcagaatccagtactttttgagtgccaacatgatgcggctcaaacaagtgaaaaattttacacgtgacctaaagtgactggtcatagtcaaaatgcagaaacataacacagaatttagtcagcatccccagagaaaaataaatgacctcaagctatgtatatgaggtatatatgaaacataaatgaattttgcatttgaacttgtgtcctcttcccaatatattgtatcatctaaatgcaaatattccaaaatctgaaaaaaaaaactaaatccaaaacacttctggtgccaggaattttgaataagggaaactcagcctgtattttcataaaagttgaatgtaaaaattatttttagggttttttattattttggtaatttccacagatgtttcaatctgataaatattaaatagagaattataaatgtgaaattagaaaataaatgtgtgcgtgaaatattgcatcgatatattcattygaaatatttctttatttcaggtaatatgatatttgataataaagaaattaaattagaaaaccttgaacccgaacatgagtataagtgtgactcagaaatactctataataaccacaagtttactaacgcaagtaaaattattaaaacagattttgggagtgagtatgttacttgcatttatatgtaaaattgcttctctcttcatgttcttataattatttgagaatcataggaaatgaattgtctttttgctgtttttgatactttttaagcatatgctttttatttcaatgaagckcaatttatctatttttacttmttttgcttatgtttttggtgtcgtatatgaaagtccattgccaagtcatgcagatttatccatatgttttgttctaaaaattttatagcattggctcttaaatttagctctgttacccactttgagttaatatttgtatatggtgtgaggtaacagtctaatttcattttgttgcatatggccatctaatttttccagcgccatttgctgaaaatactatttattcccccactgaatagtcttgccattcttatcaaaaattagttgaccataatgatgggtttatttctgaactttcagttttattttattgatttatatgtcatacttacactgtcgattactgctgctttgtagtaaattttgaaactggaaactgtaagttcccccaaattgttacttttcctcaagattgtttagaatatctaagggaacttggaattctgtatgaattttaggatcaacttttcaatttttataaagaagccatctgggattctttcagggattgcattgaatctgtggataaatttgggaaatattgccatcttaaccatgttagtcttccagttcatgaacacaagatatctttccattaatttatgtcttctttaatttattttcaaaatgttttgtagttttcagtgcattagtgttataattcttctgttaaatttatttctagtttaagtttattcctggttataatgctgttgttttcttaatcacattttcaggtttgttactaatgtacaaaagtacaattgatttttctgtattgatcttgcagtctgtcacattactgaatttgtttattaatgataatattgagaaatttttgacaaaacttataaatgtaattctaaattttgttttgttttgattttgagacggagtctcrctctgttgcccaggctggagtgcagtggcgtgatctcggctcactgcaacctctgactcctgggttcaagcaattctcctgcctcggcctcccaagtagctgggactacaggtgcgtgccaccacgccctgctaattttctgtatttttagtagagatcaatctcctgacctcatgatccgcccaccttggcctcccaaagtgctggaattacaggcatgagccaccatgcccggcccgtgattctaagttttatgtaaaaaggatagttgaaggctaaagaggctgcctaaatccttgtctcctcatacttctccaaaataatatatagctacaagaacagcaaataaaactatgtaaaaactatatcctcagcataactagaaaattttaatgtatttttattagtaccacaattattacattctttataatcaatgcaacaaaatagaaatcccagaaaactatgttttatatttgaaaacagcacaaaatgttttcagtgggggaaaaatagtcttttcaactaatgatcctggtatctctgtagaaaaaaaatgaacatcagctctcacctctcaacaaacacaaaaattaattcaaaatggattccagacctaaatactaaagctataatttaaaaaattctaatcaaagacataggagaaaatgtgtagctttagcaaagatttcctagggcacaaaagcaagaaacataaaacttttttgatgaattggagtgcataaaaattgaatattcctgctctttggatgaggccactaaggaaataaaaaagcaataaatagtttgtaaaaaatcaaaattaattttttcaacaacagaagtttttccagaatatacagagagctctttcagctgcaaaataaggactaaaacagctcaattgaaaatggacaaacatttttaatatatacttcacaaaagaggatacacaggtggttaataagcacattaaatgatgctcagcatcattagttaactgagaaatacaaattaaaacaacactgagatgataatactatacatccattaaaatggctaaacttaagaatacggatactactaactattggtcaggatgtgcagccatgacccaggaatttcactccaggtatttaccaaagaggaaacatgacaaagcagatgcattcatagtagccaaaacctggaaacagcccaaatgtgtattcactgttgaatcctaggtaaaatgtggtgtatctttacaataactactgataattttttaaaattctaactatgacacatgcaactaagtgaatgaatcttcagaacattacattgagtgcaatatgttaggagtgaaaaagtacttactgtttgtttcattttatttacatgcaatgggtaaaaagacaaacttaatctgtagttaacagaaagttgatcagaaggtacgtgagtctggtcaaaggagctgagttgactgggaagtaccacagaaggacattttgggatcacagaaattttctttatcttgattgtggtgttggttatgtggatgtatacatttgttaaaaatgcattaaactgtatctcaaatgggtacattttaatgtaaattttacttcagacattttatttaaacatttatcagtttttctcagtttcaaatgactagttactggaagcaatgacaagtgctactcaatgactgctaaatttattggtgctatgaatgccagatttttagcacagcaaaatctacaaattccaggatttttaggtagtatctgggcaagaatatatatgaataatgtatatgaaaggaagagggggttcttagatatcttcaagtcagtggaatgcttaggtttcacagtgccaatctggtgtgacatttactttgttaaaggaatttactctaaaacaaattaaatgagcccagatgcatttctttaaattttattttgaattcatcatttgtcaaaatatggttatmaataatgcatgcttataatatgaagaatgctttatccatgtcttatttttcatattacataacattcttattcttttaacaggtccaggagagcctcagattattttttgtagaagtgaagctgcacatcaaggagtaattacctggaatccccctcaaagatcatttcataattttaycctctgttatataaaagagacaggtaatttgtgtagaatttaatttcatcagaaaagagaaatcaagaatttgaaagtactagaaatttttattgagccagtgagtcacaaagctctctgcttagagactgcataggcatagtatactccctgatcttagaattgcttccactcattcaaagctttccagccccagaaatgactaaaatccagaacattctaaatatttgcttgtccttcttggtcttagtttaaatctttgtgctccaaagcctagagacagaaaacctctggatgacaacactcatttctgtcttgcaagtattatgtaagtgatttgactcactttgaactcatcattcagcctcctaaacaaaccaacaaacaagcaaaccccttgtaaaacttgtttcagctaataatacagacaaaatgttgggtgaataaaaatgaacatgggcccatgtagccgctggggccagtttggtgtaatcttgggagcatagttctaagtttagaattagacttctgyagaagtaatgcaattaaaaaaaaaaagaagaagaaagaaatgtgctatgactagttcactcatgaaatgttcaaatgagatgctatttaagagaacaaatatcttctggacaatttaaagtatctaaattgtttgtagaaagtaacatcagtggagtatctcagagcagcctcaatgcctgggatagccctttctctattcttttatccataggttaaaataggaatgaagtgaacctcatagaattctgtcactctgtgctgtggggaaggaaccagacatacacttcaaaacttgaaaagtgaaaggctatttttcttcattatgttattttatattttaatggccttttcttgctagtgtctttaggtcttaataatcagactactaaagcaaagttaaatatgcatgtagttttcaaattaacattcaaaggccaaggaaaataaatatatactatatatttgaggttatgataaatttaaaagttaagtctatgtggaaggaaaaatggaaattccaggaagataaaacagcagaggtactgtctgcctcattggacacctcttttacaaacactttgtgtagcttctatgggaacacattgttcattttttttttctcttctctgaatcttctattcactatccctttctgcattcctcaatgtctacactctctctactagagagtattgtcgatgtcagagtatatggtagacattttatgcatttatggctcttttatatttttacagtttttttaaactgtatttccactgtatttgcataattagggtaaaaaggatgtaatgagttagtagcaactcattacagcaactagcatgggtccttcttattgggcaactaaatagtgttacccaaatttaacagctgtccacatagaacacttaaacgggattgaatggctgagaaggggaggctagctatcaggctgtgtgttttcttttctccaaagctgccgattggtgactgaatgcagctttggaccatgccctgacactgcataaagggctctttggagccagctctactctaaacagcgtgctccgcttttgttttctccttcatctcaaacatatacctgtctcctctcccatgttacctaaggcaaagagagttgataggattatagtatcgttaaggcaacttaacttttctcaccattttaaataaaattactattaaaaatccacaggaagaaagtctatgaaatttgcagtttactttttaatcagatattaaatttcacttcattacttcacaatttaattttttcagtgtctctaaaagagagggattaaaagaggagaaaaaatgcaattgacattaatttagttttattggtttagcaggtttttttaattatgtattatttaaagattttatcaactattttaataactcagtggagatgtgcatacatatcttcatagttcatatgatgaaactgaggttaacagaaaatgtgatagatgttcaagttcagtagcttgatctgtttcctttctgctcttggttttgtttgtttgtttgtttgagagggagtctccctctgtcgcccaggctggagtgcagtcatgcgatctcggctcactgcaagctccgcctcccaggttcacgccattctcccgcctcagcctccctagtagctgggactacaggcgcccgccaccacgcccggctaatttttttgtatttttagtagagacggggtttcactgtgttagccaggatagtctggatctcctgatctcgtgtgatccgatccgcccgcctcggcctcccaaagtgtgtttgtttatttttcctcacatttttagcttaagatattttggagaactgcagttttatctcgttaacttaatgatggcaagtgacagtgaagcttcttggtaattggggaattggggaagagatcttttgtgctttattggatttaaaggattatttttcaaaagttactgaaagcaataggcacctttcaagaccaccatgatgttgctggaaattattttgtgtaatgccttttatttttttaagaaaaaaaaaacagaacaaattgcttaatctctctgtggctcagttttgtcatctgtaaaatcagatgatagtgagtaccaactaatagttgcagtgatggttaaattaattatttcatgtataccccttgaaacagtgcttggcacatacagtgagttattatttttaaaaatcgttattgatattattattactgttgctgctatccagaaacatgttgccactctaatcatcctctttcctgatgtcacttggctactcaaaaatagcagcagctggtgatttttttacttaacaagtgctaagtcttctgcctgagtgtgaaaacacacttagacactgtcctacctctcatatgcctccccagccagagctgttgtcctgatcaggtttgtcactaaactcaaaaacattccttcttccgtttgtaatattttcttttctcccttacatgtattcagttccacttacctttcaatgaacagctgaattccacttccggcatgaaactccctcattctcacagctcccgttaattactgtagtgtccaaattactatgatagaatcaacccaatgactgatgatcaaatggattctgcatctaacattcaaaacagtagctaataccgatgttcaaagtttggaggttacatatcagaaaaggttttctaaaaaagaatcattctgaaacatgcaactcaagacttacagtatacactgggggctgtgttttctcagaaacaaaagagatcgtcttcacaaatgaatctgaacttattaaatattttatgtaccaaattaatgatataaaaccataatttttcaatatttaattttaccaatgataattgagtttgttcaatacactggctgataattgtaggtacttttgagtatcaaggatgtacttatttttcaatcactcaatagtttggagttcacttggaacaatgtgatgtagagaccaaattaattaggtacgtggtagtactgacttttaacgacttactaattttttttcacatttttcctcagaaaaagattgcctcaatctggataaaaacctgatcaaatatgatttgcaaaatttaaaaccttatacgaaatatgttttatcattacatgcctacatcattgcaaaagtgcaacgtaatggaagtgctgcaatgtgtcatttcacaactaaaagtgctcgtaagttatatgttttaatgcttctttccataaatggtaaaaagcaaggtatgaactttttagcctacaatatttctatctttattctagcaagcacatttacctggcacatttgttaacatctagggcttataaacaygtaaaatctaaaagtttaaaaaccgttatcctggattctctctcttcttcagatatagtcatagaattttaaggacaaagcataaaagcatcttaattggcatcagtttgtgcaatttcatgcagttaagtacttaaccaacttagattaaaacattcactgtttgctgttgtctttactatctggaaatattaattgtaatcagaaacctaacaatgtctcataaagcattagcctactaacctctgttcatctgataaaacatttcataaaatgtaatattttattagcattttcttctcttcgttaccctcaactacttactattctattttatgtcacattatccatttaaggtttcctttcaatggcatttggctcttgccactagtataatctctccatagtttccaggcccaaagttagatctgcttctggggcacatgttaacctccatcgaggacagggaagaagaaatgccgtgttttaaggcagcatctatagctccagagaccctaacgggcactagacttgtgaagaaatattgtgctatttggggctgaatataagacacttttaaggtcatttaggttttggtttgaaaagttctggtcctggagctctatgcttttgttgttttcctgagtttctgtatcacagaaaaagaagacaatttgtttctgttcctgaagaacccatctaggtgtttaccaggataacattagcactccgggaaagaagggtctagattgtgtaataggacttggaggtttcccaatcaacaacatttttcctctcctctccccaaacttccccctcttccccactcccttccctttttctctattctctaattctacacagtctccttcagggattgcaataactctcatggcttcatgtacaacctatatgctaatacttactgaataaatgagtgatttattcttcagggttttgatattgttttttaatttatgtactatcataacttccttatttataacccccaagctracacttaaaatactttatactatatccaagtatygtcaagtaatttacatatgcatctattaaattattaataacaaatctttcttcattttgatagctccaagccaggtctggaacatgactgtctccatgacatcagataatagtatgcatgtcaagtgtaggcctcccagggaccgtaatggcccccatgaacgttaccatttggaagttgaagctggaaatactctggttagaaatgagtcgcataagaattgcgatttccgtgtaaaagatcttcaatattcaacagactacacttttaaggtaaaagtatgctctctacattactatagtaccaactacattataatgattgattcatagtacttaaataactttaagaccactgctcacatgagattgagaagctctgatgtgtaatggaatcacacttaaagagtctcaaatatttgactctaaaatttttattcctatagctcaagtcagtggtttaaagcaaatgtttcattggaatattttagaacttcaatatgacttaattatagctaaattattgcttctgtgttaagaagcacaacactttatgcacaacagattattactttaccaaatctaccttttctttactttggctttttatctttattaatgtggaatttttcaattgcaaaatttcacaggtaccttgaggttaggaaatatttgaaataaacactagacaatactagtgagcatacagaatttaaaacactcattatctcactgtctactgatcgtattttgtacatgtaacttcataatatacacatttatatgcayttaacacgtattatcaacattctgagtacacagttttcaaaatacagttttaaaactgtatttttaatatatcactatatcacacacacctttctatgttaaatatttaactactatgtagtttttaatgcctgtataatattctatgtatggctttatcacattctattaactataactatgttggtctctaatataaacaacattccgataacacacttattggtaaagcaaaatttttgaatgtctttaataatttatgtttcataaattcctaaaaatgcatttattgggtcaaaatgtattttgaggctttttggatatgtaactttttttttctataaaatttaccaaattgccctggtgtatcagtgtatgaaatgactgcttcttgagaggctcaccaacactgaatacgcctttctttttctttatttggtggttgaaatatggtattgatatctttcttttaatgaagtttctttacttattgttctttgtgttattctttgcctcttttatccagttttctccggagaaatgccttgaatattaatgatattaaactctttgtcacatgcgtaaaaatgttatcagtttataatttgccttttagttttcttcacagcactttgtcttacataattcccctttttatttttaaacaaatgtatctgtcacttttattcctgttaaatagaaatttccatagttaattttttaatatgatgttgacaaacggcctcatattctttttttgttttgttttgttttgttttgtttgtttgttttgttgttgttttttgttttgagagggagtcctgctctgtcacccaggctggagtgtggtggcgtgatctcggctcactgcaacctccgcctcccgggttcaaatgattctcctgcctcagcctcctgagtagctgggattacaggcacctgccaccacacctggcaaatttttgtattttcagtagagataggttttcaccatgttggccaggctggtctggaactcctgacctcaagtaatccgcctgcctcagcctcccaaattgttgggattacaggtgtgagccaccgtgcccggcccatattctttatcacttaaagaagtgttttcatatttataaactttttgattttgtttttgaactggaaatgtcggttggattttatcgatttttagggcattatgatagatgatgccatagttgtgatgccctggtgtgattagtttaaatgatgcaaaaccattgtcacattctaagagaaaaacccctgctctgtcattgtgtgttattctctcagagtattattgaaatcaacagcctattattgtctttattagtagatattcaaaaaggagatcattcagtgagtagagacggtgttggcataggcgttggatgacatcattcttattaaatttggtataaaggttacactgatctgataaaacacattgcttatatgttcctgtttttctgtatcatataactttttaaaaaaattttattattattttttgagaaagagtctcgctttgtcacccaggctggagtgaagtggcgtgatctcggctcctgcaacctccgcctcccaggttcaagcgattctcctgcctcagcctcccaagaagctgggattacaggcatgcaccaccatgcctggctaatttttgtatttttagtagagacgggggttcaccatgttggccaggctggcctagaactcctgatctcaagtgatctgcccaccttacctcccaaagtgctgggattacaggcgtgagctactgtgccaggcctatattatataactttaaatagtataggagtgatttgttcctgaaaaatttgtcttcattcctttcatgcagagaaattctttaagactcatttatatcttctttcaataggattagtcttttcagatattttactctttttgagtgagtgtgctatatatattttttcaaagaatagtcaacctaaaagaaatattttcttattgtcacatcattgtgtattatacttcattccccactgcttctccagtgcccattaagctccaggtgcactggtttctctataatttctcagaggcacctaggtgttactctttttagccacctccctccacgctcttcccacttcctagaatatgcctctcccactcttcaaatcgtataagttactatggaaaaatataggtgtacatcatattaaaatacaaccttaacgttcaaagtaggagataattattcagtttcgaattctcttcccccaatcttcaaaagatggtttttgttttctttattatacttgccataccttcttattatgcttatttctgtctccactatcatgttttgtgttcactccttcatgagagagcagtcatttcagctttttcaccattgtgatctctggttaataaattaatgaagttgatttattagtattacttttccatagatttattttgatgctcttcaggtggctttcggattaaaagtgttttcttccttgtaattttttttcatttttataaactaaagggaaaaaaaaggctatggattgtactttggtaaaattttgactgtaacccatgtctatatcgtttgtcactaatttctgaaggccttcacatgaaatgtaatcaatgattcttaaagtaaaacattttgattattgatgatttctaatgagtctgtagttataatttggaagagtttttaatatatccattatttaagagagtttttctacatttctggtgctttaatttcttattgctactaattattagctgataaaagttaattggcttttacaatttctgccttttaggatttgtagaataatttttacagctctatgtgtgatatttatgaatattctgtgaatattgggtaaattatatattctccataggataaaagcttagatatatatttgtcagatttattatatttattattattctcttttaatgatattattcaaatatattttacttaaatttttttggtcaaggattcttactgctcttttgctcttttcattttccctgtatatgtaaattgttttcacttcatttgtattacattttatgagacacaggtgtttatgcattatgcctatatagtaaattttactatatatccatttgcccttaaaaaaatgtatgtgcattttatgcataattctagtaaacagcttatggttgaatttccttttttaattaaatattagcctattaatagggaattttaactttatgaatattttgatgtattggattttatttcttcatccagtttcattattttaaataattatttaataattgtttaataactataaatatttttattgctaagtgagataagatatctttttgattgtcttttcaaatatatttgacaacatactgacataaccttgaagtttaaagcaaatcagcatacttttattgtatgcatggtatgaaagataatataaatgttttacattgtgatatataatatatatatatatataaattcacattagcaaactaattattttattttttgttactgaaattcaggcctattttcacaatggagactatcctggagaaccctttattttacatcattcaacatcttgtaagttatcactgggctatttattatatatattaagatatatattaatgcttataaagctatattattttacacttataatcacatttgattgttaaatgcttaaataatatctcttccgtaaatgtaatatttttaattgtcagtaaaaccatacatatatatgtaaatatatttaaatacaatatcttaaattcaagttaggagattcaattattaaaggtttgttgaattcataagaggatttatatacccaaactattaaattatgtttatgtttatgaaatatcgtcatgttagtaacatttttcgtgtactattttagattatctattttattctgtctcttcagcatatgtttagcagaagtgggccttagatacaagtctgtcttgatttacttaatggaagctaatataagcactccctaataacaatatacttatgtaaatatttatcactgatatttaaaatattttcatcaaagtaaaggtgtacatgaaaaattacttagaattaaatttcattataataatgaaaataacagctgcatgttacattccccacccacaattctgtttgccaggcaaccacttttaaccatttctatttttgggtctccttatagtttccttcatatatatatatatatatataaacaatattgtatactgctctttctagagttactaacattaccaattgatctgagcctatggaggaaggagacctagtactctactttgggctttctctacyggttaacattgtaaatagaattatttaagcctgtatgtactttgttgtcagcaacttctaggtctttctatctttgccacttctagttcttcctctcttacatatgttacatatgcacatatgcatgtgcacaatcactggtatgaatgcaaagtcaaaagagaaaatataaaaacagcttattttccaaactgctttactaagccctctgcaaagttttagttctttctgctcagatttatgaaataaaaactccctgtgttaaatgtcaaaaaagtccagcaagatagctttgattttatttccacattacctttttcttttataatatctttataataaaaatgacttcattgactctttcctattaaattgtaaataatttatagcagtcatagactcagctgaacattcacactcacatcttaataggccagatctgaaacatttcacctggaaagacacagaacaaaaagcacagcatgctagcaagggagcctggcagtgggaatccttgcagcgggaatccttgcagcagtgcacacagcaatccagctacttttcttatgacactctcaaagacaactgagatatgagagaatgagaccacatgtgtaggtgtaggagctgcattccaaaaggaatcagtatctcttatactatttccatgggcatagcttccagacatgccaacaggggtgtgctcagttatgagcgggcactgcactcagggaaacccaaagctggtacttcccatgaggacaatagagttcacatatagcactccctgttcaggtgtagtttagcaatcaagggtcattttgccattagcaatgttgtctggtaaccagctaatattccacttttatcaggtttccaggtcaacggagccaaaaaattagccctcatctttttccacaaaggagacaacattgtattcactctctgctcacaatatcattatcctaagagataaataatatagtttcttttaaaatagtgatatctgttccaggaaaggacttgggctgtgaattgctagggtacagctactagggatgtgttgttgggtttccccggcataatattccaccacctgtactttgacatcattgtcaattgaactcctggggaccctttcttcttgctctgatctggactctcacatgccatcttgaaatattcccccatcagttttctggtttagatttgctgtatcacacatagttatttttttttctgtctgagttcactgatatatgttctctagtgtaagaaaaataattctaattctcccatacaaaaaaaatttttattctgctctggcacttgttcagtgtatcgacttggtataaaattctaagttaaaaattttagaatttaaaaattatttctgtcttattttcctgaatccaattttactttctaattccatcctgattctctctctctctctctctctctctctttttttggtctgttcccaagttttcctcccctggaaatgctaggtttctgtctttattcttggtcttacctgaattttttgtttgttttgttttgtttgtttttgtttttgtttttagagggagtttcgctcttgttgcccaggctggagtgcagtggcataatctcggctcactgcaacttctgcctcctgggttcaagtgattctcctgcttcagcttcctgagtagctgggattacaggcaggcaccaccacacctggctaatttttgtatttttagtagagaagggatttcaccatgttggttaggctagtcttgaactcttgatctcaaatgatccacctgccttggcctcccaaagtgctgggattacaggtgtgatccactgtgcctggccctgaatctttttcattcattttttctggatgctattgacctttgtaacctgaagatttatatatctgagaattctttgctccattttcttcccatagtctttggttgagtctattagtcataaaactcataagttgacttattattttggcattcccctttggtgttgatgttttccttaaaagcttggttcttattggtagtctagtcatagtcacagtgagacaacaggaaaggttgattagatgttctgtggtccttagaagatcttggtgactgaggagatttcctatgatattgctgatttatttttttctgatatcattcattatcaccaaaaactaattaatccccagaaattaatctccagaattaccctactccttgttgtgtggtaaagtgtgaaaaagtggttcttctcacagtaggacaggaagataggtgtccaactattgcatatgtggacaattacattgtcctcctaattttagtcctgtgcctcatcccttycctgtactgagcctgactttattctcagtctctcactgctttcatttaattttccttttgtcttctcctccctggtagtattttttcaagaagatattttttgttattgttgttgttgttgttattgtttttgtaaatagacatttgacttccatgttctgacccatgattcacatttactgcatatgtcactttcaaacctgagactcaggcattctgagtaaatggaatctattcctttgatttaggctgtggcctcctttcttttgttttctaccttctacaacttgttgaaattgctctacttctaatttcccttctctcattttcactgtcattataaatctatggcattttcagttttttaatattagcagggttcctggaaagaagggggaaacacatgtgtgcttagaatgcaagctttatctgaagacttggctattttattaagtttgttgagaaaagtctgatgctgcttaatatttttgtagaacttaatctaattattatggattggaatgctaacttacagtcatttgcagtttcttgcaaaatcttacttcagagtattctagaagttagatgttgcctctgatgaggtttttattcacaaaatctggaaacaatcatgctgattgatatatgtatactagtaatcactggtatggattgacaatttcagtgaaaggaatttcagatagagataagacaaggaacactttgggtcattttargagcctattgcaataagaacttcttccctaaaaatgttcactgcaatccacctatatattcacattcatstatcccatccatttttatatatgccggcagtataaatacccctttaaaggagataaaattatttctattttatatatgaggaaactcaagtttggataatttaatctatttgccctatgagtcaaagaaatgacagagcctgaattcaagctcaggtcttacagtctgtatctgaaattactttcaatattcctgtttgtatgagtttccagttacagaaattttgatcatgagatgaactgtttctggcagctgtttgcttgatagagtcatttccttctttccagttgtagaaaaactgtctcatgctcaaggcctccacttgccatacagaaaatacatcccctctacttccttatcaccctacttatttttttcagagtatatgaaaaaatgcataattatttcatttgttcacttacctttcttttttcttttcttttctttcctttttttttttttcttgacagagtcttgctctgtcgtccaggttggagtacagtggtgcaatcttggctcactgcaacctctgcctcctcggttcaagtgattctcatcccttagcctcccaagtagttggcattacagacacacaccatgcctggctaattttttgtatatttagtagagatgaggtttcaccatgttggccaggctgctctcaaactcctggcctcaagtgatccacacgcctcggcctcccaaagtgctggggttacaggggtaagccactgcgcctgtctgttcagttacctttctagtgtctgtttcccccaaagagaatgcaaatttcctgaaaactaatattatctctgccttatattctatagcatttccacggactgtcttcctttttatcttcacagcccttatatcttctcacctacatgaccatttacttatttcttctgttcattattaattatctatttttcttcactagagagtaagttccatgaggacaggacccttgtttttctttatgtagatatcctaagtacctagagctgagtttggcagatgaccaaaagccaaaaatattttttttgtgaatagtgaataattagtacttactacttcccagccaccgtgctacgtgtttactgtgaatcaacacctttagccacattttaggattttgggaaaggagggacaaagataataaggaatctggccaagttcccaactaagaagtggtagagctaggattggaagctaagcagtcgggctctggagctgaggctcttaagtcaccgcattattttgctgcattttcactacataagaaaaggtgaatatactggagatatttccaacacaccctctcttctatgccctttccctaggaaagggcaggatttcacattaaacttagtgaatatttaagtcagggtaagtcttatcctaactatagaatgaaaccatttttgtctcttagtgaatggattttacacctcagtgaacaggtaagagggtttatctttgtgaagtagaagtctttctcatccccttaagaggctacccacttctgcatataaagttaaactatatgagtttgtctccaaaatttataataactggattacctccttgatcccttcaaaatgaagtgtctgataaaaaaagagaattaaatttaaatgtgtcttatgaaagaacattatttaatcaaaagaaagataattattcttctattcttactctccttaaatataaaatgttttcattggttcagaacaatatagccaaaatcacagaattagaaatttattgtatttgaccttattctaaaatgtttattttttaaaacctcacaataaatttaaaaatattaaaatataaatactttggaggtgattattcaaccagtctagcaagttatttgacaatcgttctctgaatgtattatttttcatttctagataattctaaggcactgatagcatttctggcatttctgattattgtgacatcaatagccctgcttgttgttctctacaaaatctatgatctacataagaaaagatcctggtaagagttgattwtaaawttttaaataataatggtattagtaatggtgcaaacgcatatccatatggcagtgatggaaccagttaaatgaaatatgtgaactagagagaagacagcatacagcccacttcatgacacaacttttaatcaaaaacttttagtatggttttattggtttgaattaaacattaatattattttctaaatttactaataatgttgtggacttgtttaataataaccagtgaaaagaatrtgtgtggtttttagtacaaagtgggtcagagggatctaggagtgtcaaaagaaaaagaaaggagggagatgtctggggaagttaatgtgtttctttggtcagaaacaaccacatcttatgaaaaacagaagatttaaaataaaatcatttagctacttatgtgagtttagcagacaattcttggttgttttctttcctccctcaccctcctctctcctctctgactctgctttctcccatccttctgtcctccctctgctcaaggctcttcctcccttccctcctttcctcttctcctctcctctcttccccttttcttatccctgacttccttcctttgttccttcaatatattcattaaatataagtaaaataccaattgaattttgtgcttcttgagaatatagaaacttatttttcctattttcacagcaatttagatgaacagcaggagcttgttgaaaggggtaagtatgtatatttttgctgatgactattccttcccctgcatttgaatccattcattttatttatttatttatttatatttattttaagacagagtctcattctgtctcccaggctgaagtgtggtggtgcaatctctgcttattgcagcctccgcctccctgttgaagcaattctcatgtgcctcagcttcccaagtatctgggattacagacacacatcaccaggcccagctaatttttgtatttttagtagagatgggatatcaccatgctgcccaagctggtcttgaactgctggtctcaagtaatccacccaccttggcctcccaaagtgctgggattataggcatgaaccattgcgcccgtccccattcattttaaataagaattgggcatttttagtttaacttggacttttgttgatacagtgataaaacttaaattcctttactcactcagcacctgtgaagttcccagtgtacgccaagcattgtgccaggtactgagagtactacagtgacaggcacagactctgcccttaaagggtttagaatctaatagaggaaagcagatatctcaacaaatatgacggtaatttgatacatgccctagtagttgaatgtgtatagttctatagatatatggaagatagaaaactgtgtgcaagggcagaaatctggtctgttaagattgtggggaaccaatggacaaatgagggagtggtggagggacgagtggatggaagtcacagagatggggagatgggatgtctcctcaagtccctgccagggtggaatggtggctgctcccactaaagacacatttatggattggacaaagaacagcaatttgacttgggagaagaaaacacatttgtttatcttttttttcaacatttatattctttaattttttaaaaatgtgatttctgatccagtaaaaggggacaaagtttcagaaattgaacctttgtttacaataaagaaatgtacttgctttctcatgcttaagacaggaataatttcagaactcctttgtctgtgttaatctgtgttggaagtgtttccctctggtaatagcaggtaccaggtctctatgcagaaactttagggctgaatctttggagctccttaaaaggctttatttttctttgcagaatgtaacactatctgatcccttattacatatttattcatttggtcattgactatcctctcctaactagaatgtaagctttgtgaaagcgtggaggcttttttcttattcactgctttatgcccagtaccaaagtgagtacctaggatttgataaatattagtgaataaataacactgacatagggtatcgtgaggattcattttgataggctgagggaggaatgaagagtacaatcagtaataaacacctgagcagaacaggaaaatccatctcaaggagttaaggtggacttggaaagtgtcaatgaaatattttatctcaaaattggtacygattgcaccttggaacgcagtagaatttactcactcagaccccatgaaaccctgaatgtggccctcagttcagaatgaatgaataccaggcattcccaacaacctaaagaaacaattgcacatagccagtttgagagctgtgattgtatagaaagtttccatgggcaataagataaatgggtcaccctcatggataacttctttctttatctgataaactggtaaaattaatatgattactgaaagaaacactatcagtagtacatggaagagtaggagaaacataattttacatatgcgacagcttaaattctcttacctttctaaagctgttggttttcaagttccatatgcaattgtagctttttatggttagtatactttttaatcttcagtaagttatttcacaaacatggtatataatgtgtttcatatacttgaagcataacaaattaatacaacttgtttcaccatttagtgtaaacagatgatcaaattaagctgagtcatgggtataagggtattaatcatattgtcttatttcatttgcatgtttacagtatttcacaagttgaaaatgaaaatacaaagaaaaataatattgtattataaataaataattatagtaattgctataaaatgcatatagtcaaacgtgaatgtccttataatggtgatgtttggtctgggatcccttctcttaagcatagaaaatggggaagaacattctagtagagagaacaatataaagcccagaagagatctgaagtacaagattgaaaagtcattgatttataggtaaatgtttgtatgtgagtgagatttctcagatgaaatgtgtaygaggaggaaagaagctaaaggattgagtacacggtgtaaatttaatgaaatgtgtatgcccacctgaaagacacatgtaactagtattgaatctttaatatgtttccagatgatgaaaaacaactgatgaatgtggagccaatccatgcagatattttgttggaaacttataagaggaagattgctgatgaaggaagactttttctggctgaatttcaggtgtgtgttgcttttgttatatgatgataaattcgacatcaagacagttccactttaagtgtatttatattgccatttgcctttataatttatcccacttgatattgcaacataagcaaagtagatattattagcagatctctatgaaccagaagagagactcatagaggttgacgggattatagtgtagagctagtaaatattttaatgtagtgctttattgtattatgaagttgtgtcacaaaatgtatttggctgattttgtagttgtactctagatactcatccaagtatctgtttttaaatgaatttgatagtgacacaacaactaatcctaaatttgtccccactcaagagatttgttctgaaagttgtcaatcattaatttgtaagaaaaaagttttttttttaacataattcctgatcttaatttygattactctaagcaaatttttttatcaatatgaagaaaatattttacaggatatctcatttactcaaaacggtcattggtaagggggaaattatttttcctgaatctgctgtgatccaagaaatcgttgtttctttcagagcatcccgcgggtgttcagcaagtttcctataaaggaagctcgaaagccctttaaccagaataaaaaccgttatgttgacattcttccttgtgagtatttattgagtgctgaattcccatatattaggctacttgattattcactatttcacttgtttatttttcttttccttaaacagatgattataaccgtgttgaactctctgagataaacggagatgcagggtcaaactacataaatgccagctatattgatgtgagtaaaaatttgcatttttcttatacctacatatttcattcagctccttgtttgtcttggtaaaattttagaaatattattaaaaatattttgaagtgagcccatatgtcactgatataaacaaaaaattatcaatattagcaaggatagttatttattatgtgactattggtattaggtataacatagaattttcctctacaaacaaaattatattaagaattaatttaatatactctggtgtctattatgtgctagatattagactaaatattctatgcatatatttctcacaagaagtccacatttgcctcagccatgtgccgtataggtgaggactgggaggctcagtttagttaattaccttgttgttgttcacacaattggtaaatatttgagttgaaattcaaccagagtctgactgactccaaaatgttatgctttaatttcatcacactaaatttcagcagacattcctcatcaacatgatcatctatccattggatttatgcagaaatgtaaatgtccgtacgtggttaatttatttaaaatattttaaaatttaatttattatacaaatgttaattaatgtattacataggttaaataattttaaacagtataaaaatatatacagactgaaaaaattctttttgtctccccaaatctgccattttcccagtgtcctcacctaccagaaataactatattttctattcaaatatatatggtaattatggtatcaggttacttatgtttccccaatggaacttagagctccctgaaagcatgtgtcttctgcttttagataggtgattgacatattgtagctattcaataaatacttattaaataaatgaatgtatgcgcaataatgtgtcatgagatagaagtttcaggaagttacttaaattaatgttgaattcttgtgacccatgtttcaaatttaatccaatggcaaaggtcatccctytctgaagagctcctttagttactgaggtgaatttaggagtctgagataattctggaagaagccagtataatattttatctgcctctgtactcctttatcttggtaacaggagcagagaaagcagacatagtaggtaatgaaatgaaagttattatatctcttatctgaaatggcaaagaagtctagggaatcatattccagcagaagttaagaggtgaaaatgcgggtaaaatctaagaatgatttgtttaaagaaattgagtaaaaatcccaaaagtaactacatggctggtgagcttgtttaaatagtggtagatgatcctataagagttggcaggatataaaatgttgaaatgtctagagcactcttgtaaattaccacagcatcgcagatgaagatgaaacctagtattaaaattgtttgaagtttacagcaaagatacatgaaagtcatgaatattctttgcaaatgctaacatgtttagcacaattaaatgcctgaccaccaattaataagattcccttaatactttgaaactgcccagagaaattcacaatcacaaaatgatggatctgaagcaattcctctaactcacaatttttcctgttaatgagtaattgaatgttyagcaaatgacatatctytgcatgtgttttcaatagggtttcaaagaacccaggaaatacattgctgcacaaggtaatttctttgataatccaatattctttttgaaaaatttttatagcacttttaagaaaatttttcttatcagcttttatttgtttacctcctaggtcccagggatgaaactgttgatgatttctggaggatgatttgggaacagaaagccacagttattgtcatggtcactcgatgtgaagaaggaaacagggtaagaaccaagaagattcatagtgtgggtcttggggttaggaaaacaaggtgttgaatggcattttgaaaagccacatgtatctgcctgatgactaaaacagagagttctctattttaatcagtgttaacatttaatttaaaattttcatacatgtagaaaactaaaacttttaacatacaaatatatgtctatatgcataaaatttcaatgcttctgattaattgctagactcttaacttgattcctgtttctttgcagtattgttataagttcagtatatttcactgttttaacttcacaagaccttaatactcgaaacaaaactgaccttgggcagataggtggtgagtcatgtaatgtgactttaggaataaaagcctctctgtccccctacctaaaattaaccacaagcaatcatatcctttttgctgacaactgattatgtcctctcttaacatgcatctaagcctggaaagatcatcctgctaaaaagtatgaaggaaattcttcaggacacattagtgggaaatagaatatatttcaagcatcacagcttaaggtttatatgtgcttaaactatacaactgttttgagaatttcaaatgagtataggttttgttttcactgtttaaagaaagtttgataaaaaattggcttaaattaaaaattaaaatacttaataattttttaaaatgtagaacaagtgtgcagaatactggccgtcaatggaagagggyactcgggcttttggagatgttgttgtaaagatcaaccagcacaaaagatgtccagattacatcattcagaaattgaacattgtaaatgtgrgtttgctttttacataatttttgttttgatacttttttataaaaatataattatggaatattaaaagtgagaaaataaaatatatcaggaaaaattatttttgataacctttaggatgaaagctgtggttagaacaatgacaaaaatcaatagggtcaaatttaagtcactggtcaagacgtttttgtccaactcaaatcgaaagaattatactgtattaattaattatctgttttaattattaaaaaaagagggaaggtccattaaatgtgttgaaaatataatcaaattattaaaagaataagcaatttgtcttcattgtcagtgagttcctacttttatgaaaaaaaattatattatttccataagagaaatgacagcattagagaacactgtaagaagtataaagttctaactatgcagcagagatagaatgtttagttcagaaaataaggaggtcattgtggccttagataatagttaaaatagagatcgtcatgcatgttatataattccattatatgaaaaatccacaataggcaagtcaataaagacagaaagtagatcagtggttgcctggagctgaggaggtcaaacagaaatggggagtggctgcaaataagaacaggctttcattttgtgatggtgaaaatgttctataattagatattggtgatggttgtactatttagtgartgtaatatgaataccaaattgtacattttaaactggtgaactttatggtatgtaaaatgtgtatctcttatttccaacaaatgaattttatttttaattttttggggtacatggtaggtgtgtatattcatggggtaaatgagatgttttgattgaggcatacaatgcataacaatcacatcagggtaaatggggcatccatcatcccaagcatttatcttttctttgtgttacaaacaacccagttatactcttttggttattttgaaatgtataataaattattgttgaatagtcaccctgttgtgctatcaaatacaaggtcttattcattttatctaattatatttttgtacacattaaycatcaccatttccacccctgccatacccttccaatcctttggtaaccatcattctactctgtatatccaagagttcagttattttaaattttggctcccacaaataagtaacaacatatgaagtttgtatttctgtgtctggcttatttcacttaaygtaagtcctccaggtccatccatgttgttgcaaatgactagatcttacccctttttatggctgaataatacttcattgtatatatgtactacattttgtttatccattcatcagtcaactgatgcttaggttgtttccaaaagttgactactatgaatagtgctccaataaacgtgggagtgcagattatctcttcaatctactgtttcctttctttgcggtatatacctagcagtgggattgctggatcatatggtagtgctatttttagtttttttgagaaacctccaaacagttctacatagttgttgtactaatttactttctcaccaacattgtctgagggttttctttccttcacatccttgcaagcattcattcttggctatcttttatatataagttgttataactggagcatagtgataacttaatgtagttttgatttgcatttctctgatagtaaataatgttgaccacctttttatttatctgtttaccatttgtatgtcttcttttgagaaatgtctattcagatcttttgcctatttaaaaatcagattattagatttttcattataaagttctgtaagcttcttatgtattctggatattaatgctttgtcagatggatagttggcaaatattttccctcattctgtggcttgtctcttcactttgttgattgttttctttgctatacagaagctttctaacttgatgtaattctacttgttcatttttgctatggttgcctgtgcttgtggggtattgttgaataaaactttgcacaaaccaatgccctggagagtttccccaacattttcttttagtagtttcatagattaaggtcttagatctaagtctaatccattttttttatttaatgtttgtatacagcaagagatagggctttagtttcattcttccacatatgaatatccagttttcacagtacaatctattgtggagactgtcctttccccaatgcatattctgggtacctgtatcaaaaatgagtccactgtagagttgtttcattgctctatgtatgtttttatgccagtaccatgctgttctggttactatagctctgaagtataatttcaaattaggtattgtgattcctctagttttgttcttttcactcaggatggctttggctattctgggtcttttgtggtttcatataaatattaggattattttttctatttgtaaagaacattattggtattttgatagatattgcattgaatctgtagatagttttgagtagtatggacattttaayaatactgagtctttcaattcatgaacatggaatagctttccaktttttatgtcctcttcaatttcttgcatcaatgtttcatagttttcattgtagagatctttcacttctttggttaagtttattcctaggtatttatgttgtttttatctattgcaaacgagattactttcttgatttctttttcagattgttcaatgttagcatataaaaacactgcttgttttaatgttgattttatatctcatgaccttactgaatttgttaatcagttctaatagttttttggtggagtatttaggtttttccaaatataagatmatggaatgtgcaaacaagtataattggacttcttcctttccaatttggatgccttgtgtttctttctcttgtctgatggctctagctgggacttccagttgaacaacagtggtgaaagtgggcatccttgtctttatccagatcttagaagaaaggctttcagttttttctcatttaatatgatgctagctgtgggtgtgtcatatatgactttcattctgttgaggtatattccttcgttaccctgttttttgaggtttcttattatgaagagatgttgaattttatggcataatttttcagcatcaattgaaatgatcatgtcttttgtccttcattctgttgatataatgtatcacaataattgatttgtgtatgttgaaccatccttgcatcccttggataaatgccacttgatcaggatgaatgatctttttaaagtgttgttgaattcagtttgctagtattttgttgaggatttttgcatcagtattcatcagggatattgaccrgtagttttcttttttttgatgtgtctttgtctggttttggtatcagagtaatactggccttgcagaatgagtttggaagaattcctttctcttccattttttggaatagttagagtagaattggtactagttcttctttaaatgtttggtaaaatgtggtagtgaagccattaggtcccgggcttttctttgctgggaaacttttcatgacaacctccgtttcattacttgttgtctgttcaggttttgggtaccaaaaataatggcaacaacaacttttcaagacatggagagcaaaataacacatgaattgaaacaagaaaatggcaaaatgtggaggaatgaagttaaaatatagcattttcattatattacactttgcttgttagtttgtttacacaatgtctgttgtcttcagtgtaaaataatgcattataagatatgataaccccaaatccaaaagcattcaacagatacataaaaataaaaagcaagaaattaaaacagaccaccagagaaaatcaccttcacttaaaggaagacaggaagaaaagaaagaaggaagaggaggccacaaaacaaccataaaagacataacaaaatggcaggagtaagtctttatttatcagtaataacattgaatatcagtagactaaactctctaaacaaaatacatagagtggctgaatagatattaataaaacaagacccaacaatctgttgcttacaagaaacattcttcacctgtaaagacacaaatagacttaaaataagagatggaaaattatattctttgtaaatggaaacctaaaaagagaaggagtacctatacttatataacacaggtatatttcaacacaaaaactaataaaagagacaccgattgtctctacataatgataaaggagtcaattcagcaagaggatataacaattgtaaatatatatgcaactaatactggagcacacagatatataaagcaaatattgttagagctaaagagagagatagactccaatacaataatagttggagacttcaacactctactttcagcattaggcagatcacccaggaagaaaatcaacaaagaaacattggtcttaatgtgcattgtagaccaaatgaacctaatagacatttatagaacacttcaaccaatggctgaagaatacacattcttctcctcagcccatggatcattctcagggacataccttatgttatgctacaaaacaagtcttacaaaattaaaaaaaaattatataaacttttctttgactacagtagaactagaaatcaataacaagaataagtttggaaactatacaaactcatggagagtgaacaatatattcctcaatgaccactgattcaatgaggaaatcactaaggaaattttaaaatttttcaaaacaaatgaaaatggaaacacaacaaaccaaatcctgtgtgatacagtgaaagcagtactaagagaaaagtttgtaagagtaagcacctacattaaaaaagaaaaatttcaaataaacaacataatgatacatttcaaagaactagaaaagcaagagcaaactgaactgtaaattagaagaaaaaataataaagatcaaagtagaaataaatgaaactgaaataaaaaaatacaaagcatcaatgaaataaaatgttgtttttaaaaagagaaaattgacaggccaggtgcagtggctcatgcctgtaatcccagtactttaagaggacaagtcgggtgtatcatttgaggtcaggagtttgagaccagcctggccaatatggtgaaaccccgtctctactaaaaatacaaaaaaatrttagccaggtgtggtggcatgcacctgtaatcccagttacttgggagactgaggcagtagaatcacttgaacctgggaagccgaggttgcagtgagccaagattgcatcattacactcaagcctgggctttgcagtgagactttatctcaaaaaaaaagataaaattgacaaacctttagtcagactaaggaaaaaagagtggagactcaaatgcgtacagtcagagatgaaaaaagagacattgccactgatacttcagaaatttaaaagattatgagatgctactatgagcagttatatgctaatgaattggaaaacttagaagaaatggataaattcctagatacatgcaacctatcaagattgtaaaatgtctcttgatagagctgtttaaaaaactacaagtctttacatgggggttaagattttctcttaatttcatttattgtagggcttttagtaatctaaattttatttttgtatagtctagctatattttctacaggagaaacagacttagtctatatatctccgtaggtcttcttaggtttccatggtattactaattgttatgtctatagagtgctgtgaaacaatcctatcaatagtttctggccaaacacttgtttgactaagccacaaaggcacctgctccatagatatgaggatatatttctagattgatgcctatctggctacattctgtagtctgggtttactggtgttaattaactcagtttgtgtgtttcttttgttatctaaatgtagatggttctttatacctggccatagaattatgacttatgcatcttatggtggttaccttgaaattagaacaaacctgagctctaatctggggctgactttcctcagtcgtctctctacattctgtgttgacaatgctaccatgtgaaggcctaaggaatacaatgttcatcaaataattaatcagactttgctcacatatgaattagttctgtttgctggcctatcaagcagaagtattttaaacagttgtgagaatgacctttaccaaatcattttaaacacaaatccaaaaagcttccacccatgcaccccacttttatggtgtatgtttattttgggttttttttgcttgacagcatgcaagttcctagaaattttggttatacttttaaagaaagtattaccttacttaccttactgttaagttattgcttacagggtagtacatgcaagtcctgcacaatatcttaactactagttattgattagaaaggaaaacacaaccatggttgagaaaatatataagacacctgaggaaactatgaactcttttgagtagtttatgtttacacgaggagactttgtactggtactcccttccacttatttatgtttcatagtttgctttaaaaaaatcatctcaaagaaaatattatctcttgactagaaaaaagaaaaagcaactggaagagaggtgactcacattcagttcaccagctggccagaccacggggtgcctgaggatcctcacttgctcctcaaactgagaaggagagtgaatgccttcagcaatttcttcagtggtcccattgtggtgcactgcaggtaggaaaaacgaacaaaaaaaaaaaacaacaacaaaaaaactccaacagaatccacctgcctagggctgttagagacatctttccctttggcaattgctattttgggaaacaacctatgggagaagcttagattcttatattggcttcacacctgacagcttttccatgatcatgcctctgcttttttttgcttggtttgccagtgctggtgttgggcgcacaggaacctatatcggaattgatgccatgctagaaggcctggaagccgagaacaaagtggatgtttatggttatgttgtcaagctaaggcgacagagatgcctgatggttcaagtagaggtatgttctaacctttagtgattattctcactttggttttttggacttaaatcttttccaagtgataataatgatattttttaaaaatccaaattcttcacaacctcaaacagtagatgatttcctgaaaactaaaacgtggtaatcaccagaaatacttagaagcatttttcattagtgcctaaaagtactgtggaagaaagatgaccacaaaatatataatttttaaaataatgaactactgttaacatatatcagattggcaaaaaaagtaaaaatgctgaaaatagatttggcatcatctcataaaattaaactgaagagacagaatagtatagtaatcaacagctggttttagaaactacacttacaggtttcaaatcttgcttttaattattaatacgagggtgagtggtattgtttattaagtaattttagtctgactgcacctcagttaagtcatctgtaaaatggaracaatgataatacctcacagacttataaccacaaaagtaatacaaataaagcacttaaacaagtccctggcccatgctatgcatttggtgattgtaagtgatggtaattactgaaaatgtctgtatttgacccagcaaaatcacatatatgcatatacccaagagaagcatcaactagaaacatttgcaagaatgtgcattgcattcagcattgtcaaaatagcaaaaaaaaaaaaaaaaaaaaagtgaaatacatatcaatgaaagaatggaaacaccgtaaatatgtatcaataggggaataggaagacaaaatgtggacatgtgaactctctgtacaacaaatgctatgttgtggtagaaagcaatgatctaggtttgtgtctgtctgtttggagagatgctcagatgaaaacaatgagtgagtaaagctgccatacgaaacattcaagatataatttatgtgatttaaaaaaaacatgaaaatgtacaatgcktgtgattacagatacatagatagcagtgtagaaacataaaaacaaattgttaaccaggtaaaaagaaattatttacagtggaaaataaagtacagtggaaagacagtgccaaactcagggaactaaaggtggcggttaaagaggattatcagaagtataccatttccttgaaaatactggattcaaacaaaataagcagtaaagagtagttaaatctgggtttggcccattggattacaaaaaaataattttcttattaaaagaatacttttcttattttaagttctaaaaactataaaaaaaggttttctaaggaataacaacttgcttttttatctcttgaatatactgtgaaatttattatagttttacattcagtaatttggcttactgacccaataatcactaaaggaagtaacatacaatgttctttagtttttaggaataaaagttgtgcaatacagagtacatggataatctatttgcaaagtaattcttttctgaaaaaataatctgaaaatagaatttgctcatattccagaaaactctgagagtgaacttccagaatatttaaatattatagatatcaatttactttgccatgaattgttccaatatgagcaaatttatggggaatgtatattttatttaaatatgacttggaggactctagattatcagttaactatctgtatttgttcttgaaattgtaggcccagtacatcttgatccatcaggctttggtggaatacaatcagtttggagaaacagaagtgaatttgtctgaattacatccatatctacataacatgaagaaaagggatccacccagtgagccgtctccactagaggctgaattccaggtaatgatagtgacaacaataataataattacagataacttttattcagtgtcatctactttctaggtgtttgctatgcacttgacatagtgcttgcatttagtcttcaccagaaccaaaggagcacagatgagaaaactaggacacagtgagttaagagaaatgcctgaatctacacaactattacataggagatttctttagacccagaaatctgattctattgctaatacttttagccattcctcattaagctggtataaaatgaagtgtcaaaataatagtatatagccacaaaactggtctgccaaaggcaatacagcatatcacctttaaaaatcgtatctggttttggtttgtaaaggaaatcattagaagagtttatgactgcttaggaagttgaactggctggagctggtagacacacagtaaaggataagtacatgtgtcttaacctatttattaggcaattattctcacagctaacctagcatgtagttcactataatttcagagagtttgcatagctgtcctcaaattgctcagttgtcaaaaaaatgttttgtgttttttttgttccacctatgatttccaggttactgagtcattccataatctaccaaactggtaaattcagagtttctaaagaccaggagtgtgcttttaatcacatgcagaaccatttaatgtttaggatcaaagtggggttaaggtgggggtggaggtggagcatgcaataatgaccaagtgactcaatcccccagaagacctgtacttataatggaagaactagcagacacagggtagtctcaaacagagtagtgttttattgttgttttcttgcttttctagctgataaattaaccttattcaatatacctgccctactaatccacataaacacataagctgttagagacagttatacatttaagttaaacattcttatgaatgtttatttactatagaaaagacagacaatttttttcactaaataaatgtgcttgagtttctgctatgtgccaagtacaattctaggcacaagagtcaaaatgatctgcaagtggacatgggaagaaggatgagaggatgtgatccagatcacagatggaagctgtgaaattattccatttaagcagacagtaagacagaagatgagagtagaaatgcaagtcggttggtaaatttggtattgggaagttgaggcagctcttgcctgatgatctttcatttttcaagaaaatgtgaggctaggtcatcagttgagagttgagagatacaagggcgagtagggcaaagaagagctcaatgcttgaagggtataaactagttacctcaaagtataaaaacaatctccctaggcagaggcagtaagattgccagaagttatcatttgatcacctgaaatttatgattataagtttaaagaggaattagtcagttggttgtattgttttctatggcagcattgagctctttgggggtagaggctgtgtatgcagatagttgagttaaacctatctaggttttgaaaagtgactatttgaaaatagtgaggcaaacgagttgagggtgtttacaaatgaatgatgactgaggtggaaaataaaaagcaaattggccacatgagggaggtgagagaaagtagtaaggataataagttggagactttgatagaattacagattgctaggttgaacatatcagaataaatgactaggaataataggggtaattttcaatagcacagatagttgaacttatgattttagaggtgatgtaatatttggaatgaaacctacaaaggtggaatgatgaaagtggatgactgggaagtggagggaaagtcatgggaggtgaagaagctaagaaatgaagagactagagtcttggatagattattcttgtcaatgttgaattaaccaaaaatgatgacagaccttggaaagaagagaatatacttagccaagcctaaaactaaatgaggtggagtgattcagaaatcaatacctgacacttcccagtgaagccggtggatagaagctagtatagtatgatggcaggaatatcaaagtgcttggttgatttgaaagcaaatgagtagaaatggtttgcaagtagaatcagggatcaaggagaacacgtatcttttcttgaagctgtgaggtaaatggggtgtgaggaggaaagtcaactttttcttaaaagggctgctgagttattggtggtgtccttagctgacatccaggttttaattggtggaaagaaaaaaaaaagggtgaagtgactgttgggagaagatgattaagataaatgggagttcacagatgacagacgatgggcatcakagggcagggaggaaggcactgatgggttagatgtaagagactgggttgtatctgaggatacaaataaccattcaggaataaaaatctggggaatgtggatgcactgggaagcttagacttgtgatggcaagtgaaacaggtagagatttaagagtgacagatcctttgtgtcttagatgaaggtgagccattaattccacctataatcctgagtattgctacagggcataggctgcctcggtgactacactcacaagagcacaaggtgttgtaacagtttccaaaacatctggtccttcatgcagctcatggtggtgttcaagtggcctaaaattcagtgatgatattttctttcactcaattacgtagcaaagaatgaggtttgaaacagggtgccataattagtttgaatgagggtactatgctgaaaaaatatatgtctatatacacacacgtatctacatgcgtgtgtgtgtatataaaatcttaccgaattgtacatgaggagccttctcagtttcagttatttgtaacattatctattatcattaaatattattcacttgacaaatacttatttaaggactagtggaaagactgtaggcaggggtgtcttccagaagaaattggtatttaaactgatacctagagggtaagaaaagttattagagcaaccaaaaggggaaagggtagttcaagcaagaaaaaaaaaaaaagtgtttatgtgccaagagttgaagaacagcttggcccttccaagaattgaggaagctggtttggtagaagtattgagggacccagtaaggtgtaaggctggagaaayagtcaggggcgtatcaataaagactttttatgctattttgaggaggtttgttgtcctcttatagtgatggaaagctgttcatcttcagaagagcatcttctgttttgtgttttagaaggattagagcaggcgagattgaagacaaagaggccagttaggaaattgttgatgttttacaagcgagaaatgaaggcagactggattaagtaggaagaaagaaaactaaaaggatttgtgtatagaaatgatggatcttttctgactaattaggaactgtgggtgagaggaaagcaatctggaaggtgtaaacaaattaagaatgaactttcaaaacatgtgccaagtctcctaagaatgtgttgtctccaaagtttatttctgatcatttaaaataacttaccattgcttttgcaatatagatcaacatcggtctagtggtttcaatttatataagaacaaactatattatttttctatcaagcagctctgaagaaggagacatagtctgttacatatatatctttagtgcatactagccctgtcaaaaggactaaatgcctgagcaatttaaagaaaaaaaatcagaggcaaaccgaaaaattatggcctatagggagcatatgcaaatttcacaaaaattaatgaaatgcttttccttagggagcatcttatgatgcaataagccaatatttacattttaaaggagtttttctgtttttttttttttttttcagagacttccttcatataggagctggaggacacagcacattggaaatcaagaagaaaataaaagtaaaaacaggaattctaatgtcatcccatgtatgtagtttatttttttattttttgtatcagataaagttaagctcttttggatttgtttaatgtgggacacacagtcatataaattatcttgaagcaagttttcaacatttggttgttaatagggaagaagttactaggtattaaaatactagttattgcaagaacttataatcctgaacatttacaatgggctttggagggtagactgtattcagtgttttctttttaccaattatttcagaaatgggttgtcataaaagagaaatatataaagctgggagaaaaaagagcaagtctcttttacccattttctttcatttttagtttatttcagttatttactccagggtaattgacaaatagtaaaaattacatccatttgttctctatatgtttcctttttatcccttataactgggaggttgaaagtaaggggaaaatactctataaattctaaatcttcaaatttaacagatcaaaatatgcacagtttcaatacttgaattctactatttaagcatattaaaatgatcacatatggtaattttattcagctgcataaactaaaattagcatggataaaatataacacaagttgataaattagatgaccaaataaatcagatcagtgcatggttgacctagttaattttcataggagtccttatgaatgtagtttaaaatatggaattgatggtgatatggttaatcaaatcatttgaccaagttattataaattatagaaattaagaaacagtgagaaattataggtcaaataattttctgggctaaataattaatcaaagctacccatataagattgttaatttaatattactggagtataattgagggaaaaaatctacgctatgtattttgtaaacttatatcaagcagaattataatagtccatgggaaattaaagtatatgtatcaaagattaaataatcatatataatgatatgatatctctttgttgtttgacatggaattatgttccatgttttttcctggaatcctttttcttagacttttgttgtataatttgtttatcgacaagtactgaattttatataggatcttatttcatgtagatcagtaagttttcataatacaatctgtccctttttaaatactttcaaatttccacatgacaatgaagaagaaatttaattttttcaaggaagacttactactgatttatttcacatagatgactataacagagtgccacttaaacatgagctggaaatgagtaaagagagtgagcatgattcagatgaatcctctgatgatgacagtgattcagaggaaccaagcaaatacatcaatgcatcttttataatggtaggtacttaaaytgccaaaacccaagatccaaacattttaaaataatatctatgttattagggccattcattaagcgattttataaaagaataatgagcttggtcataactacatatagattgacatgagagtttcaatttcaatgctacaatttaacttaatgaaagatttaaaaatactataacctaataacctgagacaaaataagataatgctattggttatattttatgacaaatatagctataatcacatcaattttaaaaatagtaaaatttgagcaaatacaagtatttgaaaatgtttatacatactcagatacccaaattgtaggcaatgacaaatttgtatatttgtatggttagaaacttttcattcagataaactgaattattaggtgagtctgtgtcatatccccccacttttttaattaactgagaattcaaacaatgaaactttagtcatttattaaatatttattatttatacactgttggatttacttattttccaaagtttcctaaagcacacattcayagaatattagtttaattaggaaatataataagaatgtaaagacactaattaaaattagtatagacacgatgaaggtaatttgaaatgcttaagtaattcctttttacaatcacattaacctttatagagaaacaaaaatgtgtgtcttttgtggaaaggaaaatttgtttcgcaagatatgttgtaatcttgatttcacattattagctaagaattactattatctgtataattattttacatatagctattacattgtttcttgtaagaaacataagaatattactatttgtatgtaacagcattgatatcaaactgactatatttccaaatggttactttaagaatctactgagctctcttctgtagtaacgaagtcccaccctttttttgtctaaaaagagctactggaaacctgaagtgatgattgctgctcagggaccactgaaggagaccattggtgacttttggcagatgatcttccaaagaaaagtcaaagttattgttatgctgacagaactgaaacatggagaccaggtttgtacttttgaggattttcttttaagcctttctgtcataaaacgtcattctctagtcttggattgcttgcttcatcgccatacccacgtctttttttatccctccatcacataattctgtctgctcagtcttacccctttcaccctggtgttggcctccatcagctgtgtctggattctgacagtctctcctgtttgtcccctccagtcttgcaygctgctcacagattagccaggatgcagcaatgtcagcgtcacagcaaataacagctacattttcacgctgttttcctcattttctcaagataaaagccaagatctttttgtgatatccagcaccctggacaatcaccccctcatgtgtctttcatcttcctcccatttttatgttttccatcctctccactctggacaagcaggtttcatgcccaagcctaaacacgccatttgcattgtcatcactgagtctaaacttattgatattccatgtaactaaatgtgtgctgtcttccagttttgaccctattcttttaacaagaccaaactcctgaaaaatgtatctatatcatcctttctttattcccatataatatttattgccataaaagtctatagttgaaggtgaatctaagctataatttgatttttttacttaatgcttgtgacagatattttatccttttcttaatgtcttcagttattattaaaatttccctggtggtagatctcactcagctttagcaccaaccacattatctgacatatgttcaagcctattcagtgaataaccttataagtatgcaaaagatttatgcttttttatgcccctctctctcccctaaatctcactctttctcaccctcacctggtccccttcccctgtacatggaaagttgctttttatgttttttgttttaaaggaatataagtccagatttctagcatggaattcccacaatcctttccttcatataaattgtgaaagctgggaaacaggatggaagtaccggcaggactccctgtctttgtcagaaattgtggggttgtagttggtagacaacagtttgtagtaagaagaaacacttttgtggttcatctactcttcaatctggccctttccttagctatgtagacaaaatatataaagctgcttatggtgttggtcaacaagatgacagagacaaagctccaaaagatgcagcctccttcctcaagaaccactgaagggacagtgggacctgagttattgaaagggtcatgaataacattgactcatgccagccataaatattgaagaggtcatgataagcatgtggaaaagaggagcaaacctcaaagacctacactaaggaaaacagctgttccgggggtgtcccagtcacctcgattgtgctcagcttcccttttcttacacaaggaaacaccacatatttaytaaatgggtcgccagcacttaaatagattctggatttttataagtaggtttcaattttagaacacaataattttcatttaatagaaaagaggcacagacagagaaagaaagggagaaagagggagactgatcctttgcatatttcaaataggaaacaaattgttgaattgtcttcttttatctaggaaatctgtgctcagtactggggagaaggaaagcaaacatatggagatattgaagttgacctgaaagacacagacaaatcttcaacttatacccttcgtgtctttgaactgagacattccaaggtatggaaacaatttggggagtatatttctttgatataatggatctggtagcaaaatgaatataaattactctatgcaggcaaggccatcatataaataatgtttcagaataacattttaaaattatttaaatagaagtaactgtgaagaaaatatgactatcaaattagaaaataagctgaacttcactccagttaatgctctcttcaattctgattttagaggaaagactctcgaactgtgtaccagtaccaatatacaaactggagtgtggagcagcttcctgcagaacccaaggaattaatctctatgattcaggtcgtcaaacaaaaacttccccagaagaattcctctgaagggaacaagcatcacaagagtacacctctactcattcactgcaggtgcgtgggatttggtagaatgtgctctcaaaatcataatgcttgacttctcggttcacatgttgtcttatctagttatcctcatatatgaaacacataaccacagtaaaaacttcttatggagtcggtcactctcttggttgtttccacaacacaactattgtagaaatataatagaagtgattatattatagtgcaataattttaagttgtgttttttaatacttggtgtcatgtcatctttgattccttggtagctaacattgagccaggaatgtcatttgtgtgaatgaattaatgaatggaagggtgtgtgaacagataggtagatgggtatcaccttacacatatacccatatacattgatctactctattaggtgtcacaaagacacctaatatgtttaatgaacacaaagtttattaaacatattttaagttaaatattaactgaaatcacaaagcttagcaattttgatttgaaactcattatttaattttctaaactgaaccaaaggcaaagattgtggtaatatcaataatactactagattttattagtttcttcatctgtgataggtgcttacatattcaccttaaataagcaatataattgaaagaaagatatataatataaaagtttacatgaaaaagaatattgaagtaaatgagaaacgaaaaatagtaaagtaaaatgagaaatgtttatctagtgaaaaacttttggaatttttgaaaaagtctaattgttattattggaattgcatatactagaatcaagccttaagaaatatatgaattttcagcatttatgtggaaagaaagctgaggaagggaagtttacactgtaaaactatatatgtttcttagaatatgatttatgtacaataactaaagtgtcctgctgataacatattgtttaaattgaatctttatgatartgctttatacttctcattgtttggtaaactatttgattgccctctttttagtgaataattctactaggtattacttttctactgatgcagaagtgaaaacatttgtgaaacgtggtagagaggcagaagagtgaagaagagcatgtgttctagtaatttacaaaatattaggtctaatatttctgattacatcagctttctcttctccaaatcttggtttccttatctatcatactggcattctgatattggtttcaacaacttcagatgtaaataaaaatgcattaaaatccataaaatactaaataaaagaaaatatatttgtaaagtcgaagacaaataagttttcaattccaggattatcacactcttaaattgaaaaatttgcctaaaaatgcatttagcgtaaataatttggttcttgaaagaggttggaataagataattatgataaacatgaagcaaaaaatatattctctctcttcctgtttttattctaatatcaccctttttggtgagaagtaggattattttctatcttttctttcttttatagggatggatctcagcaaacgggaatattttgtgctttgttaaatctcttagaaagtgcggaaacagaagaggtagtggatatttttcaagtggtaaaagctctacgcaaagctaggccaggcatggtttccacattcgtaagtatccttcaccattgcttttaacatgctcggaattttttttttctttttgacggtttccttttttcttttctcctctcctttcctctcgtttgttcttttttcccctttccttttctcttctctattttctttcctattcttttagcttttctacttttacatgataattcacattaaattattadaagtctaaataagagcctaaagtttactagcactttgttgtgacagttcatgaagagcctttccctaaatgctcatgaatttcttaattttctttccttcactcctgtatcgatttgtgttgtgtaacaaaccacccccaaatttgggagcctaaacaaataacatttattatggttcagtagtctaatgatatgctggaatgttctgctggtgccctcaggctcaggcaatagagaccaggctgactcatgtgtctgccttcagctgatgtgtgccctacagtttggctggtctaaagtgacctacactgccagtaggctggcatgtggctgccatttagctatggcaacaacagtgagtgggccacatgtccctcctcatccagaagactagcccaggcctattcacattaaagcagcaagttccacaagggaaagaagacttgtgtgagaccacttgaggcccaggcttaaaagtgacacacatgtcttcttctgtatgttattagccaaataaataagtcataaagcctgcccagattcaaggggtagggaaatagactccacttcttgagagggcctgcaaattcacattgcaaagaaatgtggatacaggaaggaaaataagttttatattcttgtaatcgatctatcgtgtataccctctatgtggtagtaactgtagatggtcatctgggaattaatccttattcacagtgtaaacttaattactcactaaaatatataaagcttttaatcatgtatgatattgagatttcatatcttggtacttaaaaatgtatcaaatgcttgctatgtgctcttgctataaagagctaattggtatgagggaaagccaggtatttactaatcaatgtagtgagtaaaatgacagaaaaattataagaagaacatgaatgagggcatttaatttaaactttaggaatcaagaaacgcttctcgaagcagtgattcctgccctgattcttaaataatgtgtaggcattagacaggaggataagtacaaaacgtggcatcatgagcaaaggcatggaaatggcccatgagcggagtgaacactggtttggggttgctccaaggtaaagttcaaaaagtatcctgcagtcaaccctttagcaccataaagaaactaaattatttagatgtttttatgagaacatatcaaaaagtacttttctgtcatccaatacttccacaaataaatcattagttcttgctaatcttcatctggcataaaaataatgacatcaactttcttcatgtaatttcccacttaattcctttactaggagcaatatcaattcctatatgacgtcattgccagcacctaccctgctcagaatggacaagtaaagaaaaacaaccatcaagaagataaaattgaatttgataatgaagtggacaaagtaaagcaggatgctaaytgtgttaatccacttggtgccccagaaaagctccctgaagcaaaggaacaggctgaaggttctgaacccacgmgtggcactgaggggccagaacattctgtcaatggtcctgcaagtccagctttaaatcaaggttcataggaaaagacataaatgaggaaactccaamcctcctgttagctgttatttctatttttgtagaagtaggaagtgaaaataggtatacagtggattaattaaatgcagcgaaccaatatttgtagaagggttatattttactactgtggaaaaatatttaagatagttttgccagaacagtttgtacagacgtatgcttattttaaaattttatctcttattcagtaaaaaacaacttctttgtaatcgttatgtgtgtatatgtatgtgtgtatgggtgtgtgtttgtgtgagagacagagaaagagagagaattctttcaagtgaatctaaaagcttttgcttttcctttgtttttatgaagaaaaaatacattttatattagaagtgttaacttagcttgaaggatctgtttttaaaaatcataaactgtgtgcagactcaataaaatcatgtacatttctgaaatgacctcaagatgtcctccttgttctactcatatatatctatcttatatagtttactattttacttctagagatagtacataaaggtggtatgtgtgtgtatgctactacaaaaaagttgttaactaaattaacattgggaaatcttatattccatatattagcatttagtccaatgtctttttaagcttatttaattaaaaaatttccagtgagcttatcatgctgtctttacatggggttttcaattttgcatgctcgattattccctgtacaatatttaaaatttattgcttgatacttttgacaacaaattaggttttgtacaattgaacttaaataaatgtcattaaaataaataaatgcaatatgtattaatattcattgtataaaaatagaagaatacaaacatatttgttaaatatttacatatgaaatttaatatagctatttttatggaatttttcattgatatgaaaaatatgatattgcatatgcatagttcccatgttaaatcccattcataactttcattaaagcatttactttgaatttctccaatgcttagaatgtttttaccaggaatggatgtcgctaatcataataaaattcaaccattatttttttcttgtttataatacattgtgttatatgttcaaatatgaaatgtgtatgcacctattgaaatatgtttaatgcatttattaacatttgcaggacacttttacaggccccaattatccaatagtctaataattgtttaagatctagaaaaaaaaaatcaagaatagtggtatttttcatgaagtaataaaaactcgttttggtgaattctgtaatagcttmtcatgaaggtcaaacacaacctttagattggtttggttttctatatctttactcttttgtctgattttatatgtcttaactatacagcaccgattattgtccattcaactcacatttattttgtgtccctacttctaattatttcactattgtaacatataaaattaacaattaacccttatagtagtatatagatccttgtgcttatttaacagatgaaaagaagtaaattttacaatgaagccacagtttctaatttatattaaggttacttattacatctttacttattaatgagaaaaggggattagaatcaccaattatgggcacaaaaaataaagtttgctttcacttacctcttcagtcactcaaactattatgcattcttttcttttattgaaacttgatcagttgccattttctagataatgtagttaaaatttgcagttctcatgttcaatagaacattatgatgtatgcctactttatctgttaattgcttcaaaatacaaatagcagaaagtctaaataatctacaagcaaagtttttcttcagaagtttcaattgcaagtaacatcttccaaatgtagttgtgtgttttaaatgtgttttccacctgacactatcttttgaaagattaaaaactacttagaaaatagagcaataataatttctattagtttaagaatcaagcttgagactttttttctacatatgggaatttgttgtaaagaaagagatgaaatagtggctcagaaagcccactactttgtgagaacatatactaaaccgaaggtgagacccatggcactagaacatggaattatatgtctatgatttttacctgtagaaagaaataatatgtgaattataggtctatgtctatggccatgggttgcattaatggggatctgttacaaggtataaaagatttatttgctaaagtttggcactgccattattaattctaggatccagtcagaaatattaagcaaaaagttttgacttacaaaagcctggtacactgtagggataatgttatgaatccagaacattacatttattgggcaaaaagaaacttctaggtttcttttaaagttgtttgctttattcctggtattagaattcaatgggaataaaagatacatttagtaagcctaaacttcaggtcccaagctattaattgtgtacataagtgacaaataaatattttcatttaagagatatatatattttaatattttcttgcaagaggaaaactgtgtaaagtgattagctgaacatctgtctttgcaaagataattttaaatgcgttaagcttcccctcagaattcttatatttgtacagagaaattttcctgtttttttccctctaaaatattaaacataaaatttatttttacaactaactaggactgatcttaattttagatttataccagatattggttataagatgatttcataacaccatattagatctgaataagtgaatgctatttgctcctagctaattgcagcatgtttcttgatatgaagaccttaaaatatatcacttcaaaggaaatgaatatctgttaaaatgagtagaaaaggctatgctttcaatctcctacacaaattttacatctggaatgatctgaaggttcttcaaagacattcaaaattaggcttttttatgtcctgttttaagtgaaaatatttattcttctaagggtccattttatttgtattcattcttttgtaaacctctttacatttctctttacattttattctttgcccaaatcaaaagtgattcctaaattttaattatatttgtaggacaattaaaagcttttgataacttacaacaaatgaattcttgttttttgctaagatcccgtaaagaaaactcttcttctttattcaaactatccatgattactttcttcaaaatgacatgaaatttgattgtcagataaaatacaaggcattgggttacattcgaattttaaatgaaacaagaatagttttttagtgcaagtatgtctcatgcagtatttgggacatatttgcaccaaaaattgtttcttgtttattagaaatttaaatttaacttggcatcctattttttttaatctcgcagctttaacatgaaagaatcaactatatctacttcacttaaaagaacatttgtagttctccttgcagagagagacttcacctctctagttagctgtattcctaagcattttattatttttgtggcaattgtgaatgggagtttgcctctcagcttggctattgttggttatagcaatgctagtgatttttgcacattgattttgtatcctgagactttgctaaagttattcattatcctgagaagcttttgggctgagactataggattttctagatacaggatcatgacggctacaagcaggaatagtttgacttcctctcttcctatttgcatgcccttgctttctttctcttgcctgattgccctggccagaacttccaatactatgttggacagtagtggcgagagagggcatccttgtcttgtggcggttttcaatgggaatacttccagcttttactcatttagtatgatggtagctgtgggtttatcatatgtggcrctcattattttgaggtatgtttcttcaatacctagattatcaagagatttcaacatgaatggatgttgaatttgatcaaaaatcttttctgcagctattgagataatcatgtagtttttgtctttagttctgtttctgtgatgaatcacatttattgatttgtgtttgttgaaccaaccttgcatcccagggataaagtctacttgatcatggtggataagctttttgatgtactgctggatttggtttgctagtattttgttgagaatttttgcatcaacatttgtcaaggatattggcctgatgttttctttttttgttgtatctccgtcaggttttggtatcaagatgatgctggcctcactgaatgagttaaaaaggagttccaccttttcagtttttttttggaatagtttcaataggaatggtaccagctattctttgtacatatggtagaattcagctgtgaatccactgggtcctgggctttttttattgttggtggtggtggtaggcttttattactgcctcaatttcagaatttattattgttttgttcagggattcattttcttcctgcttcagtcttgggagggtgtatgtgtccaggaatttatcgatttcttttaaattttctagttaatgtgcataggggtgtttataatattctgtaatagttatttgtatttctgtggggtcaatggtaatatcccccttatcgtttctgaccgtgtttatttgaatcttctctcttttcttctttattagtctagctagtagcctattttattaatttttttttcaaaaatccagctcctgaattcattgatcttttgaattttttcatgtgtttcaatatccttcagttcagctctgattttggttatttcttgtcttctgctagctttgggatttgtttgctcttggttctctagttgttttagtacaaatcactgctcaaagaaatcagagatgacataaataaatggaaaaacagtccatgctcttggacaggaagaagcaatattgttaaaatggccatactgcccaaagcaatttatagattcagtgctattccttattaaactaccattgatattcttcacataactaaaaaacaaacaaacaaacaaacaaacaaaaaagccattctaaaattcacagaaaaccaaaaaaaaaaaaaagcctgaatagccaaggcaatcctaagcaaaaagaacacacttgtaggcatcatgctacaccacttcgaactatgccacagggccacagtaaccaaaacagcatggtacagatacaaaaacagacacatagaccaattgaacggaatagagaacccataagtaagattgcacagctacaactgtctgatcttcaacaaatctgacaaaaaacaacaatgggaaaaaggttcccttttcaataaatggtgctgggataactggctagccatatgcagaagattaaaactggactctttccttataccatatacaaaaattgacttgagatggattaaagacttaaatgtaaaactcaaaactataaaaactctggaaagcaacctaggtaatacctaccattcaggacataggaactggcaaaggttttatgatgaagatgccaaaagcaatagcaacaaaagtacaaattgacaaatggtatctaattaaactaaggagcttctgcacagcaaaagaaactatcaacagagcaaacaggcagcttacagaatgggagaaaatgtttgcaaactatgaatctgacaaatgtctaatatccagaatctatatggaacttaaatttacaagaaaaaaaaaacccttaaacagtgtacaaaggacatgaaaagatatttttcaaaagaagacatacatgtggccaataatcatgtgacaaaaagctcagcatcactgatcattagagaagtgcaaatcaaaaccacaatgagataatatctcatgccaatcagaaaggctgttactaaaaagtcaaaaaacaacagacgctggcaaggttgtggcaaaaaaggagcacttatacactgttggtgggagtgtaaattagttcaactattgtggaagacagtgtagagattcctcaaagacctaaagatggaattaccattcgacccagcaatcctactagtgggtatacacccaaagggatataaatcattctattataaagatacatggacacatgcagcactattcacaatagcaaagacatggaatcaacttaaatgcccatcagttatagactgggcaaagaaaatgtggtatatatacaccatgatatactatgcagccataaaaagaatgagatcatatcttctgcagggacacgggtggagctggaggccattatccttagcaaactaatgcaggaacagaaaatcaaatatcacatgttctcacttataagtgggagataaatgatgagaacacgtggacacatagaggggaacaacacactggggcctactggagggagagagaacagagaggatccggaaaaataactaatggatactaggctcaatgcctgaatgatgaaataatctgtacaaaaaacccgcacaacaaaagttttcctatgtaacaaacctgcacatgtacccctgaacttaaaagttaaagatatttagaagaacatttgagagttcagctttgtaagatcctgagatgaaaagattaaatgaaactatttacattagtgtgcaaataggaactttaaaaatactgactcaatcaagaatatgtatctcatatcattacttataaataaaaaataattattataattaacatttattgagataaacacatgccaggtatttatcccttgttttatacctgcattggtttcataagacaaatcctatgccacatatattcttttttccattttatatggggtagagggttagaaaagttcagtatctggtctgttacagcaagtgacagagccaggacttgaaccagctcttacaaacactgtaggctgtgctcctaatccaccttgcaaatatcagtgtcatgtgctttgaaaaactggtgaagaaaacaacctgaaattgttttctgtctcttctttatttcatgattaaaacaaaaacaaaaccgtgtgtaatatatgctctcaacaacactgcacaacatagtgagcttagatgaactcacagcattgaagttattatataaaaataaacacactcttaaacacccatgggaaaggattgttctcataatttgtatgagcaaagatcacctcattgctgaagtgagtgccaggaaataaaacactacaataaataacaaatgtcattgttccattgtcccacaattt

SEQ ID NO: 94070 - DNA, 54646 bp, Homo sapiens
ttcaattagttagttgtctagcttggggcacagaaaaatattcttattacttgatgtaaaacttcaatgtggtgcctctgttctgaagactaatattttctgtctattttctagttgattggccggcctgtgatggtaccttactggtctttggggttccagctgtgtcgctatggctaccagaatgactctgagatcgccagcttgtatgatgagatggtggctgcccagatcccttatgtacgttctcagtcatggctctggagtttsaaaactaacccaggtgcctctgtgtctggsttcatttgtctaatgtttgtkrgattccataaagacataaagttctttttcagacaatatcacagttagcctcaccccagcacagtaatataggtaagggcacttgtttccgtcttccagagatgacagctcaagacccagcatgactcgccagagtgggagataggctggctccagggctctttctgctctcccgtgcttccttccatttctttcwcttggcttcaaaacatgtagtcaaaaaagtccttggtttcataagaataaagwatatcccacagttcttttacttaattcttgaaaagactaaccacaaatcaatcagacaattgtatatgtgaatacaacctcagttcctgcatcagctctgagctaataacagatggattaaacagatcctgggatgggtttccagaggacatacatatggaaagaaaccttatccttcagtggaggatgggaggggacccagtcatcagagaattgatcccatgaaccatcacatatttaattttatcccacttttctattgtttacagttgttccattagtggaatgtagtgtttccattagtggatagtgaaatgcaatattacagtctcaggaagaatgttgtgtatgattaccctcaagattcggtattccaaagcaactatacatctttgctttgttttgtagtagatttactattagtcctggataattaacagtatttttcctaaacatgaaccactgataccaggggcagcctcttggggtaggtcatcaccatcactcctgatagtggcagtttacaaagcactttccaaaccagtgttttctcttatcctcagaatagccatgctagagacgcattctcatcctagcttgtgctgacttcgattttttttctatcttatcactgaacattttaaaaattaagtgtatttcccagcacctgtacctaacaaatggcagagctgggatttgaatgcatcaacaagaagctgtctggaattccaccatgggtggtggagggttgttctcctataaagcttgggcgtgtacagcagcagcctctcagctccccatgtcctcccgcaggaygtgcagtactcagacatcgactacatggagcggcagctggacttcaccctcagccccaagtttgcygggtttccagctctgatcaatcgcatgaaggctgatgggatgcgggtcatcctcattctggttagtcctgatgtgaatgtgtgcggtctgtttgggagcaggtatgggctttggtggagtcagagttatactttatttccatgttgcaagtagataaattgaagtgcagtaagaaaggtgtatttcccaggactcacagaaactctactgtgcaggtagaagccagcgagttcacccttgaggagttctccttcattctgtttctcctcattctctggctttggttttcccaactgacttatgctttgatttcaggatccagccatttctggcaatgagacacagccttatcctgccttcactcggggcgtggaggatgacgtcttcatcaaatacccaaatgatggagacattgtctggggaaaggtataatcctaagcgatgatgcactagtccccagcctgagggtgggtcactgttagtgggtcacatgcctgtgtatgtaatttttggccttttctatttgggctctgaggtcagaagctctccttttctcaatcaatatttgttgatacaattaacgacttttaaggtaatgtaacgtgttatggagttcacttttcttttatgtcaatcctacgtgatagtcaaagaattattgctcctaggagcacggtttgtataacaatttattaggaaatactatgtaagggaaattgtctagtgcatcgctactgaacgtatttctctccataggtctggcctgattttcctgatgttgttgtgaatgggtctctagactgggacagccaagtggaggtaaaagggtgtttgtaaatttgggtggagtcagggtttgtaggcaggggcagctgttcctgggattgtggacatgcctgtaccgtggacatgggcttggcaagggagaaacacttaggksatgtgtcttgggtgtcattctgtatgcctattactttataggtagtcatactttactggccactgggatgtagatatgtattattatccttggaatttaagaccagagagcttaaattatttgttcacagttttaggtgacagagtggtgatttcaattccaaggctgtcagattccaaaggcccaagaaattcccactgggcgatacctcctagcagtgccatcttttctctgaactggcatacttactgttgttgcctcggttatcccttttaaacagtcttcaaccctcgaagactgactaggtcattttctttgtatatctttctttttttccccatgaacaggtgtctccatcttcatacttacgagtcctgccccgagccccaccattccttgggtttctcaactttgcttttacctgtcagtttccagccttattgtaaaacttgctctctcctggggacggtttgttgcttgtaatggatccaagtagtccatgcttctggacctgaayttttttcccgattgactawgcatttcttgcytgaatgaatacatggctccttacaggagagtggagaaagtgaaggcagaagccacaaggcaagagttgaatatggacaggcaaagccagcaccttggagaacggcagaacatttttatgaagttggaaagggtcatccgagcagtacttagggaagttcctacctcacggctggccaggttccctacgtgtaccccgtatgggatagaattctgactcagctgtggctgataatctctttattctaattstccatcccccacccatcccgtcgtttctaaccctgcctgatctggagctctcagtttctggtgaaaggttctctttgtcgggtttcctggttcctacctccatttcctaacaaaaggcatccctggcatgcccacgtctctcaagattctctgtgatgtgacccactgtcttctcacatccttgactgccagacccatataggctgatctgtttctgttttcttatgttcccttttctgccctttttctagacatctgggttcctacctgccctttatctgtggtgtataagaactggagctcccctagaccaagtcctgtttttgttgccttccccaccctcctcaccagcattctttagctctttcactcttacaatggtgtgattatcatagaggaggctatttactgagacaaacaaaggactgtaatgttctataacaaacaacatgagtatattaaaattgawggacatttacttgctgcttctaagtggtgtgaacccactgttaaacactgagtatgtattttatcccaggttctaagctcagcattgtgggcaatataaatatcactcagaaggatataaaacaaacttcttactctcaaaaatctacaatgtagttaaaaagttgtatcttgaatctttctttcaggttaargtaaaaacactgcttttattatgtgagggtagaggaaaataaagggaagttgatgcatcctctttaagtcctctcaatttatgttacacacagctgtagttgtcatgtgattctgaaatygtagaaaacactgaggcgtacttgtctaatatccagaaatgtaatcttattccttcctcccctctctcagtgggaatgacataggagggagtccctgggtgtttcttcctaacctattaccatgcatctcatgtctgcagtctctccctggctttgtctttgaggagtgcataggaaatggcaggactgacgttgagggttgggcatcgagtgcatgaggtcactagttcgggtcattgattgtcatcatccacgtgtataggaagagaacagtttttggatgttttccaaatgctgggaaggtgtgcaaattgcactaatttctcctctcattctacatttctctaagaagttaataacattatttaggccctgttcaggctgtctgtcaccatgcagttgaagtatttgtgtgagttgcattctcagtaagtgcctgtttgctgtcttctatatttgtgtgggacaaagaaattatatttcttttttatagctatatcgagcttatgtggccttcccagactttttccgtaattcaactgccaagtggtggaagagggaaatagaagaactatacaacaatccacagaatccagagaggagcttgaagtttgatggcatgtggattgtaagtgtgtgtgtgtctctgtgtaccagtggctcttgtctatctttgtgtgcctaagtatatgtaccactgaccttcaatcaagaggatagtcattgtccaaagaagactttggacatagcagacacttcttcctctcaggagaggaactgccctggtagccctcacaccttctaccagacctgacgctcctactgtaaaacctgtgaggcgggaccaggcgtggtggttcacgcctgtaatcccagcactttgggaggctgaggtgggcagatcacctgaggttgggagtttgagaccagcctgaccaacatggagaaactccgtctctactaaaaatacaaaattagttgggtgtggtggcacatgcctataatcccagctatttgggtagctgagggaggagaatcgcttgaacataggaggcagagtttgcagtgagccaggatcgcaccattgcactccagcctgggaaacaagcataactccatctcaaagaatgaaaaacaaaaccaaaaaaaaaacctgggaggcaatttactaggaatttctggaaatttgattgcctcacagccaccctgaaagagatctatttttttacccctctagccagtcgttctgtaggagtgaattaatctttctagccagttctcaccaggatttgatgaagctcccagggctggcatctacagagattactggatgttgaacaatttattcactacttccttggctcagaattggcaggacgtaattatcttaaaaagtgaggtatgtctgtgtttggcatttctaggatatgaatgaaccatcaagcttcgtgaatggggcagtttctccaggctgcagggacgcctctctgaaccaccctccctacatgccacgtaagaagccttggcctccttgactggcagagccatgactggaaggattacactggaggagcccgaggccaggggcagccccacagctgagggcacatcctcatggctgctgtggtttactggggaccagagacaaaagctctgcacgtgctttacccagccgggcatgggcaagtgactagactcattgagcaaatttcttgaaatttgtccagaaagcacttagcagagctcatggcacaaagggttctcacagctgagtttcttagtttttaggcttgtgtgaattccatcacaggaatttcttgtgtcatcagtgagtggaaattactggcttccccttatcatggagctgatggactttggagttacacttgggttcatatcttggctccagaaattgttctctctaggagttttgtgacttttcacagattatgtgatatttccaaatctcagtttgctaaattgtaaaagacggataatgagatcttcttcatagaattatggaaataattggaagtcaaaagcctaaatcagagcccgtcatgtagtgtttgacagctgtacgttcttcctgacacctctgcttccttcagtgaacttgatgttggaaacacagcaggcgccaatgcagctcagagctgggggcgctgtgctcatgtctctggggagatggagagcgacacaggcaggactgaagttagtcttaagatccagggcccagtcccttgaagagaagtcagggagaaacagaatcagggctgggtttcacctygccagttcttcctcctcagatttggagtccagggacaggggcctgagcagcaagaccctttgtatggagagtcagcagatcctcccagacggctccctggtgcagcactacaacgtgcacaacctgtatgggtggtcccagaccagacccacatacgagtgagtctccgtctcccttctccagctgtcacaacctatagcgattgccagtgactgacatagctaccctagttttcctttcattccatttctaaggattaagaagattctcataactctgtaatgattcttatttattaaacaaatgctcattgacatggagccaggccctgtgattaaaagtaggaggacagatttaaataaggcatggtcccaccagtgaaaaacttaatgatcctagtgggaaagactcacatggagacaccataatggtcacacagggcagccagtggaacaatagctttagttacaggaggtgaagggaacacagaggactgggcatctctcccgttcatttcaaagtgaatcatctttggagatgtttgtatttttggccattcttggtggagggtaactggtattgtactgaattagcacagtcctgctttgcaagctcaatgaatagtatgaattcttctaagaggatcttataaccttcactgtgttccttctcaaatatagaaaactaagtattgaggaaaccattagcaagacatagtaattccttagtattttgggagtactccagtgaggctgctacagtgaagttctttgtaaagcactgtgagaacacgtgactcattatctccatcatctgggatcagtggaactcctattacagctcagagtcccatgttccctccagtcacgcagcaaacattgactaggctcaagggctctgggagcagaagctctatggcctttactccctggctgttgcctcagttcacctcctgttcccttccaagcagagccgtgcaggaggtgacgggacagcgaggggtcgtcatcacccgctccacatttccctcttctggccgctgggcaggacattggctgggagacaacacggccgcatgggatcagctgaagaagtctatcattggtgcgtgggtccttccccagggcctttgccgacagggcagggagttgggatccttagggaagaggtgaggaggcagatcatgagagcctggtgtgacacagctgtgcttctcgttgcaggcatgatggagttcagcctctttggcatatcctatgtgagtgtccttgggatcctcctaagcaccaagaaggtggggacatctttcagaaatcatcagcaggctccttttatttcctcttgtttcagacgggagcagatatctgtgggttctttcaagacgctgagtacgagatgtgtgttcgctggwtgcagctgggggccttttaccccttctcaagaaaccacaataccattgggaccagggtaggacagtggcttctayctccactgttttatgtcacttgaaagacagtctccatttctgtgctaaaagtaaygcagtctctatttcctgggatatctttaaaaaaaggtgkktttttttgttttgttttgttttgtttttttttttgaaacagggatttactctgttggccaggctgaatcgtgcagtgtcccaatcatggctgactgcagcctccacctctggggctaaagcgattgtcccacgtcagccttctgaatagctgggataaaggcacatcccagcgtggctacctaatttttgattttttgtagaaatgggatcttgccatatttcacaggatggtctcgaactcctgggctcaagcgatccactcgacagcctccaaaagtgctgggattacaggcgtgagccactgcacccttaaaaattgtgaagacctggtgtctcaatgaaccatattcctcattgtgctttagattattatttttttcctgtatttcaggcagaattktaccaaatgttccaaaaagaatgtcttacagtgaaattttatcagctgtcttaggagagctttggtgactctttccggtctattaagaatattctctgggcctcatgtatagttttcttttgtttagctgtgagtgatcttcaattggagtatgctttyagtgaccttcttaaatcccctagaaattccagggcgagctcccaacactgttctctttctcctttagagacaagaccctgtgtcctgggatgctgcttttgtgaatatttccagaaatgtcctgcagaccagatacaccctgttgccatatctgtataccttgatgcaaaaggcccacacggagggcgtcactgttgtgcggcctctgctccatgagtgagtgtccagcagggatcccgatgactaatggatgacttattgcattctatgtggtagcagttgatatacacaaygcttccaaattaaagacatgatggccttttgacatgagctcttcagacacaaagtatacctgattactgtctttagcacagtgttatacataccgtaggtcataaaaaaagggtatttattgaatgacgaaaattgaaatgatgcagtacagcatagaatagtttcattctaatttggttgtgcaaaggcctatcttatgtagcagttttgttatatggacccaggtcacaaaagaaggatttcagcaagagaattgagggacgagggccatcctcacatttaaaatgtgccayggttaagaaatgaggtaatattttacaggagagaacacatctacatcccagcatttctgaagtttgaggcacatcccatggggaaagcagaggctgggtgctcctgatgaagctaggcctaggaacaaagcaaggatggctcaggggcagctgtatttccgacttggatctgaacttgaggagcttcttcagagtgtcgggctggggctctgttgggctctgttgggcaccttcatttccctttccaggtttgtgtcagaccaggtgacatgggacatagacagtcagttcctgctgggcccagccttcctggtcagccctgtcctggagcgcgtgagtatggaggcctccgatgaggggaggatcccagctgtgaggcttggggaaaaggacgaggagaagaggcctgagctggtgggggtcctgagacatggtttcttattctacctgtgtctcytcctctctttctgagctgaartccrtcacttaggtgttcttggcactcagctccttcatctttaaaatgagcctaacaattctggttcrtaggatgatcaagaagaaaacacctcatggaatagtcaatgacacaatcatttcttcgttaactaaaataattaatagaaggtcagatgggggcagtattgtaaaaaatttataacagtcctctagcactattacaacttttcagaaggatgacttggcaatgtgtgtacttgtattgctgctggctaacccttcccttcctctacaggagctcctcccagcagtaaaagccatttctttacttctgttgttgattaggcttctgattaaaatatcaattaattgtacctccctcaaatatatatatatatatatatatatatatatatatatatwtatatatatwtwtttttttttttttttttttttttttttgagacagagtctcactctgttgcccaggctggagtgcagtggcatgatcttggctcattcaacctctgcctcctgggttctagtgattctcttgccttagcctcttgagtagctgagactacaggcatgtgccaccattccyggctaatttttttttctttttttgtatgtttagtagagatggggtttcactgtattagccaggatggtctcaatatcctgacctcatgatctgcctgacttggactcccaaagagctgggattacaggcatgagccatcgcgcccggccccaaaatctcattatacccacaaaattttcttctgccccagacacaacctcccttgtttgtctctttaagagtcaaaggggtaagtctatgtctataagcaaacagtgatttattttttcccgaagtcctggatatcaaagtgctttatgaaagccacttgttttgggtagacaaatctctggtttaaaaaagaaaacaggaagaaggttgccccagttgttaacctcttgggacatgaggcagctgggtccaaagccatcacaattatttcacctctttcctaagcagtttggttactctgtcctggaaaatggtggcactgcctcaccttgtttgtgtttcattttagaatgccagaaatgtcactgcatatttccctagagcccgttggtacgattactacacggtaagtttttctgaatgtttatataacacgggaatgtggtagagagtacaaaggctttaggtccgatagaccttaggtcaaatgctggctctgtaacccacctgctgtgtggtcttagagaagccactttaacccttgtaatctcagttttctcacctccaagtggggtaagaccactttcctcatagaaccattgtgaaataacacataaagcatctcactcagggtctgtttttttgtgggtgttctctttgtgttagtttttaatatttctttatatcactgctatttacaatgttgtgtaaaggcagatgctagccaacatctgagattgtgttgcaaactatagtttttgtttttattgttgatatctttgcctgctgtaagtttgtaagcatagaggccgttttgtctcttttgattaaatacctccttccatagcatagatgctcaaagaggggcgctgcacataattacataaggcacacaagtgattaggcaatgtgcaaaacacacacagaggtatgggacccaacccttgtgtgtctaagtagtgcaagtgcatttagaaatgaggaagcaatgaagagctccttgccgcatagtttcattgctagtatgattcccaaagactcagctgggaagccagggtcttcccgggcagctctggggtggtgggctcttgctgggaccctgacaaatcagaccctgattcttggggaagaatcaaaggaggtatttccttcgtttctaactaggcctcttcttctgactttctgaggagaacatagttgagggctggaaatacaacaaaggggtacaagcagggatacaggaagcagagcatgtgctggcccctttcatccaaggagatttcagtgagattaagtgaaaagtggagaaggatgtgcaattttgttccttctcttctcagtccattggagcccaagtcctctccacagccccagactcctcttcctgctgctagtctggatctgcccttagggtggtaacatgttaaggctctgctatgtgtgtcccagccaggcgtttcccaggaagaggtggccagctttctttacgtgagactggcctttgtcctgagtgtgcatgttgagtctcccattcactaccagaagatatctttgatggaagagggaaagacaaaagaagtcatggagcaagctgtttagaaaaagatgaaattgggccaggtgtggtggctcacacctgtaatcccaggactttgggaggccgagatggacagatcacaaggtcaggagatcgagaccatcctagctaacacggtgaaaccccrtctctatgaaaaatamaaacaattagccgggtgtaggggcatgcacctgtagtcccagctactcgggaggctgaggcatgacaattgtttgaacctgggaggcggaggttgcagtgagctgagattgtgccacygcactccagcctgggtgacggaaccagactttgtctcaagaaaaaaaaaaaaaagaaagagatgaaatttttaatgtttaattaaaatgaagatgaatctcatagttaggattaatgaagaagtgtcaccttaattaatcttcccaagtttgggtaactattactcattctagagcacaagctggcaaactatggcccacagccaaatctggttgttagctgatttgcaaataaagttttaktggaacacagccatgcatatttgtttgcttgttgtcaacaataactgcttcttacctgtaaagtagcagctctgaaatgagaggattttgcctaccaggggacatttggcaatgcctggagatatttttggttgtcacaacaggctgggggtgaggaggctatgcggctgacatctgaggattctgctaaatatcaaaaggcacaggatagccccatcgccagagaattgtctggccccaaatctcaatagtgctgagactgaaaagccctgctctagttgagaacatgtaggatggaaggatggtcccttaggttctgatacaggtgagagtgtagcagttcttcctgttacacatcaggcaaatgtagtttgtatggtggaagcaaaggtaagagaccctaacaagatattatagcagccttgcgaggttttatgcagcactgtgcgaatgcagaatgggtaatagcaggtatgttgcaaagggtgatgaacaggcataagttcagaggggaggatgagatgtctggcaggatgcattgttcagggaggggcctgtcctctccttcatcatcttttaccttcttctgcccccagggtgtggatattaatgcaagaggagagtggaagaccttgccagcccctcttgaccacattaatcttcatgtccgtgggggctacatcctgccctggcaagagcctgcactgaacacccacttaaggtgaatgacaggactcaggttttcctttacatttcagttagctcaacaatttgtgatgaagtctaccaaaatgtaagcatcactttcaaacccacatgcaattctactcaacacttgttttttctttgttttgttgtttgtgtgttaatctttttcagactctatactttttgtctaattattaacaactcttttaagtctaagggagtgagatgaaaggtctaagaatgtcattttttaaatctcacatctgacatggaagtcaaaataagagcaaccacaattcacaagagcttttcagaagctgttgttttagaactgtatccagtagattttgaaagactgtaattcatgtccttccttaaaccctttgaatttcttttcaaacacgctaacagccaggtggtcagcctccttggtttgccaggactgatgcattttagcaccagaactctcctctcttgagatgcttctcaattctgggtaaaccaggtcagttgatgcctctatctgccttggccacactgctcacccatgtttctttactcttgaatcacttattctcattttaggagggtcaggatccactttccaccctcctagaatctcaacttcctctttcttttctcccgctaagagatttctttcttgtgattcaaaagtggattcaaaaaaaccctcaaaagtctatgtcactgaattttgctttatacgtaattgattccaaaattatagattccatctgtactaaagaggtgtgcatttatatcttcatgcctttgagagtattaacctatttgtctttaatagactaggagttctttggaagccagaaacctgtcttttcttttgaacctctcttactgctttaatttttcaaattctagactttttwatgatactaatgggaaatatccctaaatccaataccagttggcttccattttctaactgttcaccttcaagctgttctgtacagtgataccaaattgatttttccaaaatgaaaatctcaactggttgctcccaggcttgaagtccaaagtctttcattaatagggtattcaaaaccaatcacaacctggttccacgttaccttaacaactcttatctcctgccatacctccatgtacatacagaccaggtatgccaaaaaactggcgatttcccaaacatacccatgtattttactgcatgtgggcttttgaatttatcctttccaacatctgtgcctggtgtattcttaatgatccaaatgaaactttacgtttcagcagcaagaagtctttccctaatcttccagcagaggaagcactgccacttccaagtttctggtcatttgtaatatatatttatttgctccttagatgattttgtctttcttctttagcagtgttagcatttcaatagtagttgcatactctgtgcatgaaaattgtagtatctgaagtgtttaggaccatctaaatctattgttagttctttgttgctgactttcctttatgttgacttattaccttgtgtgcttggtgattttttgtttcatactgtgataatcttaagcatctaaatgtgggtctccttcctccagagatgatttgccttctcctctatttgcaagccaggaattccttccatctgacatcacgttaacttccatcaaggatcccggcttcatgtgggaatcagaggttcacattctgtaccttkgattactaggcttaatagcccaattttaaccttgctgtgggaatttgccacatggagattctaggttttgcttactaagcaccctttgagttctagctcagtgttttgctatcctgttattgttttggtctcttgagtatattccttactgtcttgcaaatccaagaacattttagcaggaatatatgttataatttatctaggatcaggtaatattttactgggtaagtctccagaagaatatacagtctaccatatttgtagaactgtgtttctggactcctagaatatcttaaatttgtgttgttttcactgtctgcgttcattttttagtgaatgtgcctaatttttcctataatattgaaggtcgttcaggtcaggggttgtgatttattaatttttgtatctcattgacttcctagaaatgactgctactcaatacatgaatatttaaagaaagcagatgattttgttgataatggaaactaactctcttgcatagtgaaaggctgaactgtggaagaatacagtggagaatgtgagtccagtgagagacagaggaggaataggaagagcaggaaactgagaggttgcctagagagtgacagagtgaggagagattccaaataaaaattgctctctatcctcttcttcctctatgtccatctactctaccatgtctttaagtaatgtgttgtgtttcctattctaaattctaaagtagatcattagaatgatttatttttctttcaaaacaaactaataataaataatcagatacattaccatttagtagatggaccttagtgtatgttgttgctttctgagtataaatggtccttaggcaggcgaaaatgtatcttcctcacagcactggacacttctcctgagggcatcattgctaaagtgatctgactgaaccagttattgcctaagatttctttctcttctcatactctgtattccgaacagtggttgcagaagcagcttttatttgagctattgcagtgcctctggtgcttaaattcttgcctccaacgtagatgttattgttaatgtttggggtgtttctatctcctgtgacactgttgatattatagaaaaatgcatctgtcgattttgtgtttgtacctcaagaaacagaaccatctgctgctagtatcttttccagtttgaaatttgatggaaatattctcagcccagttggcaaaattgtctgactcctgtctttgtctcttgaatcttgttccccacagtcgaaagaaccctcttggtcttattattgccctagatgaaaacaaagaagcaaaaggagaacttttctgggatgatgggcaaacaaagggtgagcgctgttacaataatgttgctgtttcccaacctgcgcctgtgacttatggtccttcactcctgctggtcattcagctgtgggagaaatctcagcaggcacagtagcaagagtcacttaagtattttgtttctggttgcaccattcagggatagtggtggacgaactactgacgaaagaaaaatgcatttgtatctctgacagttctcccattcgccagtgatryctataatggctcttattttattgtcarkgggtgcttagatgagaaggtttcaagactgttccctaattctatgttaatgtcttcctcygaaaattcttatgagcaaatgttgacgatataaaaatcatgcacctgccagtgaggcagtgagaatatactgttcwagtgtgtactcagctagccatacrttttagcatatttgtgggtccagtatactaacaattcttgttcttcaagtttaggaaatagrttcctttgaagcatatgccttggaagcccttggaagggaatctttgcaatgttctggtagaaaagagaaggaaaaacaatggcttggccttggagactcttgtccctctaatccaatatgtagattaaaaattaattatttatttggtagtyaaatattttgttggcaaataaagattgaatatatttaaggtggacgatgtgaggatttaatatatgtaggcatagtataatgattaccacagctattttaatgaacacatccatcactaccaatgctgcagactggatccccagaacttattcatctaagaactgaaagtttgtacccttgaccatcatctccccattttccacttctgcaggctctaagaacaactgttgtaggctctgcttctaagagatgaacttttttagattccacatatgagtgagaccaygcagtattggactttctgtctctggcttatttcacttagtataatgtccycctaagtcattcatgctgttgcgaatggcagaatattcttctttctatgtctgaaaaatattctactgtatatatgtaccagaacatctttatctattcatccactgatagacacttaggttgttttcatatcttggctactgtgaagaaagaaattaaaaattgaaatgtaagggctaaaattgtaaagctcctagaagaaaacatagcaaaaaacctccttgacgtagtcttggcaatgactttttggatatgataccaaaagcaaaggcaaaatgccaaaaagtaaacaggcgtgactacatcaaactaaaaggctcctgcacagcaaaagaaacaatcaacaacatgaaaaggcaaactacagaatggataaaaatgtttgcaaaccatatatctcagaagagattaatatcaaaaaataaggaacatatgcaactcagtagcaaaagatcaaatgacccaattaaaaagtgggtgaaggacctgaacagatgtttttccaaggaagacatacaagtggctaactggtatgtgaaaagatgctcagcatcagtaaatgacacaggtatgcaagtcaaaaatcacagcgagatgtcacctcacacctgttagcatggaaatcmtaaaaaagaaaggagagaagtgctggtgagggtgtggagaaaatagaattttttagactgttggtgggactgtaaattgttacaaccattatggaaaatagaatggaggttcctcaaaaaattaaaaacagaacttccatacaatcccatgaattcccacttctgggtgtatatccagaggacatgaaaccagtatctttaagagatatactcactcctcccatattcattacagcattacttgcaacagccaagatatggaaacattctaagtatacattgatgaatgaatacaatggaatattattcatccataaggtaaaggaaatactgccatttgtgacatcaggatgtaactgaaaagagtgggagtgtgaaatctgttcttctgtggtgggcaagccggagtctgacttgtctttctgtcactttcagatactgtggccaagaaagtatatcttttatgtgagttttctgtcactcaagtgagtagcatatttttatgaatcttaggtgtgggctttggactgaccattagcacatctgtgcttgtgtatatgtgtgattatatttgtaactttatatgcattattggctataggtgagcacatttctatttatgatttcatcgatgttttcaaaaggaggcattaatatagcaagtagtgtttctaaatatagtttttaattatctgtgtgtttttatgattgtatcaaattagaggattatcaaactaatgttgtacttcttgagcagacactagtagagaaagcagagaggcattcatggcagtggggggtatccagtctggaatagaatatatgagtgacttgagaatctgtgtattacaggcatacctttatgcataattggagttaattgttttgcagaaccacttggaggtgactatttcacaatcaacctacaaggaccccaataatttagcattcaatgagattaaaattcttgggatggaggaacctagcaatgttacggtgaaacacaatggtgtcccaagtcagacttctcctacagtcacttatgattctaacctgaaggtaaaaacccattttgttgagatggtacattgagaattctccatagcaccatgatgtttcttcttgccaagtttgcatgggtccctgaagtaccagggcacctttgatgcatgttttggggaattgagagggcacctttgatgccttttttggggraaaaaatgaggtggccagagctagaatgagttgggtatttttcttcttattcccttctctgcctatcagtgttcccatctctctagctggtttcacttgcttttcccaaaaatagaataattatgatgagacccaggaacagcaaagttggaaagtggggaatagcctgacattattagactgtgaattttgtatgactagcacaaataagatttggtatttgaaaaaggccagyttggataggaaacttgtggtcaggctttggaggtcttagttaccaacttgaattaattctcaagcagtctcatattgatccttgaatgaaggctgtgctactgtgtgtgagcattgttgggagtgggagtgggggctggggactagtagaacagggaagtacaagatggtttagatttagaggagactgggagaaggatgataatctttagaatgtgattttattactccagacgtgtgagaactttaacttgggaagtgctgtctagagaagcatcaaagataagaaaaatatatggaaaatattaaatatttgaattaataggattcaaggaaggtttcaaatttgcagcctttatgcttagaaaaataaagatgctgggatgttagaagtggaaagaaagatgattttatttccacctctcaattttgctgttgccaaaattgaaattcaaagaaatgaattagaattcccaatttgccctgatgtgattattattcattgtatgcctgaatcaaaatatttcatatactccataaatatgtatacctactatatactcattaaaattaaaaattaaaaaaagaaatcatttgtccaatatactacataaatgcgagcatgataaccaggtcatatgattcttattgctgtgttctttctaccactccacgccaatgggggatgctggtttggggactggagagcaagaggatcagctcactttgagatgacaccatgtgtcatgctaaagaggaagtgcagaagacacccttccagacaagacacagagggctaagaggagttagggtagaaaagaataaggggtgatcgcgacaggttttatttgacctaattgttttcattatgctatgtacaagattctgctagaggggagtcatatgccctgttactgctaaatagattcccccactgtacagttctcttcttataagctaaagtgatatgttgcttggatggttgaaagtctggactgatgtctatttgtttttccaaaataaataaataaataaagtcttagattttgcaaggcctttctcccaaagatgaatttccttgtgatttctgcattcctacaggtcgccattatcacagacatcaatcttttcctgggagaagcatacacagtggagtggagcataaagataagggatgaagaaaaaatagactgttaccctgatgagaatggtgattctgcagaaaactgcactgcccgtggctgtatctgggaggtaaccatgctgatggggttcatgtgcatgaaaatctccacacctaatctatagtttcttaagcatagcagtggcacttatataactacttaaaatccatagaaaggacttcctaagggacatgatctggatgtgacargtaggtggggacatgtggaaaactttttaaaataaatattttgcttggagaccaggaaattaaatttatgttattgccaagtgataagtgataggctggttttattgtcatataaaatgacttttctaaccctgtttaggttagagaactttaagaccacatgctgtgctgatctatgactttggccttacttttcaggcatccaattcttctggagtccctttttgctattttgtcaaygacctatactctgtcagtgatgttcagtataaytcccatggggccacagctgacatctccttaaagtcttcygttyatgccaatgccttcccytccacacccgtgaacccccttcgcctggatgtcacttaccataagaatgaaatgctacagttcaaggtaaacacggtacatatatcaggcagtgataagacccttttcagttccattatctttttctggttcaggtcacasaaccctaaaataagttaatcatgctacawyagactatrtcattatccagagarcattgagaaatcattgagggaacaatgagacctgccctaattttcatttggaaaagattactgtggctactgttaggaaaatggttgggagagcaagagtgggtacggagagacaagttgggaggctgccagttaggcaggtcaagtgagggcttaggtttggactaaatactggaatgaaggtggagaacagtgcacctagttgagattcaggaagttgggttacagggtctggtgcttgattgaaagcaggcgacaatggagagggaagcatcaagaatgatgaccgcgttggtatcttgcatcttaatatggatggtgctgacatcaaccagaatgggaatactgaaaaggtttgtgcttgatcaatgtaagatgatatgttcagtttgggatactgaatttgagatacgtataaaatagccaccaacctgcagcgatttcatttctttccagaatttaattgcatttaaagactagggatggactagctgttaygtctgcttctctattaaactaatcttctcaaggataggaatgtgccctttcctctttgtgcttctgaagtctaatacagagcctggcagatagttagtgctgtaatgtaattgacagagtaagtgaaagtgatcaggacattgtcacattgcctgaaaatttctttacaatctgacatcaacccgaattctgagtttttgtacatcgtctaatgcagggatgatgctgttgtatgtttgtaccctcatcatagcactagcatgttgtaggcacctaatgggtttgaagtgaatgaacttccttggagttctagccttaaccattgactactctacctcttgaccatacagtagctctttccaaaatatttgcctctttctggcccactttaattctctctgccttcgtggttgttattcttcaccagaatgacttgatctcttttctgtgtttggttaatgactaccaagtttctaatactctagattgtatttctcctgggagaccatctcagtctcccagaaacaatgttaggcatttccttctctagagtctcacagcacttctacatagctctcccttagcacacatcacccaggtgttgtgagctgctctcttacacttctcatttgcttgtgaatttcataaaaccataacactgccttattgagctcacatccctagtgtcttgtgcagtgtcaggcagggatgtagtaggtactcatgaatcagtttagataccaccttcagcaaggacattctgattattttaatcaaatagatttcactttggggagacacgttatttttcaattcagaaaagttttaaggtatttatatattctcatatacccacagaaaataacaagtaacatattcataaataccacgctgattccagaatgattttctacgttagcaccaatgtcacaatgcttatattgatgcagtagaggccttagtaatgagaaatgacagacaaacatattaaatctgacattgttatttgatgtgttaattaaatctcagacatcataaacttaaagaagayagaaacatagcatctgaacttttgtccaaaaatcaaaaaggttctgctaagggtataggtttcaagagtagtattcttgcctaaaatcgttttcctctggcctagatttatgatcccaacaacaatcggtatgaagttccagtccctctgaacatacccagcgtgccatccagcacccctgagggtcaactctatgatgtcctcattaagaagaatccatttgggattgaaattcgccggaagagtacaggcactataatgtgagtggcttctagtgtgactcagagttgatggctacctgcgccttcgctgccaggtccattgtccttggatgtatcctggttcaaaacatcacattgtccacttccagatccatggatgagttgtttccttcagacctattcttacaggaaatctttagcattctggaaataattactgaggcagttgagcgtgcctgaggattcatccaacaaatgtttatggggtgccttctctagattaggtgctgctccttatagacaactgaggtttctcttctcatgacaacaaataataagtaaataacagagataatttaagttatagtataaaaaggagattgtgatagtgataattgctgtgtagccaaaagagcagggtaattgagggttatggtgtggttactgcttctgatattggggtcagagtagatctcgccaagaaggtgatattttaataggacctggatgagaaggagccacccacatgagacagggcgaagggaaagagcatttcagacagagggaataggaagtgggtaggccaggagaygaagcgaagctggcatgctaaagaaaagaagtctagtgtggttggagcaatggaggaagtaagcaggtgagtgctgggagaggaagctgcaacgccggttgagggggcagcttcagccttgaaggcttcataagatgtttgcatgagaagccatggaagaagcacaaatgggagtgacatgaggtgagatcctcgtaggaatatcgctttgagtgctacgtagaaaatgcgctgaggggtgcaagggtggaaggcagtgctggtgtggagtgttcccagctgtgatggtgaggggagcttgtatttgtattgtagaggaccactgaaaggaggcagtgagagtgggaaacagatgaatgaagaactcctgggcttttagtggggatatctatgatattttaatcaaattgagtttcagttttgtttgggagatgaacagcttctgggtaggaatcaagtgttctgttgtccttgaaaagtcagctgctggaagcagagagaaaagcccattttctgtttcaaatctgcctttttgtgtttcagttgggactctcagctccttggcttcaccttcaatgacatgtttatccgcatctccacccgccttccctccaagtacctctatggctttggggagactgagcacacgtcctacaggagagacttggagtggcacacttgggggatgttctcccgagaccagcccccaggggtaaggacagagcatttgagatctgtgtctctgcttctctccacccacactgctcaggctttgggcttcatcttcccaaactccacttggtcgtcacattctgcttttaggcgagtgggccaattctcaggctcctttgtttcatgtgtttaattgatttcatggagaaaactagacccatcttagcaagcatatttttgttgagtttctttctcaggcataatgtcttttaaactcctactgcttctccccatgactctccagtacaagaagaattcctatggtgtccacccctactacatggggctagaggaggatggcagtgcccatggagtgctcctgctgaacagcaatgccatgggtaaggccatccagcgcctcccttattttggggggataccagtcatgcctgagtcagtttagaatgtgtttagcctaactgttccttgaagkcaaaatcttcattttacgggcactgctgtttattttttctttgtgtttagcctttctgttcatttcagtctaatatcatgtgataagaagatttaacccaactcttattttggtaaaaatcacataagaagggatagtaaaaccacatgggtcccaaatgtcttggaggtcagctcgtgagagccagttataaaatttgaattagggtaaaactatgggtcagagaagttagtctggggattgtgagggtgtatggtatgttgaaaagttacctatcgggtactacgtttgctatctggatgacaggattcataccccaaacttcagcatcgtgcaatattcccatgtaacaaatgtgaacatgtacctccttatccaaaataaaagttgaaatgtaaacataattttaagagtagaacgacaaaatatagtaaaatacaccaaaggaagcaaacccaggaatgggacatttagacttccactgaacttcttcagttctatgtgattatgatagaaaatactggctcttactactctacgatagggagggtgcaggaaatagagaatgtgtggatttcaggggtgattcatgacgtggaaagtttccagcttgattagcatttttcttcattttcagatgtgacgttccagcccctgcctgccttgacataccgtaccacagggggagttctggacttttatgtgttcttggggccaactccagagcttgtcacccagcagtacactgaggtagggagaaatccaattgtttatcaagtacttatatagcacattctgggtgccagagcccacattcattagtataactctcagatgataactggaattattggtattacttggaaagagattatagaataaggaaaaataaatacattctaatcaccattaaatttatagcctctgtaagcattgcagaatagcagaagttacagtggtactagtggtggtgatggtagtgatagtagtatggtggtggtggtatttgtggttatatggtggtggtgatggtgatgatggtggtaggggatgatggtggtgatagtgatgtgggaatggtgataatgatggtggtagtagtagtggtgttggtgatggtgatgatagtggtgggggtggtgttgatgggagtgttggtgatggtggtgatagtggtggtgatggtgacgatgatggggtggtgatggttggtgtttgatagtgatggtggtggtggctatggtggtggtagtggtggtgacagtggggtggtgtgaagaatatggtggtggtagtggtggtgatggtgaaaatagtgatgatggtggtgaccatggttgttgtggcagcagcagcaaacacttatgtactacctactgcacatcactgatttattacttgctgcatgttagagcactttgcacatagtaactcattcagtcttcacaaaaggactgtgagggagatgctattattatacccttatttacagatgaagaaactgaagcactaagagattacttaatttttgcctaaggtctcacagctagcaggactggagcctgtatctaagccaggcattttgcctctgattctgggtttcttaaccagttacctacagtgtctctaggaatggagtgaaatcagcttttccataatttttaagaaggagctcaagtctagcagaaagctttctccaagtatcctagtggctctatatcctgtcagttttgatgtggaattcaattagttagttgtctagcttggggcacagaaaaatattcttattacttgatgtaaaacttcaatctggtgtctctgttctgaggactaatattttctgtctattttctagttgattgsccggcctgtgatggtaccttactggtctttggggttccagctgtgtcgctatggctaccagaacgactctgagatckccagcttgtatgatgagatggtggctgcccagatcccttatgtacgttctcagtcatggctctggagtttgaaaactaacccaggtgcctctgtgtctggcttcatttgtctaatgtttgtgagattcyataaagacataawgttctttttcagacaatatcacagttagcctcaccccagcacagtaatagaggtaagggcccttgtttccatcttctagagatgatagctcaagacttactgtgatttcccagagggggagataagctggctccagggctctttctactatctcatgcttccttccatttctttcacatgacttcaaaacatgtagtcaaaatgtccttggttccataagaataaataatatccacagttcttttacttaattcctgaaaaaaactaaccccaaaccatcagaccattgtatatgtggatacgacctcagttcccgcagccctggtgctgtagcacagtgtcccatgagctctgagctaatcactgatggaatacacggatcctggaatgggttccagaggatgtacacatggaaataaagcttatccttcactggaggatgggaggggacccagtcatcaggcaactgatccaatgtaccatcgcatatctaattgtattctacatttctcttgttttacagtagctccattagtggaacatagcgtttccattagtggatagtgaaatgcaatatttcattctccagaagaatgtagtgtctgatttccctcaagattgggtattccaaagcaactgtacattgttgctttgttttgacttgttttgcagtagatttaccatccacattgtattagccctgggtagttaatattattttttctaagcatgaaccactgataccaggggcagcctcttgagggaggtcatcacagtcactcctgatagtggcagtttacaaagcactgtccattccagtgttcgtatttatcctcagaatagccatcttagagaggcattctcatcctattttatgctgactttgatttttttctatcttatcactgaacgtttgagaaattaagtgaatttcccagcacctgtacctaacaaatggcagagctcggacttgaaagcatcaacaagaagctatctggaattccaccatgggtggtggaggcttgttctcctataaagcttgggcgtgtacagcagcagcctctcagctccccatgtcctcccgcaggacgtgcagtactcagacatcgactacatggagcggcagctggacttcaccctcagccccaagtttgccgggtttccagctctgatcaatcgcatgaaggctgatgggatgcgggtcatcctcattctggttagtcctgatgtgaatgtgtgcggtctgtttgggagcaggtatgggttttgttggagaaagtgttatactttatttccatgttgcaagtagataaattgaagtgtagtaagaaatgtgtatttccctggactcacagaaactctacagttcaggtagaagccaacaagttcgccctggaggagttctccttcattctgtttctcttcattctgtggctttgatttttcccaactgacttatgctttgatttcaggatccagccatttctggcaatgagacacagccctatcctgccttcactcggggcgtggaggatgacgtcttcatcaagtacccaaatgatggagacattgtctggggaaaggtataatcctaagcgatgatccagtagtccctagcctgagggtgggtcactgttagagggtcacacgcctgtgtatgttatttttggccttttctatttgggctctgaggtcagaagctctccttttctcaatcaatatttgttgatacagttaataacttttaagtaatataatgtgttacggaattcacttctcttttacatcaatcctacatgataatcaaagtattgctcctaggaacatggtttatataataatttctttggaaatactatgtaagggaaattgtctagtgcatcgctactgaacatgtttctctccataggtctggcctgattttcctgatgttgttgtgaatgggtctctagactgggacagtcaagtggaggtaaagggtctttgtaaatttgggtggagtcagggtttctaggaaggggcagccgttcctgggaatgtggacatgcctgtactgtggacatgggcttggcaagggagaaacacttagggcatgtgtgttggatgtcagtctgtgtgcccattactttataggtagtcatactttactggccactgggatgtagacatgtattattatccttgggatttaagaccagagagctcagatgacttgtccacggttttaggtgacagagtgttgatttcaattccaaggctgtcagattacaaaggcccaagaaattcccactgggcratacctcctagcagtgccatcttttctctgaactggtatacttaactgttgttgccttggttatcccttttaaacagtcttctaacctcaaagactgtttaggtctttttttggtgtatcttttttttttccatgaacacgtttctccctttccacacttataattcctcctctgagcccaatccttccttgggtttctcaactttgcttttacctctcagtttccagccttactgtaaaacttgctctcttctggggatggtttgttgcttgtaatggatccaagtagcccatgcttctgtacctgaatttttttccagattcactaagcgtttcttgcttgaatgatacatggctccttacaggtctaggaaggctacggccccatcctctggccaagatgtgtgtctcctgaactgaggcagcctgtgtgctttactatcaattgttgtgacagtacccacaggcaggattcttagtgcgggtccaagggcttcctggagaccaagtaccttgccctacctctggagctgttcttcaataatgcctattctttctgggcaggaattgtagcagggcatgtgtagcctatgtgacccccacagaaaagctggggagacaaggaaaaggcctcttttctagaacatctgccaggaattgaagggacaaagaagctgacttgtgcagtcagcaatgcggtatatgttgtagtgtctagatactctctcaggatcaagtattaatcagacaaatatccatgttgtgggcacaaatcccagcagctgtaattctgttagcagccactcagaagtccaggggcaaagacctcttttgggagttctttctacgtaatgtaagattgtatcccatggacagaggtgcaggagaaacattgatcaccaggaatgtgactggtgatcaccaggaatattggagttaggccaaatattcatgccttatccagataagctggttttcagggcaagtggtgagtcctagagggaaaggcagatattagacagaaccacacaatctggagccagggactgaggcctggcacagctctgatagggtagggagaacagatggtactgcaaacacgtgatgcatacttctctgttgtcagtctctggcctcctggatcccagagccagttggcagcagtagcactattgatttaaaatgagacacacttggcaccaggctgcttggctattggactgcatgtctttatttactgtcagtagatgcagtaaaacaaaacaaacaaaacagaagctggggctggttttgaagattggcaagaacgagtcagactcagttcaaggctgttttccttatgtctactactgaacaagtatctatctatctatctatgtatatccatgtacccatctatgtatgtatgtatgtatgtatgtacgtatctatctatctacctatctcagtctatcatatctatgtatctaccgatcaatgtattaattcatccacccactctatctatccatccatcctctatctatctatctatcatctacctcatctatctatatctatctatctatctatccactctatctactcaggttatatctatctttctatctgtctgtctatctatctatctatctatctatctatctatctatctahccatccagccaccctattcatttatgtctgtctgtctgtctgtctgtctgtctatctatctatctatctatctatctatctatctatctatctatctatctatcattctatcctatctatgtaccatctatctatctatctatctatctatctatctatctatctatctatctaatctatctccacctctattcatccactcaccctatctatccaaatccctcttctgtctatcatttatctacctatttatatatcatctatctctatgtatgtatgtatgtatgtatgtatgtatgtatctatctatctatctatctatctatctatctatctatactgttcaagggagaagacctagcttcctgtcctctcgtcacctctcacagagaatcacttgaagcttagtggtccaagcagcccacatggtacacaggaacctgcccagccagagaagttctgggtcatgggcttcctgacttttatcaagtagtcagtatcagaaccccacagttcatcagccagtaggggcaacactgccatcctgaggcaatttggaaatctgagggcagtgttggttatcacagggacaccagaggcattcagtgggcagtgggcagggatgcccatagctctgatttcagggaattctccacaaaatatctctcacctcaaacgccagttatacccctgatgagaaacacttcattagggagtcacagaatctgttagctcataagaaattcttggtagataggataattataactattggttggtacaaaggtaattgtagtttttgccattgaaagttattaaaagtaggccgggcatggtggctcatgcctgcaatcccagcactttgggaggctgatcacgaggtcaggagttcaagatcaacctgaccaccatggtgaaaccccatctttactaaaaatacaaaagttagccaggcgtggtggcacgcgcctgtaatcccacttaggaggctgaggtaggagaatcgcttgaacccgggaggcagaggttgcagtgagccaggattgagccactgcactccagcctgggtgacacagcgagactccgtctcagaagaaaaaaaaaggaaggaaagttattaaaagtaatgacaaaaacttcaattacctttgcaccaacctaatatttatattattaataaagacccactcgatgaagctggtgaggatgaagccactgatgtccaggtctggctttactgaatataaaacaaacagccaacagccccatgaaaagcagatttctgagtccaaagctccagcaatttaattcaataagtctgatgggatctaggaattgcattttgtagcatgcaatgtgccacaaaaagagtgctaggtgatcctgaggcccagtgtgtgggtggttatatcactgtttgaagactggagaaagtgaaggcagaagccacaaaggcaagacttgaatatgcacaggtgtaaggtagagccagcacsttggagaayggcagaacatttttatgaagttggaaggggtcatccgagcagtacttagggaagttcctacatcatggctggccaagttcaccacgtgtaccccatatgggatacaattmtgactcwgmtgtggctgataatctctttattctaattgtccatcccccacccatcccgtcgtttctaacccttcctgatctggagctctcwgtttctggtgaaagrttctctttgtcaggtttcctagcttctacctccatttcctaacaaaaggcatccctggcatgcccacktctktcaagattctccgtgatgtgacccactgtcttctcacatccttgacagccagacccatgtaggctggtctgtttctgttttctcatgttccttttcttgccctttatgtagacatatgggttcctacctgccttttgtctattgtgtgtaagaactggagttccccagaccaagtcctcattctgttgcctccccgaacctcctcaccagcattctttagctctttaactcttacaatggtgtgattgtcataaaggaggctatttactgagacatacaaaggaccataatgttccgtaacaagcaacatttatttgctgcttcgaagtggtgtgaacccaccattaaacagtgagtatatattttgtgtcaagttctaagctaagcattgtgcaaaatataaatgtcactcagatgaatataaaacaagcttcttgctctcaaaagtctacaatgtagttaagaagttgtatctggctgggcatggtgtctcatgcctgttatcctatcactttgggaggctgaggtgtgtggatcactttaggtcaggaatttgagaccagcctgaacaacatgaggaaactacgtctctactagaaatacaaaaattagccaggtgtagtggtgtgtgcctgtaatcccagctactcaggaggctgaggcaaaagaatcgcgagaacctggaaggcagaggtttcagtgagccgaggtagcaccactgcactctagcctgggtgggtgacagagcaagactctgtctcaaaaaaaaaaaaaaagaagttgtacctttaacccatcttgcaggttaaaacaaaaacacacctgttattatctgaagaaagatgaaaataaggggaagttgaaatgtcctctttaagtcctctcaatttatcttccacacagctgtagttgtcatgtgattctgaaattgtagaaaacactgaggtgtactggtcttatatcctgaaatgtaatcttattccttcctcccctctcgcagtgggaatgacataggagggagtccctgggtgtttcttcctaacctattaccatgcatctcatgtctgcagtctctccctggctttgtctttgaggagtgcataggaaatggcaggactgacattgagggttgggcatcgaatgcatgaggtcactagttcgggtcattgattgtcatcatccatgtatatatgaagagaacagtttttggatgttttccaaatgccgggaaggtgtgcaaattgcactaatttctcctctcattctacatttctctaataagttaataacattatttaggccctgttcaggccgtctgtcaccatgcagttgaagtatttgtgcgagttgcattctcagtaagtgcctgtttgctgtcttctatatttgtgtgggacaaagaaattatatttcttttttatagctatatcgagcttatgtggccttcccagactttttccgtaattcaactgccaagtggtggaagagggaaatagaagaactatacaacaatccacagaatccagagaggagcttgaagtttgatggcatgtggattgtaagtgtgtgtgtgtctctgtgtaccagtgacacttgtctatctttgtgtgcctacgtgtatgtaccactgaccttcagtcaagaggatagtcattgtccaaggaagactttggacatatcagacacttcctcctctcaggagaggaacagccctgatagccctcacaccttctaccagacctgacattactactataaaacctctgaggcaattgactaggaatttcttggaactttcactgcctcacgcccaccttgagagagatttttttttaaccctctagccagttgttctgtaggggtgaattcatctttctagccagttctcaccaggatttgatgaagctcccagggctggcatctatagggattactggatgttgaacaatgtattcactgcttccttggctcagaattggcaggacgtaattatcttaaaaagtgaggtatgtctgtgtttggcatttctaggatatgaatgaaccatcaagcttcgtgaatggggcagtttctccaggctgcagggatgcctctctgaaccaccctccctacatgccgtgtaagaatccttggccttcttgattggcagarccatgattgaaagaaggattacactggaggagcccgaggccaggggtggccgcacagctcagggcacatcctcatggctgctgtggtttactggggaccagagacaaaagctctgcacgcgctttacccagctgggcatgtgcaagtgactagactcattgcacaaattttttgaatttgtctagaaarcacttacgagtggtcatgccaccaaagggttctcacagctaggcttsttagttttttaggcttatgtgaattccatcacaggaattttttggtgtcatcaatgggtggaaattattggcttgcctttattgtggagctgatggactttggagttacacttgggttcatatcttggttccagaaattgttctctctaggagttttgtgacttttcacagattatgcgatatgtccaaatctcagtctgctaaactgtaaaagacaggtaatgagatcttcttcatagaattatggaaataattggcaagtcaaaagcctaaataagagcctgtcatatagtgtttgacagctgtacattcttcctgacacctctgctttcttcagtgaacttgatgttggaaacactggagccgccgttgcagctcagagctgggggcgctgtgctcatgtctctgggaagacggagagtgacacaggcaggactgaagttagtcttaagatccagggcccagtcccttgaagagaagtcagggagaaacagaatcagggctggatttcacctcaccagttcttcctcctcagatttggagtccagggacaggggcctgagcagcaagaccctgtgcatggagagtcagcagatcctcccagacggctccccggtgcagcactacaatgtgcacaacctgtacgggtggtcccagaccagacccacatacgagtgagtctctgtctcccttctccagctgtcacaacctgtagggattgccagtgactgacatagctaccytacttttcttttcattcccattctaagggttaagaagattctcatgacaactgtgtaatgattcttattagataaacacttagtgacatggagccaggccctgtgattaaaaggaggaggacagatttaaataaggcatggtcccaccagtgaaaagcttaatgatcctagtgggaaagactcacatggagacatcataatgatcacagagggcagccggtggtacaacagcttcagttacaggaggtgaagggaacacagaggactgggcatctctcccctttatttcaaagtgaatcatctttggagttcttttttgtttttcaccattcttggtggaggstaattggtattccactgaattagcacagtcctgctttgtaagctcaattaatagtgtgaattcttctaaggacgatcttataatcttcactgtgttcctcctcaaatatagaaaactaagttttggggaaaccaatagcaagatttagtaattccttactatttttggggcactccagtgagtttgctacagtgaagttctttgtaaagcactgtgagaacacgtgactcgttatctccatcatctgggatcagtggagcccccattacagctcagagtcccgtgttccctccaatcacgcagcaaacattgactaggctcaagggctctgggagcagatgctctatggcctttgcttcctggcggtgccctcagttcacctccttttcccctccaaccagagccgtgcaggaggtgacaggacagcgaggggtcgtcatcacccgctccacatttccctcttctggccgctgggcaggacattggctgggagacaacacrgccgcgtgggatcagctgaagaagtctatcattggtgcgtgggtccttcccagggcctgtgccggtagggcagggagttgggatccttggggaagaggtgaggaggcaggtcgtgagagcgagcctggtgtgacacagctgtgcttctcgttgcaggcatgatggagttcagcctcttcggcatatcctatgtgagtgtccttgggatcctcctaagcaccaagaaggtggggacatctttcagaaatcatcagcaggctccttttatttcctcttgtttcagacgggagcagatatctgtgggttctttcaagatgctgaatatgagatgtgtgttcgctggatgcagctgggggccttttaccccttctcaagaaaccacaacaccattgggaccagggtaggacagtggcccctacctccagtgtttcacttgaaacacagcctccatttctgacctaaagttaatgcagtctgtatttcctgtgatatctttaaaattttttttttttcttttgagacaaggactcattctattgcctaagctggatcttgcagtgtcccaatcatggctgactgcagccttgacctctggggctcaagcgactcacctacctcagcctcttgaatagctgggactacaggcacataccaacgtgcccagctaatttttgtgttttgtagagatgggatcttgccatatttcccaagcttgtctcgaactcgtggcctcagtccccgaaagtgctgggattacaggcgtgagccactgcacccttataaattgttaagcccgtgggtctcagtgagccatattcctcagtgttctttaggttattattatgttttgttcttcttgtttgggcagaattgtaaaaaatataccaaaaagaatgtcttacagtgaaatttcatcagctgtcctaggagagcatcagtgaacttttccagtctattaagaatattctctgggcctcatgtgtagttttcttttgtttagctgtgagtgatcttcmattggagtatgctttcagtgaccttcttaaatcccctagaaattccagggcaagctcccaacactgttctctttctcctttagagacaagaccctgtgtcctgggatgttgcttttgtgaatatttccagaactgtcctgcagaccagatacaccctgttgccatatctgtataccttgatgcataaggcccacacggagggcgtcactgttgtgcggcctctgctccatgagtgagtgtccagcagggatcccaatgcctaatggatgacttattgcattctatatggtgacagttgaattcttccaaattaaagacatgattgccttttgacatgagctcttcaggtgcagaccatactttattactctctttagcacagtgctatacatgccttaggtcattaataaaaggttattgattgaatgagcaaaactgaaatgatgcagtatagcatagaataatttctttctaatttggctgtgcaaaggcctatctatcttttgtagcagtttggttatatgtagccagatcacaggagaaggatttcaggaagagatttgagggaaaagggccatccttgcatttgaagtttgccatggttgagaaatggggcaagtattttacaagagagaatacatctacatcccagcatttctgaagtttgaggcacatcccatggggaaagcagaggctgggtgctcctgatgaagctaggcctaggaaaaaggcaaggatggctcaggggcagctgtatttccgacttsgatctgaacttgaggagcttcttcagagtgtcrggctggggctctgttgggctctgttgggcaccttcatttccctttccagrtttgtgtcagaccaggtgacatgggacatagacagtcagttcctgctgggcccagccttcctggtcagccctgtcctggagcgtgtgagtatggaggcctccgatgaggggaggatcctagctgtgaggcttggggaaaaggacgaggagaagaggcstgagctggtgggggtcctaagacatggtttcttattctacctgtgtctcttcctctctttctgagctgaagtccatcacttaggtgttcttggcctcagctccttcatctttaaaatgagcctaacaattctggttcataggatgatcaagaagaaaacacctcatggtatattcaatgacacaatcgtttcttcgttaactaaaataaggaatagaagatcagatgggggcagtattgtaaagaattcataacagtcctctagcactattacaacttttcagaaggattgcttggcaatgtgtgtgtacttgtattgctgctggctaacccttcccttcctctgcaggagctcctcccagcagtaaaagccatttctttacttctattgttgattaggcttctgattaaaataccagttaattgcaccttcccaaaatcttttttttttttttgagacagagtctcactctgtcatscaggctggagtgcwgtggtgctatgtcagctcagtgcaacctctgcctcccaggttcaagtgattctcctgcctcaacctgccgagtagctaggactacaggcacgtgccaccakgccyggccaatttaawtttttttttttatttttagtagaaacagcattccaccatgttagtcaggatggtcttgatctcctgacctcatgatccgcctgactcggcctcccaaagtgctgggatgacagacgtgagccaccgtgtccagcccgcaaatcttatggtacccacagaatttttttctgccccagacacaacctcagttgtttgtctctttaagagggaatggcrtaagcctatttctataagcaaatagtgaattttttttttcccgaagtcctgggtaccaaagtgctttatgaaagccacttgttttggggtagacagatctctcctgtttgaaaaaggaaaagggatggaaggtttcctcaataggtgacctcctgggacatgaggcaagtgggcccaaggccatcacaattatttaacctctttcctaagtattttggtttctctgtcctggaaaatggtgccactgccacaccttgtttatgtttcattttagaatgccagaaatgtcactgcatatttccctagagcccgctggtatgattactacacggtaagtttttctgaatgtttatacaacacgggaaaatggtagagagtacaaaggctttagrtcygatagaccttaggtcaaatgctggctctgtaacccacctgctgtgtggtcytagagaagccactttaacccttgtaacctcggttttctcacctccaagtggagtaagaccacttccctcatagaactgttgtgaaatgacacataaagcatctcactcaggtttttcgtgggtgttctctttgtgttaatttttaatattttcttatatcactgctatttacaatgttttgtaaaggcagatgcttttgagattgtgttgcaaactatagtttttgtttttaatgtttatatctttacctgctgtaagtttgtaagcatagaggcctttttgtctctgtctttttattaaatatctccttccatagcatagatgctcaaagaagggcactgcacataattacctaaggtaagcaagtgattaggcaatgtgcaaaacacacacagaggtatgggacccaacccttgtgagtctaagcagtgcaagtgcatttagaaatgrggaagcartaagagctccttgccgcatagtttctgtgctattatgttccccaaagacttatctgggaagccagggtcttccagggcagctctggrgtggtgggctcttgctgggaccctgacaagtcagaccctgattcttggggwagaatcaaagaaggcatttccttggtctctaatggggcctcttctgactttctgaggagaacatcgttgagggctggaaatacagcaaaggggtacaagcagggatacaggaagcagagcatgtgctggcccctttcatccaaggggattgcagtgagattaggtgaaaactggagaaggatgtgcattttgttccttctcttctcagtccattggagcccaagtcctctccacagccccagactcctcttcctgctgctagtctggatctgcccttagggtggtaacatgttaaggctctgctatgtgtgtcccagccaggcgtttcccaggaagaggtggccagctttctttacgtgagactggcctttgtcctgagtgtgcatgttgagtctcccattcactaacagaagatgtctttggttgaagaggaaaagacaaaagaaatcatggagcaagctatttagaaaaagatgaaattttgatgtttaattaaaatgaagatgaatttcatagttaatattaatgaagaagtgtcaccttaattaatcttcccaagtttgggtaactattactcattctagagcacaagctggcaaaaactatggcccacagccaaatctggttgttagctgatttgcaaataaagttttattggaacacagccatgcatatttgttcgcttgttgtcaacaataactgcttcttacctgtaaagtagcagctctgaaatgagaggattttgcctaccaggggacatttggcaatgcctggagatatttttggttgtcacaacagagtgggggtgaggaggtgatgcggctgacatccgaggattctgctaaatatcaaaaggcacaggatagccccatcgccagagaattgtctggccccaaatctcaatagtgctgagactgaaaagccctgctctagttgagaacatgtaggatggaaggatggtcccttaggttctgatacaggtgagagagtagcacctcttcctgtcacacatcaggcaaatgtagtttgtacagtggaagcaaaggcaagagaccctaacaagatattatagcagccttgcaagatttcttgcagcactgggtgaatgcagaatgggtaatggcaggtatgttgcaaagggtgatgagcaggcataagttcagaagggaggatgagatgtctggcaggatgcattgttcagggaggggcctgtcctctccttagtcatctcttaccttcttctgcctccagggtgtggatattaatgcaagaggagagtggaagaccttgccagcccctcttgaccacattaatcttcatgtccgtgggggctacatcctgccctggcaagagcctgcactgaacacccacttaaggtaagtgacaggactcaggttttcctttacatgtcagttagctcaacaatttgtaatgaagtccaccaaaatgtaagcatcactctcaaacccacatgcaattctactcaacacttgttttttctttgtttgcttgtttgtattttaacctttttcagactctatactcttcgactaattattaacagctcttttatgtctaagtgggtgagttgataggtctaagagtgtcatctttcaatctcacaattgaaatggaagtcaaaataggagccaccacgattcataatagttttagtatactattgggtctgattgaatatttcctaataaaactattgctgaaaaattgtttattcctctacaagatgttaaaattctagatcaaagtctatgtataaattaaccatagctaacatccagtgagtgcttgccctgtgcctagaactatatgaatatgggcatttccatgtggaaattatctattttttcttagcaaaaggaaaacataaattctgtgaggttagtactgttaccaccatttcatagatgagcaaaaaggctaagtgatttgctcagagtcacacagctactaagtacatgaatgcggactaaaattcacatctctctggtatcaatactaacattcttagactccctattcatttgattctaaagatttaaataaaaatgaagaacttaggacatttgaaaatagaactccctgtatatgtttcagatattaggtcacgaaaacagattttcagcatcaggattttcctttcaaaaggaaaagaaagaacccagttagtctggttgtcattattttaagagccttaaagcagaatcctcttgattcattcactaattcatttgttcatgatatgaagtcatagagccagacagagacagaattagaactaagacacaagtctcttgaattctagtatgcagtctttatcccccaaagcacttccctttgctgctttatgtttgtatgtaaagtcttggtttgtggctgtggctttacttttagctaatgcctctctgcctgctcactgcagccgccagaaattcatgggcttcaaaattgccttggatgatgaaggaactgctgggggctggctcttctgggatgatgggcaaagcattggtgagtagaggttgcctgagattcatgctgatggcactgactacattcctggattatcttacaggcctgctttcaccttttccctattataacaattttgcattttaaaatataatcatttgttaattcaagggtataatccatattggacatgatctttattcctcatgtaaatgaagctcagttctgaatcacctcccattrtgcaacctttgtaatccactatagaaggtagcaatatgggagccatggggaaagtttatttgtagccagcggagataaactttcataggatttatggtcaaggacacattccygaattacatggtttactgtcccagtaagaggggtaatacctctatccgttgtattatttatgggatattttctattaggagtttataggaattggtaaactctcaggaggattgctcaagaaattattagctatttctagacaagtgctatccaatagaactttctgcagtgatgacaatgttctatatcttctgctgttcaatattgtatctagtaggcatatgaggctatcgagcatttgaaatgtgtgacaagtgcatctgaagaattatatttttaattttattcaatcttaacaagcttaaatttaaacgtgttacattttactagtgactgctatcttagacagcacagttctaagggatagccagtggcaactgactgagtggtgagtcatttagaaaagggccagcacagtcgagctcagtgcctcacgcctgtaatcccagcactttgagaggccgaggcagccggatcacctgaggttgggagttcgagatcagcctgaccaacatgcagaaacccyctctctactaaaaatacaaaaaaattagctgggcatggtggcacatgcctgtaatcccagctacttgggaggctgaggtaggagaattgcttgtacccgggaggcggaggttgcagtgagcygagatcatgycattgcactccagcctgggcaacaagagcgaaactctgtctcaaaaaaaaaaaagaaagaaagaaagaaaagaaaagtgaaagaaaaagaaaggggccagcacacaggaaagagtgtgacagccacgagggcagggtgtaggatgggaatacttgaaaccaagctattgactagttcaccttcaccggctgtgctgaacttcatattcttcctaggcctgtggcacacatttaggataaaggacaaagaaggcttttctttgatcatctttgttctctggagatcacatttttaaatttgcctaatacctcaagataaacccaccaagacaccagtgttggtgtttgcatatgtatatgcatataaatgtgtgtgtggagatgtgtacatamagcaaaagaaacctggaaattctgagctggttaggaagatgctgggatggtagaccacaaggaagagaagtgacttaaaaatggtgtcaggaaactgtgttatatgaagtgactctgtcagacagatgtgtctatacacattcatttcaagcattttgtgtaaactgagtgtgggtgcagggtttgattagtctccataaagagcacttacattttaaaatagaacactcaaaagacagaaataaaaacaaagataagccttactctctcaaacaagacaagtaggcaattagaacagcatttatatattctatagcatagagttctacagcacaggtccaggccatgtttatcttgttttttgtttgcagatacctatgggaaaggactctattacttggccagcttttctgccagccaggtgagtgtgattgatatgaagtgagaatagggttccactggcttaggagggtgctgaatatcgtaagggcataaaataccacctagaatttcttcattgctcatcttgctaattcacattcttctacttctctagacttccggtggaaatttactatgctcccaggaggctttctgcaattaaacctatccacatctcatcagtaatgatcattattctagtttaccatgttacaggtggacgggcagtttctgttatctagcccttgttcctgagttgccttggaatggtctgcacattttgggattcctccacctgtagaatataagtatcttaacagctgagaytttttgtctcctgtagagttcagggcagtgcgaaagaccctgtagctgcttgtcaatgcaaagtggatgggagttggcaataggccatagagtgatgaaatcatgatttccatgatccaaagttacaagatggtgactctgaagttgtcttactttatgacctacatttgtgcctaaaaagaggttagaaaaatttgaactaattctgctattatatttttcttttatctccaattcaacagaatacgatgcaaagccatataattttcaacaattacatcactggtacaaatcctttgaaactgggctacattgaaatctggggagtgggcagtgtccccgttaccagtgtcagcatctctgtgagtggcatggtcataacaccctccttcaacaatgaccccacgacacaggtttgtgaccagcaaaaagtgcgaatggtattctccacccttaatatgcctagtgcagtgcctgactgcttcccttccaaatgatgccctctcctgccaggccctccgggaatccctgagttttccatgtgttaggaatggaccacgtggagatgaatgaaaaatcatggtttatcatcatttggaatccatggcctggattcttactttccatgtttgtcttcttgtctgcaaacctatgtaaaactttgtcttgactccctcacctctgcctcagagatcaacttcccaaacaggttggaactatcatattttatcaaatatgataccatcagtgaaaattgcttcattatttcatgtgccacaaagaaagaaaaaaggatgacaaaactatgatagaatgcttccttatcactcaattttttttttttttttgagacggagtctcactctgttgcccaggctggagtgcagtggcatgtgatctcagctcactgcaagctctgcctcccaggttcatgccattcttctgcctcccaagtagctgtgactgcaggcgtctgccactatgcccggctaattttttgtatttttagtagagacaggttttcactgtgttagccaggatggtctcgatctcctgaccctgtgatccgcccgccttggcctcccaaagtgctgagattacaggcgtgagccactgtgcccagcctcagatttttataataaacttatagaaagtttttgaaacttctttagccataaagttttacctatatatttcaatattgtaagtgataatatggaggaaaatgttgagtggagatacattgatgattctgcctcaacgtaatttaaaagaggtagaccctaaatgtgaagaagcactagaaatagcttaaccaacttgtatcgtatttaaattgtactatttaaattcatattaaactgttttattatttagtttattgtatttattattatttagaagaaaaatatgtgttacaaattggttaagatatttcctctgtactgcaaaaggtgttggtgattcagcattttataaaaattcttccactagtgtctatgaagtttttttcctgagccactaacacactttatatacattttcatcctagtgctttcttgatcttactaaatattccttcctgtaataatccttaaatgttttcagcccatccattcataacacagtaatagcaatgaagcttacacaggcacagacaataacaattatgccatgagtgctgcttggctcacagtaattctatggttgtcgattacaagacacgctcttgtcagatgaatgttaaatatgtgaaaaatctgtaccttgggattaatgctgtgtagtggtcctgacacttatcatcccgatggtaaatgaaactttcttccttgtgtgcttacttattattttttttcctgaacttttttctttcataatccttcctgatgattaagcctgaaacaaaagttttcttycagttttgcattctttacagttatttcctcatacttgtggttttcttgtcaacaacttccccaactataccataaaggactttgcccaatcctgttgctgaccagctcagggacagacatgcaagctgatgagggcacatgcagtgaaagcttcttgacagcatctgcctaggaagaagcaggaatagtggactcttgctgggcaaacactggggtgctatagtggaataggagaaggaggaaacagaaggatggtgccaaggaaaatcaacacctcagtagaatggaaaagagggcattctctccagtttgtgcagttgtttctcttcagcggttgcatattgaacattttttttttttttgactgagtctcactctgttgcctaggctgaagtacactggtgcaatcttagctcactgcagtctccgcctcccaagttcaagtgattctcctgcctcagcctccctagtagctgggattacaggcacctgccaccacgcctggctaatttttgtatttttattagagctggggtttcaccatgttggccaggctggtctcaaactcctgacctcaaatgatccacccacctgggcctcccrgagtgttgggattaccggcgtgagccaccgcacccggcccatattgaattatttaaaggcccatctctaccactgaataatctttgtactctaaaaaattagaaaacacccttctcatctgaaactttgaaggcagtcttttaactagacaatacaatgtagaagtattagggggttatttggactggatacttgcacctgatttatttgcatgcaggaaatttcaacaccggatgcccaattcttttcctttggttcctaacaggtattaagcatcgatgtgactgacagaaacatcagcctacataattttacttcattgacgtggataagcactctgtgaatttttacagcaagattctaactaactatgaatgactttgaaactacttatacttcatactcataaaaattattgtgtgttgctaatttgttcatacccactattggtgaaatatttctgttaattttgttatatgttttttgtgtgaaccctaaaggttaaaccttagccctgtgggataggcagttagggaggtgtggaaaatctatgcattaccttaatgtctctgtgtggttagtatggtagtgactgttcatcatatgacatttactgaagatgaactgggtccatgatgaagtgtgtgtatgtccacgtttgtaatcatagaatggaccccattcttttgttaaatacacaagagaaagctttctgtgacagttccaggtcttgaagctaatcagcatctcaagaaagtatccagaaagaacatctgctagttggttataggcggtgggaggaataatatacctaattggttataggtggggggagcatgataagcaaagaaaaggcaaacacaaggaaagatcagatgaaacagaagatgatagtaaaagtgatcctaagtaagaacataatgtaaaattgtcagcagcctcatggggaggaaaaaggaagagtcaactcacttgaagaagagggtcttgagaaatccttagcataaagggctactggtgagattgagatctgagcaggcaaagctcaaaagagagtttggaggttaaaaataatttatttttgcagtagtgtgctttgaaatgtgtaaatcttatttctaatgtatacaaccacatttcacataaaaatatgcaatttatatgccagataaaaataaaacaagtgaatttgcaagtgattttgaattttgtgctattttgaccatgagtaatctctgtttggggttaaggttcttgtttagcaaactcttatgaatttgtctttctggttctctttggcatcacagaacctacagccaaatccaccaataggatgataacctttataattatcctttttcttacatctctgcaaggagtcttttataagatgtgggtttgtggaagggtctattgattactattttaatcatcatagcagttgctatatttaggaaaataccaactccagtaaaaataggagttgcaaccttcttgcttaaaattctatagggttaaaatgtgagataaggaaattatatattaatgttcaacaggaatattaacttttgatgttacctgaaaatgagttgaaaatgaatgtgtgtggaatgaatgaacctacttctctgtgttttcttcttttcttataaccaggaagccattcattctccctgcacactcatgtgtcagcacctgcataaggctagagacaaacaatattgttaaatcatctaatgatcacaataaggggcatttggatgagggcctgagctaactaggaaactggtgaaatatggaaaagcagccatgggaatcctttgatcaaaaaggtgggaaacttgtcagctttcctctaacaaactcaggaaggccacaaagatgaaaacgttatttacttgatatttaaaaaatatttaatgttaccatcaaggatatgttggtggaatttggctctggctgccacaaaatgcttaaggagaggcattctgactatataattctgatggctaaggccctagtgaggccagtggggtttggagcacatgaagtgtcagggaccccactgacagcctagtgaaacctacggaattcttcctcacaacattgtttttaaatgcatcaagcaaaatgcatgctatttcaaagaaaacttatcatattacgatacacttatccaaatattaaagatgatatagtaacccatgagatgtgtttttttcattatcaaattaaatgaaaagatccaacagtggaagtaacaatgctataatttcaatgtaatgatcaacatcaacaatattttgagatatccactacaatttcataatgtaatatggaaagatctgtgattgcattattgacaaactcatgtgctatgaaaactactgtgttttgttgtctacattcataacctaacaaaatgctaaatttcagccagaaatgtgtgaaaaagagattatctgttggaaccaatatggcttaccggagttaacgcagaaagagcttgctgacgycacagcctgaatttccaccacaggttcttactaactccctcccaaatttgcacatgagacccatgatgaggcatgaagagataactgtgcatgcctgaggactttctagatttcctctttcttttaccaatcacctgctaatcccagaatccaccccctaagtctcttctgataaaaatacttccttaaagccagcacaggaagacaggtttgagctggactcctgtgtcctgtgagtcgactttgcaataaaagcttttcttcgaaaccctttatcagagtattggcttctagcgcatcgaagagtgagccctttcgctcaataatacccccagaggttgttcctcagatcacagtctgagaaccacctctcatggaaccatatccatttgtggccatcccagagcagcccctacaacatggacctatgcttacaactcctggccagctattcaggaagaggctgggggccttccttttccacatatgctctgtttttcagatcacataattttactttcttcataggtgtgccaaaataaaaaaaataacactctcaaactcttccacttaaataggaagacatctattcctttcttattaatgttataacattaaatgtcatatatacctgcaaagataaggttatgttggccgtggcagatgtcttcaagatctcatcaatatttctttgttcttgtcatagcagcagagtcactgagagttttgcatctggccttggagaaaggtgttctggaagttaagggtgactcatattactagtttctgatctgatgattccaaccagcagcttgctgtgacaactgtttgagttccgccaatagctaactttgccgtgccttgttaccgatagacaactggaagatgtcgggtcacgtgcytgtctctacccttcaaagtggctctgttattttctcattggtcaacaccagtatggtgattcaatatcttccagttactagttagcaagaatggaaggtgaaggtagctattttctgcactttaggaaacaggttatagattagctgagcctgttggttaccactattaacataaatgaagtcacaaatgtgcatggcatgtggggagttaaaggtaaaatatcacacaaaaaatagatcttatgtaacaataaaatctcccttcttgaccttttgccaggatgtcttcccaatttgaaatgagatcttggtacatttcccctctaacaaaggccaccttgtactggggcaaatgaaaagctgaatatgtcattccagcagttcataaatgcagaaaccgagtctctctttctctctctctctctctgtccctccctctctctctctcactttctctctctctctccgtgtgtgtgtgtatgtgtgcttttccacatactgagcatttgaagcaaacacaaaagattcactactgtgaacactgttatttacagttcttaggtgccaccaaaagagctctctgtaccctcatatattactggcaggaatgggggtgtaaaatggtgctgccacattagaaagcagttttgcagttcttcaaaaagttaaagacttgtcacatgacccatgattccactcctaggtatattccaggcagaattttaaaacgtgtcagctcatagcagcatcgttcataacaggcaaaaagtatcaacaacctagatgtatatcagctgatacatgcctaaacaaaatgtggtctatccatgcagtggatactatccagacatggaaaggaacagacactgatacctgaaatggtgtggatgaactttgaaaatatcatgccaagtaaaagaagccagacacagatggccacatattgtattactgcatttatatgaaatgttcacaataggcaaatccataaggacagaaagtaggttagtggctgcagaaacagggggagatgggaatggggagtgaccactaattatttttgggggtggcaaaaatgttctggaattagatagtggtgatagtttcagaattttgtaaatatatttttaaaaacactgaattgtatactttaaaagagtgaatcttatggtttggaaattatatgtcaatttaaaaatccactttagctggcttaagaaaaattttaaaaagatattggtgactcattgaaactccggtaggactagagagtcaggtttgtaggccatgtggctagggacaagccccaggttaccctgtagcggtttctactgccactgccctgagcacatatctggcagctcgcaaccccaaatactgagcataggatgccactaggtctcttgtccctgctgcctctgaaacgagctatgcttccaacatcctggattttacatggtacctccttatctacaccttcttctggatgtaagtcactcacaggaatatctcattcacaaagctccagccacttgcctctaccttggatgaaagaaaggctgtgaaagagaatttctagctgtttctttggggaggcagaatttggagaaaaagtccttaagttgatttaagtaagaggttttctttttctttttaaagaaagatcctccgtttttaaatttttttcaacttttattttagattcagggtctaagattcagggtgcatatacaggttcatttcaagggtatattgtgtgatgctgaggtttggggtgtgattgaacctgtcacctaggtagtgagtatagtacccaataggtagtgttactacctttgtctccctccccacctcccccatcttagcaagaggttttgaaagatgctgagccatcgaagaacatgacaaatgtccactagaggcatcttcccactttaggtttgtatacattctttctcttttattttttttgagatggagttttgctctcgttgtccaggctggagtgcaatagggcaatctcaactcactgccagctccacctcctgagttcaagcgattctcctgcctcagcctcctgggtagctgggattacagccgcctgccaccatgcctggctgtgcagatggggtttcaccacgttggccaggctggtctcaaactcctgacctcaggtgatccgcccacctcggcctcccaacgtgctgggattacaggtgtgagccactgcacctggacgggtttgtataattgctactttaatggtacttcactatttagaataattggtggaaaggatcatttgaattaatgaaaagctgagttataccaagagaactctggaggatgaaaatggagaaaagaacaaagtgatgaactaagagctaatccttctttcacttacttattaaataaatagctatatatttaaaaagaactatggatattgggcagagtgctaagcacaggagatacaacagtgaagaagatagacaagaccctagctcttgagccctttaggctacatgtatagatgaggaaacataacgtgacaagtaatcagatatgaacagggatacagaagagggacaatgagtagaaaaaaaaccaccttccccttttattaacaaaaggagctttcattctgtgtcacatggagaacaagtgttcttttatgacctattggaatatgcactcccctcctccagttgctgtcaactttataaggcaataaattaattgtggcagaagctggctacctcagcccagttacctttgctcagtgctccctatgaattgctgagggagagatacagcatagaaaaaaacaaggtgatgcggtgagtacgcttctccatgcaagcagggctttgaacaagggcaggaaggtccctttctttttgtgtgattttctgtctgctgctctgttaagtgatctggatgcccatgttttccttctggacttaatattttcttccttttccataaaatatgaggagtgaggatgagatagttgatggagaggagagactgtgtgtgtgtgtgtgtgtgtgtgtgtgtgtgtgtgtgtgtgtgtggtgtcagtgtttggaggacaggttgggggaggtctggtgtgagatcctcctctctcactgggagaaattaaggacagaggaaacagatgggatccttctggaaactatctcaagatggcatggatttggaggaaggtgaattcctcccagctttgggcaggaagggtttctaagtaggcaagaatttctacctttaggaatccccatcctgtcctctgcctgaatgacaatagctcctaaggcaggaaaatacccagggttattcccagagcgttcctgtacttcctgagctaaggtgctgaacctgctccctcaggaggattgaggagctgtggagtaggtccctgctgctgatttttagaagctagaaagaaaaaagtctccctgtggagagaaataatacttgcagaaagagaccaattgatgaataatgcctttgctgtggtattgagttgtgggctgtatgtataagaaacgaagtttgataccatagcactcttagggtaggtccttcctacttctttctctacctgaaattccaccattggagaccgatcctctaagtctttaagctctgcagcctaggatacattgtcgagagagtattcaagtactattttaaaaagtagcggctctcggtgtttgtctcagttccaccactaaccgtgactagacaaaatttcttaatattcatctataaaat
